United States Patent Application Publication US 2006/0154250 A1 - sequence listing, part 6

SEQ ID NO: 653 - DNA, 151858 bp, Mus musculus
  misc_feature (1)...(151858): n = A,T,C or G
tctcctccttctcctcttccacccccctccacctcctccttctatttagaaactttctgaagttcttacttcaaaaattaccctatagactgtgtgtgttctggctcatgcctatgatccttgtacatgagaagtggaggcaggtcaggggttcaagtaatcctctactgcatatcaaactagctgcatgaagaagactaagatgaagagaaagaggaggagaggaggaggaagagggggagggggaaaaaggaggaagagggaaacaggcaaggagaaacggcaatattgtgactcagaaacgtgaactgtaaatgtttcaatatttctacccctagtcttctttcatcttttttctcatttctgcatgttctgattggtcactaagcctcattcatggctttgatcctatgttcttcatctagtttgaccctatggtggactcacacatatatacttattgtattttattttgctttggagaccaggtcttactgtatagcccaggctggcttcaaagcccacatcctcctgattggcttcctggatcctggtattgataatgtgccctgtaccaggaggacatgaaaacctaggggcaggctcagtttgtaaagtccttcctgcacaagcaactccgtttcagatccttagcacccacgtttttaaaatgccaggtgtgatctgcattttaaaaactctaacatgtggggagtgggtgtgggatgggcaggcagtgaaccagctttcatgcatgcactcatacatacatatatcatacacacatacaatcatacatacatatgccacacacacacagacacccacatataagaaaacctcttgggactagagagatggctcagcagctcagagcactgactgctcttccatagatccggagttcaaatcccagcaaccacatggtggctcacaaccacctgaaatgagatcagatgccctcttctggtgtgtctgaaagcagctatagtatatttacatatataataaataaatacatctttataaaaaagaataagaaaacctttctgtagacaggtatgttgctgtatacctgtagtcccagcacctgggaggcagagatggaaggatgacgggtttgaagcaagcctgggttacaatactgagaccctgccctaaaacaatcactaagccattctgaatttctaccttatgacagacaagatttcatatgaccaccaacccatcaactttccaatctaattctctagccacagggaactctttcttgcactcacatccctgtgtctctggggtttcttggtgacttgctgggctggagggcacttttctcttttctacctgactaactcctaggtaacccctgagcttcttgcttctgcctctatctccccagattagctttttgaatgtgtgcgttagcttggaggtggcagtgtatgccttcagtcctagaatgtatgaatcctgggcttccagactgtacagccatggcccatggtttgtctgtctccgtattctataagttccttgatagaagacaaagactccagtttagtttgtttgtttgtttgtctgtctttagcatgatgtgcagaatcagacacatagtagatgcctgataagcatgtggggatagaagaatagatggagctggcatggcagtgtacttttgtaatctcagcccttgagagaagtggaggcaggtggattaagagcttaaaggttgggctgaagagatggctcagtggttaagagcactgactgctctgccagaggtcctgagttcaattcctagcaaccacatggtggctcacaaccatctgtaatgggatctgatgcacttttctggtgtgtgtgtgtgtgtgtgtgtgtgtgtgtgtctgaagacagctacagtatgctcatataaatttaaaaataaaagaactcaagggttcaaggtcacccttcattctctgagggtaatgtaggttacctgaggctttatctcaaaacaagagcaaaaatctcctcaacacaaaaacaaaagaaaacaaaggagtgtgtgtgtgtgtgtgtgtgtgtgtgtgtgtgtgtgtgtgtgcaggcatgtaaaggatttaaggtcatgtatacaaacctaacacaaagtgctaagatgaagtttgaactgttggtgtccccagcaccttgcatacaaccacacactggacttccctaatgagatgggtaacaatgaggagtcaaaggccccagtggtcaagatacttgctcataggtgacagggacaggattcagggtttggcctttgcctctatattgttttctttccatgggaagggtctcagatagccagggctggcttgaactccagttcttcctgcctctgcctcccaagctggatttacaggcatgtaatgagatgtttggcagactgtgttcttagctactgtacctaccctggcgagagatggttggcgtgcaccctgctgatggatggatagactatcaaaacaaagggaaacaatagaagcgaagattagaatgttcactcacagggctggtgaggtggctcagtgggtaaaggcatgggtagttaaaccccatggcctgagtttgatccctgagtcccatgtagagagaggagagaactaactcccgtgggttgtcccctatacctccacatgtgcacacatacatgcacataaccgctagataaagaagttaaaaagagtgtttcttttttaagcaatttcttttattatttatttatgtatatatacagatgtgtgtgtatgcagggatgtatgtatgggtgttttcactaaagccagaagaggacctgggatcccttggagctaaagcgcagacagttgtaagccacttgaggtgggtactgggaactgaactcgcagcaaatattcttcaccaccgagtcacctctgtagctccagtttttagaactttgaaaccagcagagtctgtgtttcacagacaaggctggcctcaaacaaacttccagtattcctgatttaggtcacgagcactggaattataggcatgcctgtatgtaccatgcctgtatataccatgcctggtaatgcttacatcatttgaatatgacttttatggccatatctgcagttaattcttttctgtaaaaaggtcacatcctacagtatgtttcacattaaaacctctgagaacacaactgaatcaaggactcacacctgcactactagttatccacttcgtttactctaagttacattcagtaccttgacatcacccttcagctgttctcacatatgatcctaagcctgagttgagctgagcttcttcagatacactcctctgaacatttgggatcctaatatttagatgtatatccacactgcctacttaagtgctaggcatgggcttcgttctccacccctctaaggctcttgctatgcacctggccttgaacttgcaatgcagcccaagctagccttgaacttgaggcaattctcttgcctcagcttcctaagaattaggattgcaaatatgtgctaccacaccttgctcagacactgttcttgggcccatttagatatagccaggatgatggccatacagattcatatgacacagtactatccaaaaatggcatcctctgagagatcatggaatgtcatgattaggatcagaaagccaggctgcctgtctctgccacatactagcagtgggtccttagctgtgggtcctacctgctctgcctgatggtcttttcatcaataacaggaacaggacggcgatctccatctcatgctgttgccataaggtttacacagttaatatatgtggaacacatgatattgtctggcaaaacactctaataagctgttaataaatattagcaaatttcatgttggcagccttttctgataagttttgccaattgattgggttctttgtgtgaggctgttttccattataaaataaacagaaatctagagatctggtgtgggggataaatcttaaagagatataaaggaattaagagcatttgctgccttaacaaaaccagttcttggccctgagtgggcctttaagggcctatgatttacattagtgctgcctccctctcagcggggcagtctttggcacagctatttgtgcaagagggacgaaggtcaagggactcctgtattgaaggcctttcacaaaatgaaggatttggcttctgagattaatgttcggagggaacccctgctatacttaattctcttttctgtgaactcagtacatttttaaaattcagttggaggccctcctacagtgtggcatggtaactgccaagccagactccgactaatagatttctgaatggccctcctcacccatgcgcggtcaccacggtctgggtttggcaaccgggtttaatcctttggattagagtgcttgcggggataacatgtcttgcatttgcacatattagatccagtggggatttaatattaaagttggaaatgaaaagtgttttgttttgttttttttaagtcctctatgagcatggtcctcagataagaaaacccaggaggctgaaaaaatgatcatgaggagaggcctctcagactctggtcgcgtgttgtgaattaacatcggattcagtttttggaggacttctaatgaaggaagtctcaccagtgtccatagagtttgggacccaagtgggtggctttatctcatctcccaatacttgttctggttcagataaaattcgaagaaataaaggagagaagaaaataaaattactgatatgacattgtcagctcagacaagaaataaataacaggtgcccctgacccaccccaaccaataaactcagccatttatcataacctgaccgtgatcctagcaaaacattgttctgtagagaaacagcagcactgatgccctgttccagacacagctctttgcataccgtccatttagacctcccatgggccgtttaagagaataactgctatgtatcaaaaatgtagtgtgactgaggcagctgtctctgtggtggaggccttgcctagcagataggaagccctgggtttcactcctcagtagtgagggggaaatgattactgggaagaaaaaagaaaaaaaaaaaaaagaaacctctgtctttctgtgtctgtgagtgtgcatgcattgctattctatccttataatgagcagacaggaactgccgtcggcagaaaggtgaggttggagaagtagatattttaatacaccagagaggggactcactacgtcacgttggctgttctggagcttgctgtgtaggtagaccgggtcagtcttgaacgacaaagccttctcctgcctcagcctccagagtgctgggattaaaggcattggccaccacacctggccaaaggccatcttttttagcttctttaatctgtttcttaactgggtgcaggaaaagcggccatagcttcagtagccatggaatagtgagaagccattaaaactctacctctctcacctatcagaaacttggagaaattcctggcaactcagtttttgaatctgagctctggcgtaaagcaaatgatttgtgccttatctatctagttccatacagttgtggtcagcataattgataattattgtttctttggaaatgtcgcatgcgagtaattcttactgtgttgtggttctttataaaggtctgaggcttgcctcttttaatgagaacgtcttggcacagcactgaactaagatttaaatataggaaagacaattctttgagagcctggggtaggtgttttccaggtaccaatgcacaggaaatggtatttcccgtgtattttctaagtgccaggaaccgggctgagagttcaccttgcatttaacccctaaaaatccagaggagtagatgttatttcacaaatgcgggagctgaagctcagaacagccaagcagcttgtgtggcatcattcatctcagaggttaaactgaaaccaggtctctccgtgaatgtgtacaatgtgtgtatgactgagcatgtatgtgtgtgtgtgtgcgtgtgtgctcaagcatgtgtggaggtcagagacaaccccggaggttggaccttgccttccaactcaggtgagacagactctctttgttgtttgccactgtgtgtggcaggccagctgacccatttgctttccagggagtcttctgttcctacctcccgtgtcaccacagaagcacatgggtttcagtgtgttctaactcaggttcccacacgggtgcaacaagtgttagccactgagccatctccccagcccaagattcaaaccttcctgttctttgtactgattctggaacactacctcagaggcaggttgggacagaggcagaaagtccaagtcatggggctcaagggctaatgtgactcggagtaggatgttgtgggcatgagggccatccacaaaacagaaataactaaagcttgttttatttttccatagtctgcattgtgttgttttggttttgagacagttttccttgtatagctttggctgtcttagaacttgctcttgtagaccaggctggcttcaagctcaccaagatctgcctgcctctgcctcccgagtcctggggttacagtacctaagccatcaccaggctcatccatcacctgccatttaaaacgtttatttagccaggtgtggttgcactggagcaggaaggtagcttaagcacttatgttcaagagcagcctgggtgccattggtgcaatgcagtctctaaaaaaaatctgagttatctttgccatacttatagggagaggagtagaaagtagggaaaataatcacatgttttacttgaccagcctgggctatatggaatcttgtcttaatccccctttcaccccttttacacttcctaaaaaccaactcacaaaagaatcatactcacttggaagctgggtgtatcagtgcgtgcgtgcgtgcgtgcgtgcgtgcgtgcgtgcgtgcgtgcgtgctgtgtgtgtgtgtgtgtgtgtgtgtgtgcaatcccatcactgggaactgaagcaggaggatagcaagttcacacaacagcctgggattcggtgctacagtgttatgcaaacgagccacaatagcacagcagtttactgtatcaatgagcagacaggaaaagtgcaggcagcagttgagcacttgaggcaaaggagcagactcggaagcacacaggaagacttgcttcctggagcctgtgcctttctcaggggctcagttcccaggtgcagctagcactacatcacagggcttctacacatttgcattcattcgaggccaaggctcaacaactgagctgcacctctttcatcttccctcccttcctctccttccctccctttcttcgctgttgactttcttgctgactttaacagaccccgttgctctaatctctgtggtcctctcatctcaaggctgggcccagagcttcctatggaaaaacctatcttgaagcacagagctgtgcctcctgtagctcagaaagtctcttggaaactgggtttcgaagccttttttacagctgcggagtcttggtggctaactaactgtatcaacccctagaacagttcggaactgggagttttctacagtctgcgattctcagtacatgtgtgcacctatcgacaaagtcttgattctgaattcagaacatggttaaactggcctggcttgacttttgctgcctaaaagataaaagatcgaagatcaaaaggatggagaacttcagaattcctggctggcttcaggaattacttttactaatggtggtaagatctgacttttcgattagactggaaaggtcggcactcgggaaagttggcctgcttacctaacctctgtacggacagtgtcttcacctccagacctgaggcagacctgaggatcagattaaggaaatgggtgaaagggttcctgagtaagaaagacctcaatataaagagattaggatttcttcatttatatgtcaagttaaaaggaacataaataccccctctaccctccactattactatggatgatatctatgagttttcaaagcctccaccacaccccacacgccccacattcacagatcttcaaactgcatggttcactgttatctagcactgactttttgtttttgttttgttttgttttgtttttgtttttgttttttttttgttttttttttttttttgagacagggtttctctgtgtagccctggctgtcccggaactcactctgtagaccaggctggcctcgaaatcagaaatctgcctgcctctgcctcccaagtgctgggattgggattaaaggcgtgctcaccaccgccccgctagcactgacttttaacctatggagtaacttgcagggtggcaggtcaggtctagtgcctaaatctgagtcagaattacgcgcgtgacacagacgttggatttgcacttcatggaaggcagggccaacttctctccacttcccttgaaacttgtacacgagtcgaaaatcagttgcacaccccttcacaaagacttcgtctttccttctccttgaaactgtccacagtgaaagcaaaactcccatccttagaatcttccagaaactcagagctggagggtaattaacttgctcacagatagtgagggcagagttgggtctggagcctccttctaacatccattgcacgtttttctacggggggggggcggattatacataataatagtatcactaacaacagtggctaacgctatatgccgatattctatcagcttccatttaactagatggggggggtagttttgggtccttcttttaattaaagtagcctactgtgaaacagtattttttttttcagttgcatgacattgcaacccgaaatcacaactttaggttccttgtggtgcccgcttcctcttctagtttgtttagtcacagaattcgattcctgttggctgtttccgcgctgcaaacaggcttagcgctccattgaaatgcgggaggctccttaattcttgtataaacaggtaacccgaggggtggggcgggggccgcggccctagggtgggtttcctgggagtggggatgggggtcagacttagttcccctgtgatcagaggcaaggttaaaggagggcttggctgaggtttctccttgcactgtttttgttccctttctagaaaccagctgtaacactaggtcagagcgcattcagaatgagccactttgaacgagcagcggcgcccaggccccaggccctgctgtgaaggctccggcaaaggtcagagctccggccccccgtgacgtgcctgcctgtgctctccgagctatgctcagcctcaggtaagaacagcccaggaggtcctggcttcctgcaggcccgcggcggggctcgtctgccgccctacctgctccagcgccttcctgccccgcaaggccgggggcggtggcactgctcaccccgggagtcaggcgcagggtccttagtccttggtgcaggctcagggtggcttactctaaacagccataggcggccggaagccactcttctagatgtccccaggtggggcaggtgccacttctggggtcccttctgaatgtctgaaatggatgtgactttttgagcggccaaagttcgtaaatcctccgcatcggggccagtccgatatgatttttttttttttttaaaccttcagctaaggtatccgcgcttctaaaacaacaggaatgttgcactggccttcggccagcggaggctcagcgagcaggataaaatttcagtgcagatttacgggaagttgccggtgttgggagtaaaaatctggtttggtgagtttaagggaagggagtatacgagacaaccttgctactgtgaggcgaatggcctcgtctgggggagggcaggaggcggagggagggaaccgggaagagcagggattgcagaggcaccgattgcagccggactccgccgcgctccgcgggatccgaccctgtgccgctccgcccgggccacagccgcaccgcagccggctcgtacgacccagctcagccggccgccgagcgcccggacccggagaagccaggctctgggccgggaagacgtttcttaccgcaggtcactcaggctaaaaaattgtgacaaactggaattcccagaacccgggaagagttaaagcctagagcgatctaatctgttgctttaagtcgcacggtgggaagtagtttggagactctttaatttagttttctatttaaaagtgtgcggccagcgaagatgttgtaggtgacttcctagccttgtagattgctaccgggctgtgaatggtattaatttctgaagtgagcgacgccaagtacttacggaaggtaaggtggacttttggcagttctgactactgtccccatagagtcctgacttttgggaaaaaacaaacaaacaacatctttctctctctatttctttcccccttagtattaatctctcatttgaccgtcttccttctttagtgggaagttaaagggtttataaaaagatttttttttaaagcgtcagcttttggagagcagataatcctatggtcagccgcatcttgtttcctgcagacttgagtctttttccatgtgtgtgtgtgtgtgggggggggggagttgaaaaaaaaaacgtaattggtctttttgaggcacaggtgactagatgcggattattagcttgagatttcggagtttttggtgacgggcgtctcgcttgagtgttaactggagcagagcggggggcttcctgcagacatttatctctgaaggccaccctcggggaagcttagttgttgtttccagcggagaattcaatctggagacaagagtagagtctaccaaatataacatctgatatgcctgcagtcactgggtggctaagaaatcagtcaaaatgaatggaaatggaaaatttcagataaaggactctctgttttaattaggtaaaagttgacaacactctaagactgtcctaaggcacttagggatgtggcttccttattaagtcttatcaaactgatgaaaagatattctctaggtacttacaagctatttttgacttgcttttattttctccattacttatgggagctaaaagtcgaacttttctcccctccggtttgtgtgatagtgactcacttaggagtttccttaggaggactgcaaatcaaaactgttcttcaagctgctgaggtggctggccaccaaacttgaggacctgagttctagccttccctcaccgtggtggaaggagaaaacaatcctctaagtcgtccatggacttaattaattaattaatcaatcagttaattaaaaactcaggcttaggtcaggcaaggtggaacgtgccttttaatctacaagtaaaaggccaaagcaggggattggagggtccagggcaactggaaagctgggtttggtggctcatacctttaactccagtccttgaaaggtaggataggaggaaccaaagggaggggaggaggagttcaaggccagcctggtccacaaggcaagttccaggccagctaagggctgcacactgagactttgccaaaacaaaaaacaaacacacaagatagatagatagtaactgaatggtaagtgagagtcttactgtggagtcagactaaggaacacaaagggtggaacaacctgcaggggtagaagttttgatcaccaaagggtggtcattagatcagaagtgtttgagactgagaattgcagaagccacagccaaatggcaaaagttgccagtagggaacacagcctctagatggaccaaagccctcagccaaaaggagaaggtagcattttgtggggtttaggctgccattcagttacacagtactctctcaggaccctatgtgatgacttcgggggtgatgcccacaaaacacagctgtctgagggaaactggaggaagaggggagggatagcctgggtatttttcacgtccaccttgaccttccccttgttctgatggagacgctggaggcctctaactttgcagggagcaacatcctgggagaacggagaatcaaaaatttcatttgtgccagcttcatgattcactttaaaggaagacaggctggcgtagcaaagcctcctgactacctttatctgactggataggatgcactatgtcttcagtgtttgtagtgctgggttcaagcgagctccagtgccacagaggagagtgctgtcatctgtccctgcctagggattaaactcagggcgaagatagatcctgctaggcgagtgccttgtcactacactcccagaactcccagtgtcatcatatttattgacatcgtctaggctggcctaaaacctgtgaacctcctgctacactaggttttctgagtagctggacttaacaactgtgtaagtgctagcaaatgctttgttttgaaatccaaattcttaaacagactgctttttctgtcccttattgcctttcagaactgtctaggatttaaaattaagcgacattattttatggccatctccattgatttttttttttttaaagacattatcatttttattatcattagtgctattttggtttttcgagtcagggtttctctgtgtagccctgtctatctgttctggaactcactctgtagaccaggctggcctcaaccactctggatcaggcctgcctctgctttctgagtgctgggattaaaggtgtctgccagcacgacccacccggctaagactttactttttataattaaaatttttttacgtacctgagtttttgcctgggtgtctgtgcactgtgtgtgtgtgtgtgtgtgtgtgtgtgtgtgtgtgtgtgtgtatggccttcaaggccagaaggagttacagaactagaattacagaaggttgtgagcccacatgggtatagggaattgaacccgagttctctagaagagcagtcagtgctcttaaccactgagcaatttccccagccccaagacttacattacttttattttgtgtgtgtgtgtgtgtgtgtgcatgtgtgtgtgcatatgtgcaagtgtgagcatgctgcatgtgtgtgtgctcatacatgtgccaatgtgagcatgtgtgtgtttgtgtgcactaggccagaaggagccacttataagctgcctgatatgggtgctgagatctaaactcccgcttttttggacaaacagcaagagctcttagcccctgagcttcctcttcagcttgtgtttttttttttgtttttttttttattgcttttgcttttgctgtgtttgtgtgtgcatatgcacaagagtgcaggtaccagaggaggccagaagaatgagtcagaggggaagttgcaggcagtggtgaccagctccttgtggtctgagtgctgggacatgagcttgggtcctgatctgcttttaactccttagccacttctccagaacactcaatagtgtactctaaaataataattgtttctctgtgtgtgtgcatatatgtgtgtgtgtgtgtgcacgcgcaagtgcatgttcatttgtgatgatataggcgtcagatgacaactttgtggagttaattttctcctttcaccattttgtgagttctgagaattgaacttacaggaacaggattacacagtgagatggccaagccatttctttgcttccaccccctgtagttttaacagtcaaccgattgactataaatatatatattttaagatttattcattttagttttatgtatacgaatacactgtagctatacagatggttgtgagctatcatatggttgctgggaattgaattcagtacctctacttgctctggccctgctcgctcaggctgccccatttgctccggcccagagatttatttattatatctaagtacactgtggctatcttcaaacacaccagaagagggcgttagatcccattacagatggttgtaggctaccatgtggttgctgggatttgaactcaggacctctgaagagcagtcagtgcttttgaccgctgagccatctctctagccccagaatgactttttgagacactgtcttacaatctacccccatgctggcttgcaacttctggttctcctacctcaccctcccaagtgctagaattacaggcgtgtacgaccacactgggctatttagttcttaaaactttactatttattcatcagtttgacccttttttcaggatgcagagttctgctttgttgctaaagcagttggtgatattgagggtttaaacaaaaaatcaaggaaacaatagttttttgttttttttttttttggatttgagttctctatgcttattatttttattgagtacttaggacttagtactgagttccagtctgggctacatggtagtcccaaaaccaaaccaaaccaattaaaagcctacttttatttcctcctatgataagaacatctttcatttactagtacaacctattttaagtaatgatttttttaaaaaaggttaatgtaaagaaattgtttttacatgatgatccaggttctgtgctcctcacttgcaggtgctgggggatcgatccaaccagaaccctagagactgtgggcaggtcgctctaccactgagccccattccctccagccttaacattgtctgttttgttttggtttggtttttgggtttttggttttttttttgctttttgcttttttccttttgaagcaaattctcaccatgtagctggtgttggcctccgattcctgacagtctcctccctcagctgctgccagcccagttcccagcgttagcctcttaaactcaggattaaaagtaattcgtggcccagataattgagctttgatgggcaccagaaacatcagcttgtttgagacagctccaatcaagccctcttctgacttttctggattgcccaagagttaatacttggatgtgggtgagggcaaggacatttccttaaatttggacctaggctcgtatctctatgataggacataatcgtaaggagcaaacccccaaaacttaccctgaaacgtggttcacgggaccttggactttttttttttttgcatgagtgtagaatccacatggccttttatgagttgacaatggaaacattaaacacagcttgaagggcttgtcagaaagattccaaagtaaaggttatattggagccctttggtttctggcccgattaagagcttaagacttaggagtagtctctgtgtcttatgatgatgtggatttcctggtgtaataacatctgaggtgtgtgttagtcaaaacaactgcctactgaagctaatggcttcagagaataactagctaagggagttctggagcagcaacacgtatatgacttgggttccaaggaaggaggtctgggggtgggagtcgggacagggctcggggaggaccctgccgcagaattggtgtggaaatgagagtattgttccgatgtcaccttaagttgatggaaataccccgggctgagagattcaggaggaaatggtgccctgatatgtgacttcttattggggttgtttctctgtagttgcttctatattctgttagcatcattatacaagagaggcagaggggagggcaggagacaactgtcccttgggtccccttctgtccaagatagaatgccccggtgccttgcttctgccagagaagctctctaccacggagctataccctcagcttggtctcattttatttgaaaagggagtccaggcctgccttgaacttacatagctctcccttagccccttgaaaagctgagattatacacccgcagatcttactttatactctaaaagatggtggaggggtgaatggaattttccactggagtagaaaaacagaattcctggagaaatgagcggttgagaaacaggtgatttctgcgtgggccagtaatgtgggatatcccagcttacctggagatcaccaatgccatccactgcaggcttgctggctgctatggaaaatttgggctggcatctctcccatttacctctctgcttgtctgtcagtctgtctgtcggcccttctccttgttctcgcctagtggtgttgttactgttttttctttctttttctctgttatgatttttgagaccaagcctcactctgtagcccagactggccttaagatctgcacaaagctcctatgtcagtctccggatcccacacctgtctcccctcccctctcttctacaatttgaatgttcctagcgtgctgctgctgccacagacactgctttgaatgcgtccaggatacaaccagagaactgatcgcaaacaggcacaagtccttccattacgtttgcccgttagaggaacttagattgtataaaagtgacttgtgggtgtatttaagtgcatgtgactaatacatttatgaaacaatattaagtaagtatacaggtaggatatgtggggctgcctctagttgagcctttgagtagttttacataccagatgtacaattgcttgttgaaggtcatcaagaccaggtgtttgtcatgagaagacaaagtccccccctgcccccaccgccgccccagccctgtatgtattggaaatgtagtggtcgtttgctttcctattttgaaaatatatgtattatttaaaattatagttgggcacattaatcaagaaaacgggatccacctactctccccagttcacagtgtttgtctttgaggttgctgtatgtatgtagtttttatgaatgtgatgtttcagcattaacccagtactgggtatggtgaatgtctggatggcggggcctggcagctgtagcttcccaattcgcctccctttgtctcacagccagtttgggtcatgctccctgagtatgggtagaagacaacctgttcccagaaaggatgggtgatcctcgcacgggtgagcaagagttaactatgtgtaccaataggatgtgggcgtgtgtgcaagtgtgcaatgaatactgcacattgtgcaactgaaatggggacagggtgcttatacctgacaaggaaatgccagcccgggaaaatcgtcacaagaagtagctatcttccttgggggtgggggtgggggtgggagttgggggtagctccagcggtggtagaacatgtgcttagcttgtggaaagcccaggttcccttgtctgtgtgtggatatagacacttgaacatataaatggtgtctatgtgtcttgtttctgaccactgtgatctgtgtcagatgtgtgtgtgtgtgtttatgcatccacgtagaagtcagagttggatgtcagaagtcttattccaacaagccccaccttatgttttgagacagtctcttatagaactggattcggctagactagccagccagtcaactgcaggggcatccctaaatccatttcctagcgcatgttctgctgttcctgggtctttatgtgggagttagggatccagactcaggcttccatgctcacatagctggctctggagcagctgagctatttcttcagctgctggctcagtcgtctaaaaaagcacttcacaggtcaaaagaaaagaagagtcctgccaggcatgactgtccagggcagtaaagcgcagcattcagggggtagaggcacacggggttgctatgaatcagaagccagtctgttctctatagtttgggggtagccagggctacacagaaaggccctgttccaaacaaaataaaaatgaagccagatagagagatggctcagtggttaagggcactgactgctgctcttccagaggtcctgagttcaattcccagcaaccacatggtggctcacaaccatctgtaatgggatctaatgctcttttgtagtgtgtctgtactcatatacataaaataaataaaccttttttaagaaaatgaaaccaaaacagaacaaaataaccttaagtggtgaaacagattttttttttaaagacagagatttgtagccctagctagcttgaaattgccatagatatcagactagccttgaacgagcagggatcaatctgtcaagtgtggggattacaagtgtgtgccaccaccacaccaggcaccaggcaagactctttttcttagttttgtttgtttgtttgtttgttttttttgttttttttttgttttttgtttttttgtttgttttttgtttttcgagatagggtttctctgtaaagccctggctgtcctggaactccctttgtagaccaggttggcctcaaactcagaaatccacctgcctctgcctcccaagtgctgagattaaaggcatgtaccaccacgcttgtcttttttttttttaagtacttcccttgggtcagctggattcctgctaaaataatatttctttttgttgttctttattttcaaaagtaatgacatggttcttaggacagcaaggctttgccaagggtaggcccaacttctggagacaaagttatctttgtgtatccacaagtaggaggatctggtaaccccagaaaactcaatggggcactgggactgcattgacagaggatcccatgcctattggtgtctttccgtgttatgcctaccagctaatatttgtaagcaattcctctacatattctactgctttagacctttagacctacgcagggaagaagtccttggttactgattcgatttgggattatctagatgataaaaaccaaggggccttgaacttaagagccactcatgaggaactgaaaacataggcctacactactgggcctggcccctaactttggattgttgtcaccaaagaaccctactccaagagagaactgtcttttgtggtcttttctagatggatccatgattcttcccaatgtcacatgcaactttcaatgaaaggccattgctgatgtctgtagaccctgttgttgtgtgattaaacttcctatgagatgcaacacatgtctcctttcttcaccccagataggaacccctaagagactataaagtacagacatcaccaaagtccaacttggtgaaccatgagtcttaatgggattacttacaggaatatgtgtgaggggtcactgacaggagcagaaatgactcatagacagctgcatcactaaagtccagcctagcatgggtgacagacagctcacaaagctgagaacctggaatgctctgcattgcctgcaggcagctcaagtcggttggagagtgtcctttccaggtgcttcagttgacctatacctctcccagacgcctcggctggtttcttttcttccaggcatctggtgcaatctcaaaaagccttctcagcagcgcagcctccttcagtctgaggggactctgagtttgtactgcttcttcaggcagggcagcagggcagggcctggtgcatctgctcagtttcagggacttccctgaagctattttgagttgcttaaagagcaggcgcttcctattggatagaatgtttcaatcttggaggaaattgttacagtatctgccatcttccctccccctcctccatttttttttttttttttttggtttatttttgttctgtgtaagtgttttgtttgttttggtattatagttgtccatattatatgtgggagaaaagagtggttatctgctagtttaccattgaaactggactccattctggagatgactaatgtgaattagaagttgtgggtatataaaactgtaacacgttacactgatacacttgtattgggccttattgcctagtattaagtaatcacactcactataggacttggcctgtggcatcgaagcttaccttttttctcttgggacaaggtatcagtatgtaaccctgggtggccttgaacttactacatagatcagattgacctttcctccagggtctggggttaaggtgtaggcaggccaccattggcttttacttatgctctttccccagaacatagagtgggttccttggaagcaggaagcttttgtgtttgtgtaacatacacagtcctcaggtattttgagtggcctaatacaaaaagcaggttcttcctctaaagacgtcaccacctagaataagatttctgcatctcataggcatttcttatatgtaaatatatagtcttactcagacactatcctccaattttttccaaaagcatttcaccaaagtgtgtcaaagaatcgataggatgaagctttagtgaattgaggcaggaaggaacctgtagcagctgagcctctagaaccaaggcatgatgggaggtggtgggggctgacgtggagctcaggtgcctaccaccccattctgcagtagcattctttcaaatatctaacttacccaggctttatttgttttttgttttgttttgtttagcacccagtgcctggcagctaaacctccacacatccagccccacaccataccggaacttcggtggtacactcagaacacaattcagaaaagaagaaaaggacatttccttgtgactaggaaatgctttctagatgattaacaggagaaaggtagatttttctcaaagtcaggttgaccaaagggaaaactatcccaaagaggaaggtcactgtgaggtgactctccctgccctggagccttgtacagtgtggttttctggtgggtctgtggtattgagtatcagaagggagatgaggaaggagggcaggttgctgggaagtcctgagagctacctctagtcgtgtgggcagagcaaagagaaaccagtctgagccagctctccccaccagtgtaagcagcaggtttgcccaaggccctgctttgctctttgctccacactgtgagttccagaagctacctggggatctatggcgatgtttcagtgagcaacagaacccacgggctcagctggtgttaatgaaccttttaggaaatgagccagttggaaccttcgggagcccctggatcctgaagggaagaggtgtgacctctgatctcacacatcccacagacaggctcctcccaccttgactgaagccaatctgttaattcctcccctggctcctgcattgccctctccctcctcacgtacaccctccaccccatctgtcaatcacacctcagcctttgaggattacaggtgtgtgccactaagtacatctttatatggcgctggggattgagctcagggctttgtgcacactgggcaggctctctggttctgagatgtattctcactgtggtgttcaggcttgccacaaattcccaggctccagcaatgtctctgcctcactttcagcctatcactttgcccggccatatccccctagttaaaataacacttctgcctttcgtgttggttctcccctctctcttcttcctcccctactctccctcataccgcgtcagaattttagttttaattctatgcatatgtatgtatgggtatgtgcgtgggtgtctgtgcacatgagtgcagatgcctgtagagtctagaggtactgtgtccccaagagctggagatacaggcggttaggagctgcctggtgtgggtgctagagaccaaagttaggacttctgcaatagcagtagacatccttaaacactcagcccctttccagcctccatttatcacttttttagcatgctgtttgtgtagtttatgtagtctctctctccctgactggaatgcctacttcattcattgggatgtcccaaacaccttaggggtagcctctgccaccccatcagtgatccacaaatatttgttgaatgaacgagttaaacagccaggcttttaaacaacacaaaacatgacccccaaatgaagagtatgtgtataccttatgtgtagtaatcaaaacacaaccagggctgcatcttctcactgaacgtgggttttctgcgaggccactcttaggctgccatgttttctgtggtctcattattttctgcattcaccagcctttcatagaacccgaggactaaatgacgtcctaggcagagccatggggctgcgatgtcacaatcctttctgcacttctccgtttccaaatcaaagccgcctcttcggcaggcttcctgccgctcgcctgcctgtaaatctcctagccctcccttctgagctgcttttgtgaattgcatgtcctgcagttaattgcactcaactaactcttgttaactatattcatcactttttctgtggtttaattttaatgaatgattcttctgaaagtaactgttgacagtgttcttcattatctcttctgacctctgaggcattgccaaaatgccgctaatggatttttttttttcattatggttttttttttttttaaactgggggtggtggtgctggggttgaacctgtgtatgccaggcaggtactccaccacagctacccgcatccccttggagccctttagtgaggtatttgccttgacctggcatgcgacagaagtgctgatatctttagtattgccagagaacttctgcatgagtccttggccttgccttttacggatgagcagcaaatgtcttcctggtctgccttcgttagtcttcttcgatctcccttcctggaattatctgggtttagtaagctcactttctctgctttttgaaggtccagtcccctttgctttcccttccttgtttaatgcataactcactaaaaacagcctccctaatggttggtagaagtctgtggttcctagctaattcctgtcaactaatatttgtagagttttgttgttgttgttattgttttgagacagagagagttttgctgtgttgcccaaactggcaatcctcctgcctcagttctccagtactgggattataggcatcaatcttcatacctagcttatatttttaactttttctgccagttactttttttttcttgtcatatatattgattgggataacagagataaatacaaaaacaattggatttgtctttaataaaattctatgtaaagactgtcttaaacaaacacaaagctaaaatactatgtaaagggaagttgtaatggtttgccaacaaataaacaagtatcaaactagtttaaactagatacattgaaggcacctgcttttcttcaactttttcctttttgaggtaggacccctatgtagcccatgctgtccttgaactccttgtcctcttgcttccacttcctaaactctgggatttcagccagacacccagtctgcctgagagcttaaagcttagcgtgaagactatataggcactgggtgtgcagtgggccatgaaaattgtctgttttgaaggaactgtctttcacggtggaaatggcgagtaagtgttctgatagaaccaaccagtccctgaaaatagacaggaaactctattttcctgccatggtcagaagagggtgtcccagctgggcctggtgactcacatctgtcatgccagtacgtaggagagtgaggcagaaagatcatgagtttgtcttaaaaataagaatgaaaatgagaaggagtgccggagagatggctcagccagcagctaggagagtttgctgctcttccagaggacccacgtttagttctcagcaccgatatcaggggatccagtgctcatgtgcatacacccacaggcaccccccccacacacatacacaccacgcatgcacacttaaaaatgataaaaataaatccttaaaaaagaggatggtgggttatctttacttgtgtgctaacttagtatgtctgtacaaagccttgaggtagatcccggcactcactaaactagaagtaggggctcacatggatattgaggtggaggtggggaggccagaagttcaaggtgatccttggctacagaatgagtgcagaatggccagcctggggtccaggagatagtcacaggcatttatcaaacacttaatgtttagattgtatacttaatgccctgcttagctttaactgacaagtagacaacttaattattacatatttacagtataatttgtagtaatataaatctatttacttatttatatgtatttggttctggatattatttcaacatatgcattgttttataatgctcagtatatatttacttaatttacagtatcaaataacattttcaaagcaggaaaagctaagtatggatagttacatgaggaaagacattcatccaacatttcaaaagatgcaagaagatagtttggggtggagcagtgagtacccttgttaattacaagggtactacaattaattgcaatccattgaaggcatacaggttatactgtaaatattgataccttcgaagagatacatttgggacatgcaaacacacgtgttgtttttttctttactaactttataaatggtctgcacacatgttcatgtgctggctgaaagctgaggctagaccaacatgctgacgtatgagggactggcgtgtgattttgaaaataccaggttttgttgttgtttttaaaaggctgccctgaattcactatgtaactgaagctgatctcctaattcacttacctagttctctgatcacaggtatataccaccatattgagaacttagttattttaaaagaagaagaagaacagaaagatacaatgtttccaaatccactgggataaagatggtatatgttatgtatgtgaagcattagataactcggtctttaaaagggatgttttgagatgtctccagctattagagctggatgggagggagggagggaggtcagggatggacagggttttgcaaccctgcctattgaaagcttgggtagttgcagcgtgtcctgtgtcaatgccagtgtggcctgtgtagtgattgaacttattattgcttaactgggtcaagtggtgtgggttttgcttttttccaagatgggtcaatttccaaagggattggtagggcttggagttttcacagttatttccagtctgttcttaacagttttttgtttgtttgtttgttttttttgtttttttttttttggtaagaaagctggcttaccgagtacctgcagcaagcacatgcagaggcaaggaggttgcatctgtgtcactgagggccagtgatgtacggaggttaaatgagggggctggctcaaagatgtataactaatgctggcacgtggccaagagtctgaggaagtttgaggccagcctgaaaagaagaaaagaaaagctaagaacagatagtaatgtctcccatttgttaagcgcctattgtataccaggctttacctagctcgattaacaaagtggctcccagcgagttgcttacactttttctgcctatgtgccaggcgtgggaatgaagtgcagatgtattgagtaacgtgcccactgtaaaggccggccagaactcaggcttcttgtaaggcctcccaaaccaggtcaggcttgggaaaacttgatccttggagcaagcccaggccttcttacctagatccgctaatcacacatggctaaaactttcctacctcacatcttcttcttctcccagtttgaatatgtgctgttcatgggtcttcaaggggtagctgagcacaagagagagtggagtggacaaggggccagcaaggtcagctggcttgttctgactaagtctcgcaaaaaccctttcagatttggttactgaaacccaggtgctacacaagacattggcattgctggtgtaccaggattgacgtttcttcatggaaagttggtagaggctgggcatgttgctaaataccagtgctatattatattaggagctacccccagcaaagaagtctcctctgtcagtactgctgagagtgagggcttgccttccaggtgagtctccacgcgggccactgctgagacgctcactcccaacacgcttccttcatttttatttacttatttttaatattttttaattggaggtaggtgggggctgggaagttgttttttttttttaatgagtgtgtgcatgcacacagacacacgcacacacatgcacatgtacacgcatatgagtgtaagtgcctgtggagaccagaagagggcgtcagagtcccaggagctggaattacaggaagcggtgagcaggtcatactgtgcagggacagggtgtggtgccgactactgagccatctctccagcctcttttatgtttatttatttacactgctgagagcatcacatatgttacccctgctctagtccacatcttaatccccctgcccccatctctccctctttgcctcatttcttccaccccaatccttggcctttcattcactatgtagctcagtggccttgagcttctgcctcctgccaaacagcttcattttgtgctttaccaaaatgatgctctctctttcctcctccctctctctctctctctctctctctctctctctttcaaagatttatttactatttattttatgtatatgagtacactgtagctgtacagatggttgtgagccttcatgtggttgttgggaattgaatttaggccctctgcttgctcccatcaattctgcttgctcattccctgaacactccagcccaaagatttatttattattagatataagtacactgtagctgtcttcagacacaccagaagagggcgtcagatctcattacgagtggttgtgagccaccatgtggttgctgggatttgaactcaggaccttcagaagagcaatcagtactcttacatgctgagtcatctcactagctctctctctctctctctctctctctctctctctccctccctccctccctccccctctttctttctttctttctttctttctttctttctttctttctttctttctttctttctttctttctccttccttccttctttctttttatttgtttnnnnnnnnnnnnnnnnnnnnnnnnnnnnnnnnnnnnnnnnnnnnnnnnnnnnnnnnnnnnnnnnnnnnnnnnnnnnnnnnnnnnnnnnnnnnnnnnnnnnnnntttttatttgtttgtttgtttggttttgttttattttttaagacagagtttctctatagaatcctagctatcctgtagaccaggttagccttggtcttctaaatgttggcacactgtcctgtgtgccaccaggacagggtttttttttttttttttcttcttttgatatttacaaattccaaatggaggcaggcttcacgcaagagttaggatcttttcagactttaaagatgcttgaagcttaaaggtcttggtaaggaaggatgaagttgtcctatcaaagctgatgatgacatcatgtaaaatggaaaccgttcgtacagaactgtcagctctgagggagagcagcccggtggacgagtggacggacgcctggatgtagctgcgctgttaatatctttatgaaaacagcaaacattcgaggatagctaggaactaactctgtgaactaagccggtaattttcctttgaagaaacatttttggtcaatatttgatgtcctgtagatttggcacagagagataaatacatttgatcttggctgtttgcctagtttctgttaaaaaaataaaataatgatagccagccccaccatatgcccattccaggcaggaagactgaggcaaatttgaaacagctaaaggctgtagtgagacccccccatctcaaatgggactagtgaatcaaaggccatgtggtagaagagagagctgacgttcccgagttgtccttcggccatggcacagatgtacattcacatgacaagaaataagtgtaacaattcaacaacaacaaaaaatttagttataatcagagatgagatacccaaagcctggaggatgggcatcgtgggggaatgagtgaaaaatttcatggattcagctctgctttccttgtgctggaaatgaaatacagctctaggagctctgtgcataaaatactgtgtgtatgtgtgctcttgtagggggtacatgtatgtatgtgtccttgtatgcacatgtgtttacagatgcaggtgtatgtggcaataagagatggaattttggtctttttttttttggtttttcgagacaggatttctctgtgtcgccctggctgtcctggaactcactctgtagaccaggctggcctcgaactcagaaatccgcctgcctctgcctcctgagtgctgggattaaaggcgtgcgccaccactgcctgacaattttggtctttttaaatggaatacgtcctttgttttagaactacaacatttggttagtgtggccaggcagtgagctccagggatctggaatatgctcatctccattctccccagcactggggtgacaagtgcgtgctggggacttggactaaggacctcatgcttcgccagcaggcactgacagactgagccatctccccggtgcccctttagaccaaatagatgagaaaacactgtgtactcagactgagatgttctgtcatgatttgtgtgtgtgtgttgtgccaagtcatttaaaatctgagcagctttacagactgcttattggatgaaagagctgctcatactggtgcgcgcctcagcagggttcaccatgtgtatggacactgtcatttgtgaaggttctagctgtgcgaattttgtttgttttttcaagacagggtttcctctatgtagccctggaactcacagtgaagaccaggctggccacgaattcacagaggcacacctgcctctgcctcccaagttctggctaaaggcatacaccaccaccacccggggcttcagctatgaaaatctaatgtcagtggattgcagatgtcttgttccctccccacaccaaggtctctggtcattgagttcactgagattctctgggaacatcttgttcaagcaagtcttgtttgttccttcaaaactggctctcagactttacaggtagctccttaaacctgactcctgttttttttccccactactaagtattgaacctagaacctcgtgatgttggtcaagtgctctgttgcactgttccccgtggtgacttattatactttttacatttggatcttagtccatctcagatttcttccttccttttcctcctccctcnnnnnnnnnnnnnnnnnnnnnnnnnnnnnnnnnnnnnnnnnnnnnnnnnnnnnnnnnnnnnnnnnnnnnnnnnnnnnnnnnnnnnnnnnnnnnnnnnnnnnnnnnnnnnnnnnnnnnnnnnnnnnnnnccctccctccctccctccctccctccttccctccctcccttccttctttcctccttttgttttgttttggtttttttggaggcagggtttctctgtatagccctggctgttctggaactcatttgtagaccaggctggccttgaactctgatcttcctgcctctgccaccccagcgctgggtctgaggcatgtgtacccatccatattctgctcacacagttttctttgggctctattgtattcctgtgtactaatgttccccaacattggctcacctagccccactgctggagactgaggctccagggaggcacaggtcaacgcttcatgcagaactgctcacgaatatcatgttcaatgaaaggaaccaggagagtggagtatgtgcaaaaaaggaactctataaagatacaaaccagatgagatgactctctggcgttaccaccttgagtgtaaggtagatcttaccgctctaacactgctacatctttgtgctccaaagatgagagtacaaccaaggatccaatgtatatagtgagctccccttcacaggctctccccatagcccaggctggtctcttaacttctgattcttctgcttccacctccccactactgcgtttattagtaggcaccatgatgcctggttgattgaggtttctcatctgccatgtgtcagctgtaaatgagggctcatcctttgtgtgtgtgtgtgtggggggggggatggtaattgttttttatttatttatttattttatgttctctatgtgtgtctctttctgtgtgtatgccatctctcaagggcagatccagactcgtagctgtaggcagttgtgagctgtctgatgtgggtgctcagaactctccgggatcctctggaagagcagcaagtgcccagaactactgagccatctccccagtcacattttttggagacaggagcttttcctagtcagtgttctattgctacaaaaagacactgtgactgcagcaactcttttacagtttcagaagtttagtcccattatcatcatggtaggaaacatggtagcatgcagacagatgtggtgctggataagtagttgagggttctacatctggatccataggcagtatggagagagacactgagcttggcttgggcttttgaaaacccacttccaatggcacacttcctccaacaaggccacacctactttaatgaggccacacctcctaatccttcttaagtaatgccactccttgatgactaggcattcaaatatatgtctggggggggggcactctttttttgttttttgagactagggtttctctgtatagccctggctgtcctggaactcactttgtagaccaggctggcctcgaactcagaaatccgcctgcctctgcctccatgctgggatatgtgcgccaccacgcccagcctaatgggggccattcttatttaaaccactacagggttcatatagaccaggcaggccctgaactccttatatagctgaggatgaccttaaacttctgaccctgcctcctcaacctcctaagtgctggttacaaaactattccaccaagtttagctatgagggctcattttaaaaaatatttgtttgtctgctttttaaagatgtatttatttattttatgtatatgagtacactgtagttgtcttcagacacactggaagaaggtatcagatcctattacagatgattgtgagccaccatgtggttgctgggatttgaactcaggacttctggaagagcagaccgtgctcttaaccactgaggcatctctccagccccgtttgtttgttttttaattaaaatataattatggataaatagttaagcagtttagagcattcgtggctcttccagagggtctgagttcaacttctgttgcccacgtggcggctcacaaccagctttaatttcagtcttggggatagggcgccttcttctggcctccaagggcactgtgtttacatgatgcacaggcatacatgcagagatagctatataaataaaaatttaaaaaaatttagccaggctatggctgctcatgcctttaatcccagcgcttgggaggcagaggcaagtgaatctctgagttcaaggccaacctcagctacggatcaagctccaggaagcccaggttatacagaaaccctgtctctaataacaaaaataaaaaaatatataactatatcatttcccccttccatttcctccctttaatccctcccatattacccttgctccctttcaaaaccatagcccttctttctctttttataaacttaaaaagatgatttatttctttttattttatctgtattggtgttttacctacttgtatgtctgtgtgagggtgtcagattccttggaagtggagtgacaggcagttgtgagccactgtgtgggtactgggacttgaacccgagtcctctggaggaccagctagtgttcttaaccactgagccatctctccagcctcttttaaattgttattattaatgtgtgtgtgtgactatgcatgtgaagtggatatgatgactatataaatacaacttgctgggctcattttgtgtccttgtgcgcatgtatgatctcagggctggtcactgggtatttattgggtaacttggtgacgggctcattctctcagtattccttggttacctttagttctttgttaagggatggggctccatgagatcgccccccttccatcttaccttgtctttggtgttctgctttttcaggtctcagttaggcagctgtgttgttgaggcaccacgggtgaaggtttcctgttatttctaggaggtatagtttcacagcagattttgtgttgctctggctctcacaatcccttctacccccccacccccttctgcattgttccccgagccttaatacaggagttgtgttgtacactggggctgggtgcctcactgtttttttttttttttcctctgtacattgattggttgtggtttttctgtaatggtttctgcctattgcaaagaaaaatttctttgagggacaagaactacatttacgtgtgcataagcgtatgcatttagagtgcagctaggatttatgtttgttttgttgtgtggcctcagtagaatctctaagatccatgatctctgcagccccaggatatgggctaggtttccagaaccaggaacgatttccgtcctgttaagtagatcttaagtccaatcagagagctaattgttggtggtcaccaaaatgtgagtgccactattgcactcctacggttaatgtgccatgctgggtgccatgactcagacggttcagctgggtaggatattggtggttcgcttcccttggaagcttggtaccatagtaccagaaggtgctatgaagttagttgagggttcactcttatcttcactctctagatgaagaaattaaagttaaattttcattagttaaggtaatatctaattaaaacaaattcctccaagtcttgtcatttggggtaactcaaggtctcattgtgttggaattggggattgagagctgtagaaggaggctgtcacttcaggcagagaaccccagaggaagctttgtagcttagtatgcccagttgctaaccaatacacaagccagtgaagctctcttagcatgtgaattcaacactttgttccttttcttttatcttgcttcccttttttcttttcttagaccattaagggtcttaaggacagattaggtgaccacatttaagttaacaaacggagaatgctgccgttgattcttgattaagatgtggctgaaagtgcttcgggctgctgtcagctctgggtaagccccagctttcctgaatggctgaggagtcagagggcatgttttgcagttggacgggaccataggggatttctgatttgacatttcatccagggcagacaagcctctccagcatttgtgatagcaaacctggtacctgtgtgcgtagctccctgacactgctattctaatgactttattttacagagtgcaactagacacaggaaagttaaatagttttccctaaaacaaacttccaattagatctacagacccagtttctggggctacttatttatttataaacaggatctcagtatgtagccttctctggcctgaaactctctatgtagacaagatctgcctccgtctcccaagtgctgaggttaaaggcttgtgctccattcccctttaagaagtaggatcttgctttgtagtccagactagccttgaactcatgatcttcctgaccaatcttccaaatgctgggattacagacatgccaccatcatgcctggctaggattttctttatagctttcatctgtggagcctagttctgccctcgaggataatatcacagacctttttggggggatgaaagccacccttctagggaggaaaagggttgtattggtttagtttcctgaatgatgctggggctccagtgatcagtgatggttagtatcgagaagccacctcttaggtagaatggacaaccacagtctgttgtctcttgatgtggtctctccacagtgtcttccctgtaaggtagataaactttatttatttttttcttttaaggttggttgtgtaggcacagcccttttaatttcaacaattgggaggcagtgggcagtagatctctgtgagtttcaggctggcttggtcttacatagtgagttctagtgcagtcggggctaaagaaaccctctcaaacaactggaaaaaaagaagatagaaaggaagaaacaagggaaagaaagaagggaaagggaagggaagggaaagggaaggnnnnnnnnnnnnnnnnnnnnnnnnnnnnnnnnnnnnnnnnnnnnnnnnnnnnnnnnnggaagggaagggaagggaagggaagggaagggagagtagatgagtgtcacttccaggtcaaagcagtcacagaccacctagttcatcagagcgtctataggaggaacagcaggattggacacacactaagggtcaaacaaaacatgtctttgctaaacccactttcctagattgtaataattttgacttttaaagtcctcttagtgaactattttggggcatttggacttttagagctttctttaaaaaaaaaaaaacccaaaccaacagcaacaaaacttcatccgataataatcaccattttcatccgcgtgacttacttgcagaaggatggtgaatccattttccaagatgggcgtcgttttccactgtgtactagggtctcctaaattaggcaagtgctctaccactgagtgaacatctccaggcttttcaaagttggtttgggatagggtctggataagcgcctttaagctcactggcctctcaactcagcctcccatagccaggtagctgagctacggtgagcttcacagcggccttgcctgttttgttttctcattagacattgtgctagcgcagctgtagcttagataagaggagaggacagagtggagggtgacatcacatgcccttactcccagcactccagagacagaggcagggggattttgtgagttttggtttacctaagtcccaggctgcccaggggagagagggggaagtggttggatgccatgagatagagactgcaaatatcagtgagatacttttaaaaatgattcatcatcgcaaagcatttctgatgctttaatcattcttccttcactgattggctctgattgattatatctatttgtttttcttagcatgtatgtgtgcctccttacgggtctgtgggtggaggttaactttcagggactgattcttttcatcgactatgtgggtctctgtgacagagttcaagtcgtcaggttcagtagcaagcacttttacccccctgagccatcttgctggttttctgggacataggatctcactctatagccctggctaacttggaacttgctaagtatgtatgaacatagccttgaatttgcacaaaccccacggctcccttcctagcgctgggatttcgggcttgagccagcacgcttggccttgattcgttaatgctgcatttccaagtatgcttttgggcagtaataaatctctcgtgggcacgctatatttctcatttgaagcagaggcaaaattcagcagcagagctctggccgtggtcagctgaaggagttaattatttctaatcttttgatccctgtcacactgctgcgctctgctataatacactaaagaattttcagaaaatgttggggactccgtgtagctctctctgccttgaaaatccattatgtggagtttagctgggcttcagtatgtacactgaccccaaaatgcagttttagaaaacaggagtcgctgtgtgctaaggggaaacggccatctttggacaggagtggccactcccccacccttgacagctgatccccgtgctcgcctgtcgttttgcttgaactacaatttatttgcacgcacatgcaactcatcggcctctcagagtctttttactttaaaagaggtactggggattgatcccagggctgccaacagactaggagagctctgtcaccgagccacaaccctagctctattttttactttttgttttgatgcaaggtctcagtgtttccccattggccttgagctcactctgtagcccaggctagccttgaacttgcaccccttctgtcttagtctctggaggaaccaggattacaggcctgtactactaccttttcattcttgttgtgttgtctttcagagctgaggaccgaacccagggccttgtgcttgctaggcaagtgctctaccactgagctaaaggtccccaaccctgacctttccttctctctctctctctctctctctctctctctctctctctctctctctctctctccctccctccctccctccctccctccttacttccttccttccaattactttctttctttctttctttctttctttctttctttctttctttctttctttnnnnnnnnnnnnnnnnnnnnnnnnnnnnnnnnnnnnnnnnnnnnnnnnnnnnnnnnnnnnnnnnnnnnnnnnnnnnnnnnnnnnnnnnnnnnnnnnnnnnnnnnnnnnnnnnnnnnnnnnnnnnnnnnnnnnnnnnnnnnnnnnnnnnnnnnnnnnnnnnnnnnnnnnnnnnnnnnnnnnnnnnnnnnnnnnnnnnnnnnnnnnnnnnnnnnnnnnnnnttaatagttgggaaagtaggtcaaaaagagcaatcttttgtgacttgaaaaaatcatatgaaattcacaccttcagtgtccatgaataatttctctcccatgaggaacaaagttcttccataacccagcagatctgagtagttctggtagaaatcggatgtctcaaaagagcctaagctgcctgtgaccagccctttgctagcctatggacacatgtaagcagtggtaatcaggctggggtgagtgctatgcagtctgggccaggaggagttggaagtggaccaaggctttcccactccaacatcggtccctaaacaccacctcttggcactctacggctctcttttcttctttctctcctccccaccctcatgtctacgagcaagttccatctttcctgccccagaaagaatggacccaaggacagttatcaccccttcttgagagtgctccacttagcagtcggactttgcttgtgtctcctatcggttccctccacacacactgtgtccctgggcattcgccttggcttctagttcttagtcctctggcttgttgcaggcagacatggtgtggacactggctgcagaaagaacagcatagaggaactgagcaaataaacttctacacgtagactgcaggagtcaggtgcatgccttgaatgccagcacctgggaggtagagatgtgagagtctctgtgagttcgaggccagcctgatctacacaatgagttctaggacagccagaactacatacgtagtgagaccccatctgtctgcaggagtctgcaggagtgaggcgattttttggtttcttttgtaagtgaataagaacacaggctcagtaatacctccttctgtttcttaactgtgagttttctgctcgcccaaatgagatttgcacagctgtggttatgatgagttcatcttccaaggctaactgaagaatgtgtaaccattggtgagaggttcatgggctttggagacaggctgcacatctgtgagcggtttgaccttggcctttggttagcaaaggaaggagcaatggctcatgcatccatcgaccattgaggtggctgctgagagagagagagacagagacagagagacagagtgagacagagaggcagagagagagagagaacaaagattacagtaatccttcaaccttcaacctacttacaagcatttgtaggtaacaggagactgagcacagaagatgggaggaagtagtacaagttgaaaactcaaggttgagccgggccatggtggcgcacgcctttcatcccagcacttgggaggcagaagcaggcggatttctgagtttgaggccagcctggtctacaaagtgagttccaggacagccaaggctacacagagaaaccctgtctcgaaaaaaccaaaaaccaaaaaaaaaaaaaaaaaaaaaagaaagaaagaaaaagaaaactcagggttgagagtgataaaggttacatagaaagggtattaggatggaggcaagagggaaggcaacctgaaggactcccggaagaaggtagcaagaaagccgcagacatctagagtccagtgaagtgtgggatgggaaccttctgggccccagacagccggagcagcagccccaaggcagaggtgcatcagactgtacgtgggaagcagagaggggagaatggctgtttgaccacctacaaagggaaggaaagagcgagaagggctggagatgggtttgaggtctgccttggcaaggctgtttatggacctacagtgtgtacccacacacggagagccttcctgcctgagctctgacctgagttctgcaagactgctgcgttcagaggcttgccttggcttctgccggttcagtgtccctccaggcagatttgctatctcgttacaaaagccgtgtcttacaaaacaggcagaaagagtcacaccgtgcttccgtcgattccgaatcaagagaagagtcctcggccctagcggaacgtgttctcttctgtgcttgtgagttttacttggtgggagaaaaggggccacagtggagactgtcatcgaagtgagcaggggtggggaggaggagggtgacttcccaagccgtttccttggactgatgagcttagatgacttgtgaggtggcatctgtgggactttccctcactcaggtacgtttcccttgtaaagctctatgatagagtgaaagttatttaatgcctttgttgtaaagcatgctccagattgtttgcattgacactaagttggatagcagctagagttgggaatctgcatgaaggaacagaagggtcacagtgtgaaacccttgcatcaaattataccaggtgggtcctaaacttttaagtttccatctcagacctgctgaatagagatctgtgtgcaaagcctgggaattgtgtgtatgtgtgtgtgcttgtgtgtatgagtctgtgtgatgtgtatgtgtgtgtatatgtgtgcatgtatgtgtgatgtgcatgtgtggatgcatgtctgtgtgtgtatatgtgtgtatgtatgtgtgatgtggatgtgtggatgcatgtctcctgtgtgtatatgtgtgggtacatgcacatacacttacatgtgactaggaactgaaccttgtgcatcctacattctacctctgagctatacctcccaatctctctttaatattttattttgaggcagggtcttactcagttgcccaggttgtccttggacttctgtagttgagagtatcatgtacttgtctgttgctgtgataaatcactgcaaccaaggcttagaggtttcggagggagaatccacaatggtgggagaggcatggcagctgacggccagagcaggaagctgaaaggtcacattctttaacctcaagcatggagagtgaactgaaagtgagggcaggctaagaacccccaaagccacctctcagtgatgcactgtctccagcaaggccataccatctcccaaacagtgctaccaactggaaccaagttcagatacctgaccctggggggaggggtgggggacagttttattcaaaccactacactcaggaagtggtcctgtggtcccctagcctcaactttcagagtagttgagataacagatgtgtgccaccagcctccagacctggctaaggagatctgcattttgactgccacccaaaggaaggatggttcttttgaaaaagttttactattgtgataaaatatacataacaaaaaaaatctcctccctaatgcttctcttcctagttctaggatagaatccaacacatgccaggcaaggacttgaccactgggctatattcccagctccctagccatttttaatgcttttatcagcatatattaattatgcatacttctatatttttatttgtgtgtgggcaagtgtcatgcacttgtgaaatctgaagatagcttacaggagttagtaatctatttctaccgtgtgggttccaggactgaatttgggacatcagatttagtggcagctgccttcccacactgagccatcttgctgcctccgtgtgctaaccatttttaagagtaaagttcaatagtagcaaacctgttcacggtattgtctaaccatcaccactgtccatcctcagagtagctttgtttctcaggctccttaaacccatccatcacctttagcaatgaccactctgcttttgtcttgaggagtttgacaactctggtatcttgtcagcgaagtcatatttatttgcattttttttctctgtctaatccttgtttcttgtctggttatctagctcaaactatctttgatttgagatccttttgcccaaggtttcttgactgatgggattacaggtttgagccaccaagctcagtttagagtgtgtgtgtgtgtgtgtgtgtgtgtgtgtgactgactttttgtgtctggcttatttcacttagcacaatgccctcagtgcttattcaaatagcaggagttctaattttattcatcttaattttaaggcagaactccatgtacagaatacattttgtgtctccatccatccatctatccatccatccatccatccatccatccatccatccatccatccacccatgaacagttggtcttttacctttggacagttgtcacaggcctgtgaatgccagtactgcttgtcactctaagactctggttccatttgtgctggctctagtgtaattctttttaattttttgagatgtttccatgccgttttcctcagtgactgccacttcgagttacccctagcagtgacctgccaagggctcttcattaggtatctttgccaacatcacccactccagaaggctctggtgcactgatacctctcgaaggtttggactgacatggttgacttgctttggtaaataggaagcttgataagaaaatgataatttgctaacgtctgtctcacgtcaaccgagcagacatgttcaggtggtagaacccagatgcgttgtcaagtaatgactcaggggaatgactgacacaggtagcgtggatgcaaggagactgcgttagtgttctgaaggatggctgccaatgctcttgttatcagtgctgcattttgtggggttcatgcactgaagtttgctcaatctagggaatagctaaaaataagggaaaaaataagattatttttaaaaaataagattaacaatttgcggggccaggggaatgggtcttctaaccacaagctaaagattctgaattgagaagtgatagaaacacaaataacaagcaagtatattacctatttattcatttgttgttgttttgagacaggttttctgtgtagtcctgattgtcctggaacttgctctgtagaccaggctggcagagaactcagagatctgtctgcccctgcttcacacgtgctgggagtaaagatgcaagccaccatgcctgnnnnnnnnnnnnnnnnnnnnnnnnnnnnnnnnnnntcttcttcttcttcttcttcttcttcttcttcttcttcttcttcttcttcttcttcttcttcttaatacagaccactttacaagttttccaatcatccttgcaaagggccaagctaatttcctctatatcatcctgaatttatcatataagttcatacagtaagcacctctcttgattttcttacccttcccaggggctatagctttatttatttgtttgtttgtttgtttgtttgtttttaattaagtttgagtgaagccgggcatggtggcacatgtccttagttccagcactttagtggctgatttctgggttgatgttagcctggtctgcagagtgagacctagtatccgaaggaggaggagaaagatgaagaagaggaggaggaggatcaagttcgagtggaatttatatgatacaaaattaaacttgtgttttaaaattggttcattttcttcatgtatgtgcacacattatggtcataggacaacgtgtggatcagttctattctacagggctgtgcagctgccacttctgtctcatctgagtacatttttaaattgtttaaaatgacatctaatatatctgttgtgtgtgctgggtggtgctgtctggtatctgtgtgctgtcacgaggtatgtgtggaggtcaaagaacaactcatggggcctccattccttcctccgtgtggatctcaaggttgagcttaggacatgagcattggtggcaggaccctctctacccactgggccatctcgaaggccagtagtgctaacacacttctatcatttacaaaggatacctttatacccaccattctttttttttttcccccttcctctagcttctggaaaccactaattagctctctgccttcagtagatatttcatattagtagactcgtggaatatgtgactctgtgtgtctgccctataaaacacatttagttattgggtttgcggagcctgagttgtgcatgtatggaggtcagagttagcctgtgagacttggctctctacttgtaccatctgggccctgggggatcaaattcagatcatcaggcttggaggcaagtaccttcccctcagcctgtgccctttgacccagcatcaggtcttcaagctcatccatgttctgacgtggtcagcacctcgctgagacctccagccatcctctcccgatcatcttgagagcagggcattctttagacatagcccgtagctctccctatgatcttgggaacagagtattcttttgaaatattctttcatcaatcctacttcagcatctcgaatgctggggttgtaggtgtgtaccatacctgcctttacttcattgatttttgttgtttagttatttaagttttttttttttaacaatttatttatttattttatgtatgtgagtacagtgtagctgtacagatggttgtgagccatcatgtggttgctggaaatttattcagggtctctgctcactctggcctaaagatttatttattattatatgtaagtacactgttgctgtcttcagacactccagaagagggtgtcaggtctcattactgacggttgtgagccaccatgtggttgctgggatttgaactcaggaccttcagaagagtagtcagtgctcttaagcgtggagccacctctccagcccagttatttagttatttgagaaaggcttggtatttagttgagaatgactgagaactcctgaccaccctgcctctatttcccaagtgctggtattatggtctgtgttaacttgtctagtgctttttataatgataataacaataacaaaaatattattatatataacatgtaataatatatttatacatagcattacatatctatacacaaataacttattgataaatatatttattaattatttaaaaattaaatcaattttataaatgaacgaacaaatatattaagtatattaatatactttatataattatatacaattatattgttacaatagtaaaatataatatttttattggtaatatggtaatgatgttattatatcattatattatattgttattgctattgttattattgttatgtttattattagcatgggctcttactttatagggtaggctgacttgaaacctacctgtagctgagatcctgccttttttttggcagccctctttgaccactctccagtctatcttgtgactctgtgtatgctgtgccttcgctccttagagtttcaggtcctcagatgcaggtctaggagacctgggtaaaccttccaaagaggtgggaattcagtggggcttgtaatcgcttcctttcccatggatacagcttagccgggtcctggaactgaccaggcaaaggagagtttgaaaagtagagaagtatagatagtctgtggcgccacttacgaggctgtcagatctgctcgtctaatttaatgaggggcccccacctcagcatgtctgactttcacacagggtgtcttgctcattataaagagaaaaaaaaaaagcccaaacctctgggggttatggacaatgctgaaagtgtgagtgtgatgctgatattggtataatatcagcacgggggagggagtggggtgggaggggttaaagcaggagactcaggagttcaaggccaccctcggctacatactgtactgagtcagaggccatcttggttcgcattggaccctttttcaacaagaacggtattagaagatctttaagtctgaaggcatagagaatgcttcttcctaccccagttgttatttgttggagctaagccctcaaacttcctttgacttcatatttccagtgatgatgcgcacatcatctctgcccccacagtccagtggaaagagagtggagcatctctggcctctcttaaacacattattattattattattattattattattattattattattttgtttttagaagttcacctctcttaggcacagggctcctgtggtgtgggcagaaaagaatgtcacctggcctgtcccctcccaccccagcaaagagcacccactccacttcttcttcctggaaagtgttcatatactcatatactggtgcttgccgggtgttgtatttggttttggacactggcgacaaacaagcatctgtcctcccggagtcaagataggataatgaccgacctgtcaggatctcagctgaaggaggaggtagttaatgttttggagtgatcatgtgctgcgatgccccggtctcgtggaggagcccgagtttggttttgatgtggaaggtgaaggccgaggcgagtttgggcctgaaaagcaacagctttgtggtttctctggttaagcatgactgccacgtgagacggggtaatcacctgcagggggatgcacgggccctttctttacacaggctttaaagatcggtttattagagtctaatgaaacaattagaaactaaaatggagtaattgtgttacttcccaccttgggcagtaaaactcacagttcctgataattgcagccctgttctgttctgaaatgggtcggagaggaacttggtctgacccccactctctcctttgtctggcacataaatccccttccatacgaaggaccccttccgtccacagctaagtttttaagtgagcacgagaaactctgttttccccagttcaactaacatggaaacggctaatcctcttaccgttcttgattttgcaaacaaaggtttgtcgggataaaactctttaagcagccagtcacatggaccaggtatccaggtagtgaccctcaagtgaaatctgctagaacagccagccaatcagtggcttaggactgtctctcacactgctttgcttggctaatcttcaactacagattgggcaactttagtggaaacagtgaatgcaaacgatctcagcacggagggaacaggcacttcaccttattacctaattctccactcagctttcagatccccctatttttagtttgagagaaaataaaccccccaaaagccattgactgtccagtacaatagccatatatcattgtggctactgacatattgcatgaatgggtaaagtggctggggcggtttaaatttatattaatttctttttctttcctttctctttcttccttttctgtttttgtttttgttgttgttgttgttgttttgttttgttttgagacggtttctctgtgtagtccttgctgtcctggaactcactatgtagagcagactggcctcaaactcagagatctgccggcagagatctgccgatttctgcctccctagtactggggttaaaggcatgtgacaccattgcctggcactgccactactcaggaataaatggtcttctttgtttttagatattatacattggtttcattttatgctcactggtgttttgcctgcatgtctatctgtgtaaatgtgtcagaagccctgggcctgaagctacacacagctgtgagctatcatgtaggatgctggcaactggaccaggagcctctggaagagcggccagtgctctaaactgatgagccccagttgatactaatgtcaatttaaaaacagaaacaatgggctgggcttggtggcataaatctggagtcagaggcaggcatgtctctgtgaattctaggctggcctagtctacctcgagagaaccaagctagagctacaaagtgagggcttgtctcaagaagcaaaacaaacaagccaacaaaatctgaaatgtgtttagctactttatgctattagcaccccaccattctgtttaaaagctaggattagagtcaagcatacttgtccttaatgccaggccttccgttttctatatttgaccttggaccaattttttaaatgtgttaaggctttggttttctcatctgtgtaggggctgaagagatggctcaccagttaagagagcactggctcttcttctaaagtacccaggcctgattacctgggagcatgcacagggcaggttacactgatgccttctcctaacttctgtgggcactagacacattacatctgtgtagacaaaacacccaggcacatttttttaaagtggaaaaaaaaagagagagagaagaaatggtacagcaagcaagttttagtttataacgtctgaatgaagactgaaggttataacatgtaaagtgcccagcacacaagaatccctcggctcccacaagcgtcattccggatggtgtagggtttgtggctgtagtttgtttgtttgtgtagtcccagagattgaatttggggtctcacagatcttgggcagagagctccatctccttcacgccattgtcggggctcttggcaggtaacatcctcagtggtattcaaatgccttctctgccatcttctgctggttctcaaagggcataagcagagttctgtcctttgcattttgtggttcctgttaaaggtacttataagttggggctggagaaatggctccgtggttttaaggatgtctgctgctctggtagaggatgggagttctgatcccagcatgcatgtccggtatcttaattttgataagccaggtcctaaggcacattattttaacaagttatacacagacttttgcctatatagagtctggtctagtggcacgtgtcatatagagtgtccccacccaaggtgtatagtgagaacctgtctcaaaaatggaattttttgatggaataactaagtgtcaaactgtctgcctccaggctccgttgatggaataactaagtatcaaactgtctgccgccaggctcagcctgttcgcttggagccctgtttgcacagtgactgactcctgttgagtctgcacacagatgttgaggagaaccagggtgagcaggagttatttgaggaagtgccgtctgctctgccttgctcagggtgtgggctctggagccagggagccagggctctgcctctcccccggaactgaagcggctgtgggtctctggctcagttctgctccaggaagctgcttcggaaagtgagcccgtaaggaaccgagcagtcatgtgttcatgagcaagtcacttaaaacttcttctctagcacgtgatgtgtgctgggctgggtgtcagcaattcacagcctttccaaggggacttatttgagcaactcctattttttttctcctggtaaaatccagtgtagactgtctgaacctaatagccagcagctctttgacacggggagaacttatttcatggcagtctacctcagtttcttcttctgtaaatgggcaccatattacctaccgggattaatgctttttatcatcattattattatcgtgtatgcatgtagggggacacacactactgcatatatatggaggtcaggggactgcttttatggagtcagtttattccacctttacatgaggtctggggattaaattctcatcactgggcttttgtggaaaatgcctttatttgctgagccattttactgaccccttcaaaggctgtggataccatgtgataacacactctaaacgtatataataattgctgtcacatggcaatcaccaatgtttagcaaaataagattagggctgaggttggggctccaggcactgaattccatcccagcatcagctaaataagttaaataaataaataataaagatatatctcattacgttactatgttgacggtcactttaccatttgagagatgtattcctatctattatgttagctgctcggaggatagaaagacctttgagaattttgtgtatataatgaacaagctatgaatgtaatctggcaaaaaaaaaatagagaacgcaggttaagaccagggctctctgacggatgactttccttcactattccatgactgccctccagggagctcagcctcttagtcagtgatgtgggcctctgagcagatgtcccactgtcccttctactagggcctaaagtgggagcctagcaagatatcatattgacagcacacttcccagaggttcagcactcttcccaggggctgttggtcagggaggccaccagcctgtcctgcttcaactcacatggcacccaagaacccagctgttcctttccctcctggaataggacgtcaggaacttggtactgtgagtaaaacagagaaaaccaggtaggaactagttgtctctcttcacgtgatcaaatagcctaatgtgtctcttcagggctaaaccatcaccaccccaaggcagctggtgtagattggcccttagtcacaaagtagccctgatcaaattggtctggggtggggggggggcggcgagggggtattaaggacaaagccattgaagattaaaatcctaaggctatgtgacacttctcaagagagagctttcagtggtactctgcacaaccttcccctagtgagctgtggtatgagttgagcgtctccgaggagctgtagttcttggagttaggataattcagtcccagcaggcacggttgatattctggattgtttgtgagggttctctggcattctacaaaaggaagccccacccatggccaccacccacaagatgccagcaacatccaccaccaaaaatgacttcaggcatcaccaagtaacttttgggggttctctgtggcttccagatgacctacatctctctgagacccttagaggtgtccatggtttaagaaatgactgcaccttgtaagctttacatctcagggtttttttttttttttttttttttctgagacagggtttctctgtatagccctggctgtcctggaactcacgttgtagaccaggctggcctcaaactcagaaatcctcctgcctctgcctcccaagtgctgggattaaaggcgtgccccaccaccgcctggctacatctcaggtttttactgcttgaattttgttccttctaatgcgtgtttgaaaacctatcttctctttatgagcttgcaatcacttacaaaattaaacagaaatgtctacagaatgcagatttgtctatgattgtctggagagagtcattctatagtttttgttgtttggttagttggtttgtgtcttagttagggttttactgctgtgaacagacaccatgaccaaggcaagtcttataaaaaacaacatttaattggggctggtttacatgttcagaggttcagtccattatcatcaaggtgggagcatggcagtgtccaggcaggcatggcgcaggaggagctgagagttctacatctttatctaaaggttgctagaagacagacttccaggtaactagggtgaggatcttaagcccataccacaggacacacctattctaacaaggccacacctccaaatggtgccactccctggcccaagaatatacaaaccatcacagtttgattttgatttttgtttgtttgtttgtttgtttgttttttggttgttgttaatctgaattacttcttttaacttttcaatttgtctcctcagtccccctctaagcaagtaaatgaatgtcctcatttcttagaataactgtaattaaacttgatcttcttaattagagatctcctttcctttcatggtgctaactttgcccaggctatttctgaaataatgaatttgtcttttatgtgaaaaaaaaaattagtttcttctcttggagaatatcttcagtccccaaagtctaacaaccttgtggtaatcattaccatctttcttacaatctatgtgaaaaacattagaaacactgctctgtgactgctatgggtttatcgcaggtgatccaacctaacatttggctttgaacaaatgaacatttgtttttaaagatttatttgtttttatttctatgagtacactgcagctgtctttagacacaacagaagagggaattggattccattacagatggttgtgagccaccatgtggttgctgggaattgaactcaggacctttggaagaacagtcagtgctcttaaccactgagccatctctccagtccacaaatgaacattttaagctcacatgtccaatactattttgatactttgcagaaatgacaagtccttatttctgtaaactttctacaatttttttttttacaaaaagatttatcttattaactgatttacttatcttttatatatgtgggtattttgtctgtatgtatgtataccaagaaggtgactgttgttcacaaaggccagaagtgtgtgtcggattccctggaaatggagttatgggcaattgagggctgtcatgtgggtgccaggaactgaaccccggctctctttttttaatgtccaacgcatctctccagtcctcttttccaaattttagttgtccttaaagttaagtgatcttcctttccttaactactaaagataatttctctttacaatatttacctctgtcacagtgaactctaatctcattgtaagaactatagggcacaacggaggggacagaattcatctgaggtaaccatttgggggattataaatcattgtcctttgtttgtccactactgatttcgtcattcttccagcaaatgataagtgaggaaggtgtgctaactcagggagtccatggtcagtcagaggaagaaaatcaagctcagaaaggcccaatgatttgcatatactaataagtaaagtcacaattttagtgatgttgtcctcactgctgccaccagaatctttccaacacagcgcagagcttccagaggtcaagaatgagtcttccgcttgacccacagacctagttttgtatgtaatttatacgagaggccttgggctttactagaaaaacttttctgtaaatacacagcagcagtctagatgccacctctcacgtgctgggtgggattacaagcttgcgttacatcacaccacacccaactcgggtttttgagatcatgttctgtatctcaagctggcttcaaacttgcaatcctcctgcctcagtctcttgagtgaggaattacacataaaactcagctttgtcttttgcagcacagtatgctcatgtctgtctgaagactgcccctgtagcccagaggagagtgtaaggcagtttgtgggccagattgcatcccatcatagtggtgcatcatttcctccctccccaccacaagggtaaactctaatcatacacacatacacacacacacacacacacacacacacacacacacacacacacacacactttttgtttgttattaagacaggtctctgtgcaggggcagccttggatggtgtgctggctagttttatgtcaacttgacggaagctaaagtcatctgcgaggagagaacctcaattgagtaaagcctccataagattgggctaaaggcaggtctatagggcattttcttaattagtgggtgatggaaagagcccaggcaactatgggtggtgccacagctaggccggtggtcctggatgctataaggaagcaggctgaacaagccatgggaagcaagccagtaagcagcacccttccagggcctcagctcctctccccaggttcctgcccagttacagttcctgccttggcttctctcagtagactgtcgttactcccgacatgtaagtcaagtaaaccctttcacctacctccaaggtgctttggtcatgatgttttatcacagcagtaatgatcttaactcagacagacgaggagagccaagaatcctactgggtgagaccagaattagtcctgacaaggagaaaggccctgcactgtaatggtaactgcctcaggagtttgagctatccctgtacttcacagtagagggatcttggtttggcgtggaaccttctggagggcctctcctgtctgtattcctgtaggctcctcccctccccccagttctgcttctcaggtgggattgcctcttttttttctttagacaccttgatcccagagtccagtctctctcttttgcctcttgtccttaagccaggtagacaaggtgacctttctattgatttagtgtatctttaaatacagtgcattttgcagattatctttgaaggaacttgattacagagtataaagacagagtgctggcaatttaatgatagcttttaaaaatgaatcaacaggtccatgggttgtttgagaaatgttaaaatgtgtaaaagggtgtgctgtagaggagaagaaatgggtttctttaatttttatttatttattgtcatggcaaaaaaaaaaaggattcttagatgtagggtgcacttaaatgctttcggcattattcggctgtcttaaaataagggatcctggtgctagtctcctgtcccccaaggtgtagtagatacactcagtggagatgtctctgtccatacgtaccccccccacacacacacacatacacactcacacactcacacacacacacacacactcacacacagtgggagagcagggacagcatgtgttgcattctgagttcggggccgcttgtgttttagatggagcttggagagggttctgctggtatctgagaggagataaaaatctccaggcagtgtggatcctcactctctggaaacatctgtcctagggaaggaggacctgattgccgctcagaacatctgcatttctagtcttgttctttagcccacgctgatttggaagaagcctgtgacgaagatcatgcttcctcatgctagaatgtgctcgagttaggcgtgtaccgccacgcctggctgcattgctcttgtattttattggtttggtttggtttgggtttttttttttttggtttttcgagacagggtttttctgtatagccctggctgtcctggaactcactttgtagagctcttgtattttaaaaatcaatcttcaaagctctggatgcatttagagggcgtgcagggctctgcactttcccttcctcctgttcttctccctcctcttcttccttccccaccccctcaagcaggctttgtgctcactagctctgggccaccgtacttggttctatgtagtgctgcggttggaacccaaagcttgaagctctctgtagactgaggtaccttctcaacccagttgtgcattttctgtgtggtggatgcagattctgtcacatgctggtgaaacgtctaaccgtcagactccgaccctgttaggaaattcctagcgattgtgcaaaccctatgagtgctttgggtgtttggacaacagtactttggctgactcatcatatttttaactgttgcggctctatgagagtctggaggaaaatcagagagaaggtaatgttcacaaagtgtgtgttggtgagtttagtgctccaaaagtaagtgtgtgttggtgagtagcttgacaggtcttcttctcatggctgtccagttgtaaagtaaatgggagtggaaaagaaagataaatatcaaaatttgtgtaaaatcagaaaaaacccgaggctgtctgtttaatttgtggtttgttgtgcacaggcctcagactgggactgtgtgtgtgtgtgtgtgtgtgtgtgtgtgtgtgtgtgtgtgtgagtgtgtgtgtgtgtgtgtgtgccagtagacagaactgggaactaaggaaccacaagcaagtgttctttttctttttctaccccaccataaaggctgatttagcaggacaccacaaaccctccctttaagctagcaagtcttcctgatttgggtagggccctgaaagatggtcaggctgataactagtgaacctcagaagaagtctgctgagtcaagactttgcctgcgctggtgctgtcacccatggtgagctgccaaatagcatcgctggccactgctttacaattcagggctgggggacgtttgtgtggcccctgggtaagcagtggcttggccctagcccctggttttccttcttcttttttagattattgtaattaaatttcatcgtatgaattctggttttgtttttgcttttgttttctttttttctttagtgttcaaagcaatgttgcttttcctttctgtagatggaatttcatctaacccaggctggacttgaactcttgatcttcctgcctctaccctcgaatgccaggatttggggtggggtggggcaggcgttgcgcatcgccatgcctggcaatagaagattcatgcaacgttttcataatacatgtcattgtactttgctcatattctgcccacagccccttctctttctccagagagtcttgtttttgcttgcatgttacttacattctatatactagaaaaaatgaagtgtttgtctttgagtctggtttattttaattaacatcattctccccggtcccatccactcttctgcaagtgacatttagttccttctccaatgagtctgtgtatgcccttttctttatggatttctctgttaatgggcatctgggttgatcctatcgtttggctgtgtgcataatggaacaaccaacatatgtgcaagaatctctatagcatgttgacttagctctatagcatgttgacgccgtctgtagagttaagcatgttccatgaggatggtgtagtctttctgctttccacagtggaccgcaaccctttacattcccgttggctttccattgtgagcttgagctactaggttgtgtcaagtgctgcgctccacctcagatgcagaagtgagacaacagccctgtcttcatggaaactacatctggggataactgaccaccaaccaaacttggccagtatttaattgtgacctgtgataggtacttcgagaatggggtgggagaggagagggaatctgtgtgattgaggcccggaggaagggcattgtggaggaattggcattggactgagactggaagagtggagttggctcaggctactggtgaaacaaaaccctaagcagcatctgtcatttctacacatgattagcttagaggatagaaataaattggtgtttctctacatttcgggcagtagtggaaagcggtcttcttccctctctttccttctcctcccttccctccttttgatcagttcgtcttcaaactctatcctcctgcctccacctctcacctgctggggaatgcaggcctgaaccacaacacctggtatttccccaggagtttctatgtggctctatttgaatcttgtcagaatacaacaccaacaggatgcactggtgtgcccaatatgtggccaaattgtactcaaaaggaagaggtcacaggctggacttgatagccagtgcatgcgacctcagtccttggccagtcaaggcagaagcctcgggaattcaagatcaccctgcaacaaacaacacaccaagttagaagccagtcttgcttacatgagcaatgttatctcaaaaaaataaaacatacactgccactcaccaataaaaaaagaaaagaaaggcaggaactggtgcctgggagtgcctgtcagactgttatcctcaggatgacgatgagagggggtatggggcactcagggtgggacattctttgatcattctttgcagcatagcccttgccggatctttcatttatgtagatgcacctttatcttgttttgacacaaggtctggggatgtatgtagtctggcctccgactctgcacccttcccaactgagccttccatagactgcattgtgtatcactgtgcctgctcagaaatgaacctttaagctgttggaacagctctgctgaaatccattgtttctgtgtaaacccagagacaccagatccctcatacacctgcattctcagcttcagaacaaaaggcccccctcattcaacggcagcctctgatctcggcaacttgcttgcggaggttgtttgtcttccactgttgctctgggatttgagcaaatatctgagcttttattcatagaagaaggacttgaggtagacctaaggaaggacttgaggatgttgttgaaacttatttgattaaagaatcattgtctgactgagtgagagtatttcatttctcagttaagtattgagtcgtgatagaccacctacttcagggtgaatctgttgaaagaggcaggttagggagatgctgcaaagggctaaagatgaaggtgcatgcatactttagtgtaagaagtgaaaaggagataggaaagggctggtaattagcaggctctttcaaacagagcagtcagaagccagcaaggtggctcacacttccatgtgtgagtgccagcacccttgtggaagttagcggacagagctcgccttcctccatgggctctgggaatccagatgaggccttctgtcttgcacagcaagcaattttgcccccagagccttctccccagtccttcccttatgaaacaagtctcccattcaggacgctctgcttcagccacttccttccactgctgagactgcagtctgagcaatttctctcttctatctctctctctctctctctctctctacatatatatatatatatatatatacatatatatatatatatatatatatatatatatatatatatatatatataaattgataaggggctactcttccagaggacctgggtttgattctcagcacccacattgccaactgcagatagtctcttgtggcttccctgggcaccaggcatgcatgtacatacatacattcaggcaaggtacctagacacataaaaataaaaatgaacaaaactttttataaaatttgttcagctgacatgctggggcatacctgctatctcagtacttgggaggtagaggctagagggtcaggagttcaaggtgagcttcagccacacagccaacccaagaccagcctaggctgtggacatgagacctttatttggggtatatcttttgttttatttctgtggagtttgttagtttagggtgcagttttcagacagatgagcaatttggcccctcctcctgccttctcatccctctccacttgtgtgtatttattttgttttgttttaggaacccgggtctcctgtaacccaggctggtctcaagctctgaagctaagcttgaactcctgatcgccttctatcttctaaatgttgaggtttaggcctgggacaccaaagggcttcctccatcttttccttcaattccaatgttatttcaagaacaaagttaagtacccttcggttacctctgcattagtgcaaagatactgtgggactctggagtcccactcagcgatggcagcatgtgaacttgcaagtctgctttcttggccctgacttgtgaggatctctgcttgcttttcataggctggctccaccttgccaaagtaaaagtaggtactaggatattcaaattaagtagcagttaacattgagatgaaatcacccattgaatttgtcagcctcaaaccatattattttgtggcaactcaattttcatagtacttagagctgtgtccctaacccgtcatggacatgtcccctctcacatgcttggggcatgccatctcctgatgggcattggtggacaggctgggctcttggcctgcgttggtgttcaggccacaagagggcagcttgttcagggaagttaggtaagaaagcactgttcttggagggtggaggctttggactttttcaaaactttcttgcataaagaagccttttacattccaagtttcgcccacacaaagaggggatatgatatgatcaggataattgtcaggagagttctctcctgcacttacttccctgtagtttggaatttaaatatccattctctcctctatcctatctgccttcagtgtttattgtagtatcatttaccctcgatacatctcagtgtgtatgtgtctatatgtgagtgtgtgtgtgtgtgtgagtgagagagagagagtctgtgtatgtgagtgtgtatgtgaatgtgtgtgagtgtgtgtgagtctgtgtatgtgaatgtgtgtgtgtgagtctgtgtgtgagtctctgtatgtgagtgtgtatgtgtgagtatgtgtatgtgagagtgtatgtgtgagagtatgtgagtctgtgtatataagtgtgtgtgagtgtgtgtgtgtgtgtgtgtgttctctgtgtgtttgtacctgtgctatcaggtttactctccaccccacttttggagacactctctcactggacacagcacagtgctctattgactagactgactgaccagtgttctccatgaacctgcatagctctgcctactctcctgtgtcccctttgcccctccccgatgttttaaggttgcgtgtgtgtgtgtgtgtgtgtgtgtctttttatgtgagtactgggagttagatttgcttggtgtttccatgtagcccaggctggtcttaaattccctgtttccttcctgactttgccttctgaatgattggttgatagatgcaggtttcaggccggatgcctgcttctcttcaggctgaagtcagtgttcattcataaataatatttttctacacttgatcccagtcaaaacgctgagagggcatttattgtggtcctttcctgtgtgagagcctgggagagagccaaggaaatcaaacctagcctatctatagtgtgtgtatagtgtgtgtatagacaagtctataggtttttaaccctttgctgtcttgtttgttgtcttagtctggcccgtgttcgctgagagggagaacaatctttaattacacaaccattagtttctcatttgtttttcaatgtttacttctgttttaattagcattcagtgcacttacacatttagactaattaactcgagcaagcctccctctgacgggaagggctgccctccgccctgccaattgactgatccgtgaggagagtgggcacagtcagcgcttcagtgacagggaggttggagctctgctttctgatggctcaaggttttaaagaaatatattttctctcacgagcacatgcctaaaatctcagcactcaagagggggaaatctccccaggcagagagatatgggttcaagggcatcctcagctatatagttctctgctagcctgggctaatgaccaaagtagttcccatgtttgttccttcctccctctcatcctccttttcctcccatttctttcctcctcttttctttctcccctcctagtgtgcccacctctgtgtgtgatgcccttgggcagtgcctgcattggccatggctgaacacactgaccattctagttctgaggctctaacattgacccaggcatctctgtgcccgtggctctcagccctcagtcctcctccacatcatggttaggatgctcctccactcaactgcttcctgattagaagtcctcagtggctccctgtaccatcagatatgaattccggttcctctgctcatttagcctcgggccctgcccatgctgcatctctcttgccaaactggttactgtattctttatgtctcttccttccccgtgaatctggaaaatgtctcctctctctctgtgtctcttggacacgtagactcgtccctcagttctcatcttccttgattagtctagatggagaaattcctgctatcctggtttccattgctccttgcacatgctaactgccatcccagcattttctaatggtctccctgcaatcctgtgtcctgttaatctaacccccccccccactccccacttagaaggcagtggctttgtcttcttaacctaatgtttctagcccaggtgcctggattataattaccacggctgcagagctacaattgctattacctgcatttggcaaaaggtcctggtgtataatgtgcattaatggtgttcatttaatgtgttgaaagcatcaatggtgaattttttttaatgtcctgtactggcttaggccaagagccatcaccataatcattaggccatattttatatgacctacagtaccatagagtttctaaatgtagttgttgtagatagatcatgtgtacccttctccttcccactgtccactcttgtcctttaatcgtgcacttagccacctctgctcatctttggcacgatggccctgagacatggggttggggcgtgggaagttggcattgattgattggagtaccataagaaaataccacagctcagcggcttctgcagcatcagttgatgtcgcggttgttgtagaagctggaattcaagatcagagtatccacagatgacccctccctttttataatttgaacgtgtacttatttattgctgggtggcaggccacgcacggaggtcagaggacaccttgtgggagtcagttctctccttccactgtgtggcttccaggaatcaaacgaaggtctggtggcaagagcctttatttgatgaaccatctagatggctcaagatgactctcttcttgctgtgtcatctcttgtctggtccacataccctcgtcttctaaggattccagacataccatggcaggacccggcaggacccatccctgtggtcttatgtgacatggatcactgctctgaagatgccatctctaaatacagtcccattctgagcccctgagggctgggacttcggtaaatgaaggcagcagggctatgtatcctgtacaaggcagggactctcaacatctgtggtttcttccttgtatccaattccctgttttatagcatgtcaataaaaaaggagcccagggactttcagggagagaacacaatgtctcccagtcaagtgatcgctactccaggtgctttgatcttgggactacacaccgtgtcttaggaaactggtgcttcaaaaatgccaggtagaacttcagtgttcttctgtctagaaatctgtctcctttcatgacctgtgggctgcatgcttcctttgtccagggtttgatgaacagggagaggtcaggcagtgacatggcaccacctccgtttgctgtaagcaaacagttggattctttattacccttgaaatgggcactcctgacacaggaaggactcagagaaatgaggcagtgccaagtgtctgtgggtcaaagttccatcaagcaccatatgctaatcagaagttcaagcttagttagcctggccattgcccagggagaactttggagtgaatgcttactgagttggacactggagttatcacagtaaatcatcctttacaggaggcaggccgtggtcgttcttggtaggggcaggagggaggaggctcttgtcacggtttgattcattctctgtggagtgtaattatataataaaatctgctgtacagaacctagctactcaaaagtgttttagtgaccataaagccaaacaattagggaggcttggctatgtaagcagaaaagacagctgtgaagggcacccaaacctggaggaatatgtccttcgatcggtagaccaggctgacctcaaactcacagagatgcgtctgcctccgcctcccaaatgctccgactaaaggcgtgcaccagcactggtgttatcagtggttcttaatggcagattcctcattagcatcttttgggttactaatggcatttttttccatttcacagctcaggtaacacacaagttagaagaacagcttgtttcctgctacgcagccaccctcagcagttcccagctcactgaagttcggtaagttaagacggcttcattctgcccactgacagatgaacaccatacaggcgttcagagcattgcatagtgagttccatgcgcaaatcactaccgttcctccttattatgttcatcttaaagattattgcttttgtttacttttatgttcatgcacatatattttgtaaatatatgccatgtgtattctgctgcccagggaggccagaataagaatcggatctgccggaaccatagttacagatggttgtgagccacctggtatgagtgttggtcttctgtgagagagcagcaagtgctctaaccactggaccatctctccatcccttattattattattaaaaacaaacacccctcccaaacaataccacctttgttttgtttttgtcaaacacactaggcagagtgccctgtatgtttgtacgcaccaatgtttccataagaatggaaaatagaatggaaaaaaaaagaataatttgttttgctttttagtactgattttaatgggcatattttgtggtcagttagtatttggctttcgttggattatttgtatctttgtaatgtcaccctcagcatctacccacccatcaataaatagtgatttaaggtgactgcaattggggtgtatcccatggggacttggattctgacaatccttaaataacccacaggaaatgttcccagagtacagtgcacttccttttgggaggtagatattgaatttttaagaggagacaaccatgttctgagtgaactaacaggaaccctgtgcttccccagtgaaaaatttaagctcctagttctgaaagagaaacctgtgctaaagtcacctgagccacagctgaactagtgctgtaggctaagcggcccttccaaatcacatggccttacacaggtgaaccgcacccgtgcacccacacacatgatccacaatactgtctacacacgtgcttgcagaccacacatacacacacacacacacacacacacacagagagagagagaggagagagagagagagagagagagagagagagagagagagagagagagagaagagagactcaaagctggagaaaggaaaataatgagaggctcagatgttgttcagagagagagagagagagagagagagagagagagagaggagaaagaaagagagagagagagagactgactcaaagctggagaaaggaaaataatgagaagctcagatgttgtccagagccagggtttgaccatcagggaaggcctggaacttgagtgacattatgatctcagaggcaaaataatggcttagaaggcagagaggggctgggggacaggtggtactgactggggacagccatttgagggttccatcatagcccacagtgacagtagcaagaaatcgcatgaccctgacgggtctaggtggagaaggctttgggtgtagaacaagaatgtggttccgattctggaagaacctttgacgttctggaggaggtagttttccaagctggtggtcagatttgtggttgtcacagctagcttgtcaccaacctcgagattgtttcctgcctggtgtaaccaggcaagggttctcattagcttaacccgggtgtcccccacaaaaggctgtgtggaaactgtgggtgtggagcccccaccctcagcctctgtactctgtgttgatattgtccatctagagcactgctgaagtcagtgttgtcctatgtgcctgtaatctcagcactccagaggtggaggcaggagggccaggagttcaagaccaccctcagttatataaccagtgtgagctgtgtggagccgtctccaaaaaaaaaaaaaggtgtgtgggtgtgtgtgtgtgtgtgtcctggccctttctgactcattgtcctttagactccattccaaggaagttcatggattaggaggtgggtaatctcccagttggaaaatgaaaagtaagataggtttttttcgttttctgttttgttttgtttttaataagaacactggtccagagttcatttatttatttaacgtgtgcacacattggtaggatgctgtatatgccatgttacatgtatgaaaatcagagaacaactttggggagttctctcctaccatttgggtctcagggatcaaactcaggtcctctggtttggtggcaagccaagacaaaaaggatttctgttgttgtagtggctgttgtgaagtggcggctggtcctgtccctgaactaaggctcacccaatgaaatgatagagttctcagaagcagttctccacacacccctaaacgttgctggagaacaagttttcggaaacagctctctcctcttctcattccgagaaggcagctggaggtgagggccttggagttacacaactgcttagcctgtgtgagggaaactggcgaggggcaaagacaaccaaaggtcagacagataagacgagcagaatgtcttttctttagtcatgcactggcagggtcctgtcacaaaatgaccctggcttgctcaaaacaatccaaggagttctagaagcagctctttgtcttctggcttaaacagaatacttctttccttttcttttcttttcctttcttttcttttcttttcttttcctttcctttcctttcctttcctttcctttcctttcctttcctttcctttcctttcttttcttttctttccttttcttttcttttcttttcttttcttttcttttcttttcttttcttttctttttccattttggttttttcaagatagggtttctctgtgtagccctggctgtcctggaactcactctgtacaccaggctggcttcgaactcagaaatccacctgcctctgcctcccaagtgctgggattaaaggcgtgcgccaccactgcccggcttcttcttcttcttcttcttcttcttcttcttcttcttcttcttcttcttcttcttcttcttcttcttcttttaaattaatttatttattatatgtaagtacatagctgttttcagtcacaccagaggagggcatctgatcgcattacagatggttgtgagccatcatgtggttgctgggatttgaactcaggacctctggaaaagcagtcagtgctcttaaccgctgagccaactctccagctctcactctggctgaatagttgttttctaaatacacattagtaatatttactatatacagtgaagcattagcacatagaaagtgaggaagagagtcagagttcagcttgaaacctgcccaaggctgctgtaggaaagattctagggactacacatgaaggcaattaaaaaaaaaaaatcccagtacaacaaggtctccacagcagattccaagaatgaaactgcagttaataggaaataacgacattaatattaacagctccaccaaataaaaattaatgttgttcatactacagttctttgggtaaggatgtaactctattggcaaagtgcttgcttggcacaaatgaagccctaggttccatcctgtggtggtttgaataggaatggcccccaaagactcaggtcttgggactgcttggtcatagggagtggcactaggaggaggtgtggccttgttggaggaagtgtgtcactgtgggggcaggctttgtgtctcctatactcaaactgcactcattgtggtccgtagtctccagctgcctgctggtcaagatgtagcactttcagctccttctctaacaccatgtctgctgtgtgcctccatgcttcctgacatgacaataatgaactgtccctcaaaaactgtaagccagcccaattaaatgttgccctttataagaattgccatggtcatggtgtctcttcacagcaataaaaccctagctaagacacatccctaacatctcctagaactggatgtggtggtacgttgtctataatcccagcacttgaatggtggaagcaagagaatcagaagtccagtgtcatcctcggctacatatggagttcgaaaccagcctgggcatataatatagatcatatattgttatccacaaaagtgccctagcttccatagttcatcaggccacctctttcttccaattgagataactcattttcaaagtgaaaaaggtagaaaggtagacatgagtcatggtttagccaacaatgtggcagacaagtgggtgtttgcctataacggaggtctgtctactacaaggaagaggtttactccaaccctgcacaaggaaaacgagaactgggcaccaacaacgtgtgttctttggcagaataggggctcagtggtggctccatgctttgtaaacggtatttaatggcttggaaggtaggaaactactcccaagttctgaggctgagttattcggttaaggtcaccaggaaacctttaggcatcttttgtaggtgacattgaaatgttaactaagtggcggagaagttgcttagaatataccaggctctgggttcaagccccaccaccacaaatgtcagtcctgaagctaccaagaaccgtgtgtgtcttccagccagtcagtagatgtgcattgaagtcaaggcttcctgcaaggctttattacgttaatcaaaaacggattgctcccagatgtgtatgtagctgctacaccaaggacagacaaacagaacatgtgaccctcacctgagctatacccaatggtgtctgctggaatcagatgcttaaaaaaaaaaaaagacagcaacgaaacagccacatggatttcatccagaatgacaaacttcaggatttagagatagataaggagataaggtattgttgaatcggagaccaaagtcatcaacgtccaaggcactcctgaagcagagagtaaggggtcggcctcaggtgcctggcaagaatggctgttccacccaggcggtctttagacctagcactgttggtgctgagtgctttcctctccacatatgtagataatcaccaagtgattaactgtccaagtcctgaagcattggagttggaaggcaccccagagatggtgagactgaaaccagtattcattgagcgtttaatatgtgctaacacaagatatatacttatatatacatgtatataaaaatgtttatatacatatatgtgcacatacttatacttacacttagctagagtcatcctatatttataataattccaccaagagtgttaggaacctggtcaatgctggcatgtgcctgtaaggagagtactagggatctggaggcaggaggactaggaatccaaagcctgcctgagctatgcggtgggaccacatcgcagcaaaacaaaataaacaaacaccagtttgctggcatctatctgtgattccaatactctgagggtggaggcaggtgaatcaggagttcatggccagccttggctacttaagattttaagaccagcctgagctctatgaaaccctgttttaagtcctcttcaaaaaacatttttcaacaatgaattccaggaatatactcaaagcacataccaagggtaactggaaaccagagagtgtactttcctgccacttgctcttcagagggttgagggaccatcagaaagggcatccatcctttggacattccagccagaatccataggtgtcctctaatgtcagtggaaataacaaactgtgttatatgtgacagagcctagaccctgaaatataaatgagatagctagagtccaggcaaacttaattcacacagtaagtttgaggccagcctggggtctctatgacagtctcaaaaaaccatatcttcgggctgaagagatggctcagcggttaagagtactgactgctcttccagaggtcctgagttcaatacccagcaaccacatggtggctcacaaccatctgtaatggggtccaatgctgtcttccggtgtaactgaagacagttatagtgtactcatataaataaaataaataaattggaaaaaaatttaggagggaggttaacacctttgtgtagaatagctcattgattctaaaattaagaaactaaggccaggacccaatggactagccaagctttgagcttaggtcttttgatgctgtaatcaccctcctagcccaatgtatcgttttagactcacattgctacagtagccaggaaagaggaaaaaactgaaagaggatgtatctaaatgtcaatatatggtgagtgtagatggtagtcctctggcctatagaagtgtatgtgtgtgtgtgtgtgtgagtgtgtgtgtgtgtgtgtgtgtgtgatttgatttatcatcagtgtgcctgtgtgcacgggtgagtgaggtccatgggaggttgttcagtcccctctcgtttactttccaccttcttctttggagacagaaactgaagcttgggatctaactaggctgtcagtcggcaagtcccagtggtccccctgtctctggcccacacagtactggggttaaccagcacaaccctggtcttcatgcttgtccatcaaacactcacaactactgagccatcttcctagcctcctgacttgttgttgatatatacacacacatgcatatacatatatacatacacacatatataatataatgtgtgtatatgcttatgtacacatgtgcacacatgtgtgagtcacggtgtgcatttagagttaacatgtggtggtttttatcttctattttgagacaggatttgtttgctgaccctcaagcttctgggaactcttttgtcctgccccatatgactgtaggagttctggggttctagagagtgtttctgtgtccagctttacccaggttatcaggatttgaactcaggttctaacttttgtgtgtgtggcaaacccttcatccactgaactatctccccagcctgtattatatttttggtggggtgggagaaaaggaaggaaattatgtaagagaaactgggtggcctgcaaatccctaaaatagttaccatttgcctcttagcagagaaagcatttgctatgacttggactacattgttacccttatttgctattgtggttgttcaaattttgacacaatgtttcattatgtagagcttgaaactcattatgtagccctggttagcctcaaacttgtcacattaccacactaaactaatactgaccactttccaggacaggtctatattgggggtgggggggggggcacaaggacaacgaggctagcacacagttaaagctctgtgttctctgtgcgttagacaatactgacagcagacaaaggcaagcagcctggctggtgagaacaggaccacggggacctgccacctctgtatgtgaagactgggaagcaggctgggtctgcaaagtgaggccagaggctgtccttgtgctcttggcttgagaatttgatgagtcacagtttctggcagccccaagaatcgaatctgaaggcacattgaaggtgaaagatgagaaatagcccgtggttgtagcaagccaccgtctgtcccaagcctttcgacactggaaggtctggattgagcgaacagataggggcctctctgaggaggcaaggcacagggccgtcctgagctagggtctgcactcagggagcagcactgccagtctggcccagacggcttctcttaatgacttggacttttcttctctctggtgccttgagtcccctctggtaccagtaagccagatgtccagagcccttggctgtccccaaactgctttgtccctaaacctgctctctcctgtggtaccaagtgtccccatttaaaacgttcttcttcattaagactccagtttgggcctctgctcaccatcacctttttttctctcatctttgccgcatccactaaagttctgtgtacacaactactgttagcgtaatctgacctgccgtacctctgataaaactccacagtcaggataagccaaagaggggggtggggggagagggagagagagagggggagagagggagagagagagagaagaaacagaaaaagacaggaagggagagagggaagaaaacacaggcaggaggatagaaggaggaaggaaagacaggtgcaatggaagggccagacagtgctcagtacttaagagcctgttgctcttgtagaggacccgggttcgggtcccagcacccacatggtaggtagctcacaaccacttcagttctagaagatctgacatctttttctgacctcgttaggtaccatacctacatgtaggcaaaatgctcctatgcataaaacaagcctgagagaaagaaaaagagaaagaaaaggaaaaagaaaaagaaaaagaaaaaaaaaagaaagttgacttgcctttgctaaaggaaatctttcccaagtgaaagagggggtgtctttccctggttgctgttttctgtattatagtgattggtaatgggaggtagccctctcttcttggctgttggtcaatctattttttttggattttgctgatcatgtaacagtagcgtgtatatctttctcctcttactggatcattaaaaaacaaaacaaacaaacaaaaaaccaaaccttcccctaatttgtttgctatggagtccaagattattaagtatacccaggggacggggccatgctgatgtggaaacaggactttggtttataacaatgctcctgcttgctttggtttgcctgtaccaatttggaaaaattcccaactcacccccacggctgatactaggctcagcttaggctcgtagtggttccccatcaaggaagccgcagcatcttacagctttcctacatgggactccccagcttagagcaagacatcacacagagggaagcagtggttagaaagtctgctcggagtgtgagtgtttgtggaagctttgggtagctagttacacatacagacacagacacacacacacacacacacacacacacacacacacacacacttacacttgggttttactgctgctcatagcagaaagcacagctgtgagacagcaggtgagtgatagaggttgattcactgaaatttaagacaccaactatttgggggaacctgcatcatccaacagaccggagaagcctaatcgctacaagctgagatttggacatctgactgagtagtaggctccaagtcttccttcaccagtcggcagcttcactcagcttctttggggtttcattttctcatttggatgaggaactcagagttgtaattggactcaccacagaggaatctggggactggcattggtctagaatgtactgctaggtatcatgagtcatttctgtaatcccagtgcccaggaggctaaggcagggagttccaggctagtctggtctacagagtgaagctgtgccccctcccaaaacccaacccaacccaaaataaataataagtaaataagaaggaagtatagcaaatggtcagccctgagactctgtgcatgtgaacctgtgtgtgtgtgtgtgttatatataaagttttttttttgaaaagaggacataaatttgtcagttggggctggggagtgttgcacaggagggtttggagggagaaaggggggagaaatgatataattaatcttaaaaataaaaatattgtcgggcggtggtggtgcatcgggcaccagcacttgggaggcagagacaggtagatttctgagttcgaggccagcctggtctacagagtgagttccaggacagccaggactatacagagaaaccctgtctcaaaaaaaaaaaaatatatatatatatattatataaaaaaggaataaaagcagaaattcacatctctaatcccagcacttggaaggtggaggcaggaggatcagtacatcagggtcatccttggctaagtagcaagttctagaccattctggactacaagaaaccctgcctgaggggaaaaaaggtattagtgtttagcacagctgtgagaagcatagtttaagttggcatttctcagtgtttttgtcttgcacatgttaaaagcagataaagtgtaataggatgcccagttccttaggaagctcatgaagttaaaaattttttagggggctggagagatggttcagtggttaagagcactgactgctcttccagaggtcctgagttcaattcccatggtggctcatgaacatctgtaatgggatctgatgccctcttctggtgtgtctgaagatagcaacagtgtactcatacataaaatactttttaaaaacagttgtttaaaaaaatggttttttagtattattatgtcccaaatattgcacagaatatatactaagattatttttttatttgctaaatctgttaataccatgttctttaaaactgtgagaactgaacatgcttttatttttgtgtttgagatggtgtcttgctgtatagctcagacttttcagaagtctgtgaagattttgttccgttttttgctgttatgactcagcactaggcagatagatactcagcctccgagctgcagctcgagccctcatgtaacatggtttagttttccgttttctttttagaagacttatttttatttacgtgtttctttgtctttggactgattgcatactttcccgtgttagtgcgggtgcctgtagaggctagaagaggaccttagattccctggagctggagttacagggtctcgggaaccaaactttggtcctggaagagcggagtgtgctcttaaacccgaaccatctctacagctcctccttttaacttgagagaggaaatcactctctttgagttgctggctttgaggtcaactgtagctcaggttggccctaaatttgtcattttctgactctcctgagtagttggaattgtagatcttgcttaggagcatctgttgtgaggtgtgtgagtgtgtgtgtgtgtgtgtctgtctgtctgtctatatatgtctctctgtatatgtctctctgtatatgagggtgtctgtctctctgtgtatgtgtccagggatgtatgtgggtgtctgtgtgcgtgtgtgtctgtgtgtagtatgtgtgagtttgtaaatgtatatacatgtgggggtcagaggttgatcttgggggatgtttttcatcaatcactttgtaccttatcctgggtctctcactactcattctgggactcaataagtctgctctactggctatccagggaggttctggctctaactgcccatcccccagcactggggtggcacaggccatgcttggcttgtgcatagggtctggggatccaaattcagatccttgtgcttgcattttagccacacacacacacacacacacacacacacacacaccaccctgtgtccccaagccttcttatttgaaactaaattcaaattctataaggagcagttttgtttgtgtgtgtgtgtctgtctgtctgtctgtctgtctgtctctctctctctctctctctctgtgtgtgtgtgtgtgtgtgtgtgtgtgtgtgtgtatttgttcccaggactcaaatccagagacccttcctattctggacaagtgccctaccgttgacctacattcccagcctgaaagggatggtttcctaaagcttagttaaattacggaatttctaaacacatcaatgaaaattttatgcttggttccattgaagttcttggactaggtcgaactctcctaggacgatgctaagtcatcacggtcatttggagaatattggttcacttatttgtaaaacattggcatatgttttgttatacagtacgcattgaaatatgttactatcacaactgatattcctaaagcagtctttaattattggcaagctgtcaagtccgtgttagcagatgcaagttccctacaattttaactttactctgacagctagcattggaaacagctgtggcctttgaagtgacaggagtacttctttcatttgctagaaagcatctgccagaagcccaaagctgaggagctgttgtcgattctctcttgtacaaacggctttctaggagggaagtggcaagtccctggtgcagctctgtcacacaagtgattccccctgagacagctgtgacaactaggtacccaaaacagcgtgagctcctggggttcctggaacctcactttgagaactgtgggtctagtgacttatgttccagtagaagccagctccagatggtgtagattcatattgtgtccgttctcccatcgtagcttcccatttcctggataatttgggaaaacaccaaaagctactgggacttccttagggtgtaggctgaggccagcatgggtgataggcagtttccaaagttgagtgcgccagacctcttgaagtcctcttttgagatttaaaggagtgggaatgaccttccacattatgtcccaccctcctctcctttcttctctgtgccctcaaatttcagagctcaaacctactttcaaaaatctgagagtcttatacaggccatatatacacaagggttacatatattcagcgcagaactaggccaccaaagtgcacaggtgtcttagaagtgagcagcgatctctcaatatccaatattctgcccttcagaattctgtagttgaaatttccagggagagctcttcagaaacagaggaacaagggcctctaaggccagccgggtctaagtatcgaggccatgtcttaaaaaaaaaaaaaaaaactaaacaaaaatcaaaaccaaaaccaaccaaggcccccaatgtactagtataccaagaaccacggagcataaccttgacctggaattattagaaatggaggtggggtttgttatgggaagatgggaagctagggatacagagtgggaccctgcatcaacaaatcaaagagccaaccaaagaaaacatgtactgtccagaaatcaatgaccttcctcagggacaggtcaatctgtgaccagcatgagacagcatatttaaatcgtagcatgccaagtactaggtagaatccagatttctctgcagagagcgtccagagcttcaatatcaagtttgtaagcacagtgaggggaggggaataggaatgggggaatctgtattatttggttggcccccatggtagtttttcaataggttttgggtagtacaaatgatcttccagtgaataaaaagtgtcgtggggggggggggggaagaagagaggaatgaagaacggaatgggttctgatagtagaggaggtggagctccgtctaagcactaggcatgccacgagggagaaaggctacagtgtacataggatgcaagtggactcagggatcaagtgctcagacggagacatgattctccgcactgccaacaatacagtggtgtgccccgtgttgcctccctgctgtcttcccataactgtagacaattaataaatgatgcttggagctggttgtgggggcaaagcccagcactcgagatgctgtcgcagcaagatggagaaggttacacagcaatgttatgtcttttttattttttattttttaaattatttattttgtgtatatgagtacactgtctctgtcttcagacgcaccagaagagggtgtcagatcccgttacaggtggttgtgagccaccatgtggttgctgggaattgaactcgggacctttggaagagcagtcagtactattaactgttgagccattgctccagcccccaatgttttgtttgtgtgtgtgtgtgtgtgtgtgtgtgtgtgtttaatggtatattaattagtattgcaggtttgtttgattgattagtttatgcacatgcctgtttgcgtgcatgtgtcccagcacatgtgtggagatgagaacatttgggagtctgctcttccctgtcactgtttgagtcatgaagactaaactcaggtcatgcttggcagcaagcgcctttaacctcctgagccatctctccaccataaggctgtgtcttaaaaaaataatttgtagaggttgggaaatggttccgtgcttaagaacacttgctttcgttcccatgggacctggattttatccctggaacccacatggccgctcttaagcatctgcgattccagttctagggcgtctggcgccctctctggtcatcccaggcactgcacgtgcaagtgcctgtgacacatgggaggaaatcacccataagatgaagcttggttttggttttggtttctttgacacagagtcacagtatgtgtctcagtctggtttagctcccagcactcctcctggctcagctttccaagtgctgggattacagacataaaccactttccctaactttgggtatttgtattgttttggtttttgagacaagtctctaaagcccaggctagacccaaccttggcaaggatcctcctagtcaggctcctgaacctggcttgatgcttggttttgatggttattatttcatttgctatcatctcttcacagtttacttttgacattaatatgtttctaagatcataaatgaaattaaacgacatcctcgtcaagtgtggccttttgtatactaggatttaatcaaccgagcgttcctttctttgcggttagccattttcacatttttactcctcaaaattcgattgtaacagtacagtcaccaggcgagggcggctgaggcaggagtattactgagaacttgagttaatctgggctgtccatacaattgagtgcatataattagaccagtgtgggttagagcctaagaccctattaaaaaagaaacacgacaaacaccaccagaagttcaagtatattcccacacagtcagacctggggctggctccattctaggggtgcaatggtagatgttcggctagaatccatgaacaccaaagtggaaaggggtaccctagaggaatatgtagaaaagacccctggaaaggggaaaacacccccacgttgtggggtttgaccttttttgcacatttgatctcactggggtgcctgaagagtgaatgtccaggagaagggtcatacaagaccagtgaaaatgggagactgaggctggcagcccagcctgaggaatagagagcggagaagattgaccaggaggggaaaaagacgagggaggagcaacagagcaggaggctgcggtgcagagatcgccaagttcaaggcctgcctgggctgaagaatccatgttaggatagtgaggtagggaaggaggacagagggaccgcccggagaggccgggctggagtggttgtgcaggtctggttagctaattgtgttagagggcagtgtgcaaagactgttgtgtaagctaggggagactgccccggctggccggccctgtcgccacgcctctgagcagtcagataaagggtcatttgtgaaacccacccagaactgattagtcattccaaccccagagaagggaaacttattgctgaaacgatgtctctgtaactggacgacatggaaaactaaggggtccatactcataagatgtgaggagacagccattacagcatttcagctcctgatttgaagatctaaagaagtccttgattagagaactgcccccatcgagatatcctccctggctcgaggtggttgtttttgtttgcttgatatacatctggaaacaatctccataacgtggagatagtagcccaaggtcacacagacagtatagaaaagccaggctcccgatcctccaattctccacacttctacttaaaagtacaaagtgcagaattctgagtactctcctggacggaggtgggggtgggggacaaaaacggaggtggggggtgtttttatttgcctaaccttgtctgccaaagcaaacttgcttctctggacaggtttgctcttcttttaggctcgtagttagcaaaatagtcgtccttccccgtcctactcagagcgccacaagcaggtacgtgcctgttgtctctacatgggcttgggacagaggttctctggttcaggccgcctaaggacctctcggttcctcctctgtttggttaaccctgcttctaagaagcacctgacacgctgtgggtgctgattccctcggtgccagcgagtttctgttgtccttcggttataattgttaacctgaatggaatgccaaacttctggttcacaacaagttgctgtttaactgtggctaacttgggggctatggaaaaaatggggagtgtgtcctgttagctcggaagctaccctcttccaagcacggtcttcacaatgactagaaataagtgccccgtaaagacgtgggtgctactgtgtctgcaggtgtgcaggggaattttacccttcacctccctttattaactcttaatttagacaccttttcagtctccgacaagtcaagacttgcttggggattagaacaaggtgatcgtaaggccacctttaaaacaaaacaaaacaaaaaaccctctaaggcctctagtgttaagttctgcttccagcagctttgcccactcactcccaacttcagatttgggtttgtttccctttcttaaagggaagtatggaaactcgcttgttcagtgacattattgtacatcgcaggatcgagtttgctaccattatactgtgttctctcaatggtgtttgctctgagggtgggtcgaaaggctgttcagtgtctcgtaaaacatttaccaaaagcactgagccatggttttgaagggcattccgctgccagagcgtgggaggcgaggacggcagggcagagtgagcaccaggtgtttggcaggtactggtttcatactttggtatttattaatttttaaaaactgtggattgcataggccttgggccccccttctcctataggggtggggatggtgaccggggaaatatgtggggtgagccggcagaaaggatttcttggtaaatcttagtttcccagtcctgcagacttgtaagcctccgctgttttcggttgtactagagagcttgagcctgtcatggatagaggcgtgagaggtggcccgaccctttgctgtgtgtatggactttagcaaggagccaggcctgcggattctgtgaggccaaccaagtgtcaccttgtgccttgtacctggtgactcattcaattgaaagtttttgctaaaaggtggctctgatttcttgaaaatttttctccttcccgcccccatccctcttgctttaagtttagacaagataagtccaaattaaaaggtcatcgtgaaagcaggtttttaatctttagatctagacttttaggcacagcaattttagagtctctttgtgttgctggcaatgaccttgggagatttctgggttagcatgcttcgggagcactgagtctttatttgcctccccccaccccttggtagaaaatttgagctcatgtgatcaagaaggaacctgtatttatttttgatcagttgtcatggtgattatgctggtcagagataatatagttatggctaaaatccaaactggaaatcagaaatcccaaaaaaaaaaaaaaaaaaaaaagtacaagtccagaaagtgggtgccaatgacaatgatgtcacagtacaatggataaagtactgcaagcttatggagtctggcccttttgtgatggtagacagaagcgtgaggttggtattaatggttgagaatgccattggtcctgccaggtgggatctgcgtcagtttctgcgtctttgaacatttctagtcactgtaaaggggctagcagagatgactgcttcatagttggaggaaacttcctccctactgaagcttccgggttggcttctgtgtctgggcggatatgactccatctaacaactgtggagtggtagatctagtctcagggtagtatggcctattgatagcttatctttgtgggctagtaaatgaagctgaatagccagtcttttaaactgctttgaccactgagaagttatgtcattttcaaaaagtgacttgactgtttcttattccccttaggatttcaaaactagctgggcatggtggtgcatgcctttactgccttcatgggccgtcccccaagttcaaggccagtctggtctatacagagcaagttccaggacaaccgaggctatacagagaaaccctgttttttcaaaacattggcctgtcacaaaggtgcacaggattgcacaacacgtgcagttagaccatctgaagttccctctaagtccaaaatagagaccttgggtcagaggaggactctgtgtactcacaccagactctctgaaggaggtagttaatattcgtcaaatctgaaatgtgatgggggagcagaaaggctctgggaaaggggtcttctgttcctagagactttgagctcttgtctcatggagaagtggcttcctttcaatttttctagatctcagtcccccagatagatgtgtgggtataagatcaccagaggttattttacaccccattaggggtgtttactgttttaccacagtttgttgattgacaaattttgcttttattaaatggggtgagagtgcttttatgtcaagttggctatgaggagctgctctctctacaaaagattggtagtgtttggatttttcttttgtttgttttgttcttttgagacagtctctgtagctgaggctgaccttgaactcctacctcagcctctggtctatacagagcaagttccaggacaattgtaggtatgtgcctccaagcggggcttctacctttcttttataagtgttatctcgctgtatatatctatggctcgcttggagtttactgtatagattagactggccccgaactcacggagacccacctgcctctgcctctgaaatgatgggattaaaggtgtgtgataccacacccatcagtttgtttgttttgaacgagctccagttggcctagaaatggctgggcagcctaggctcacttccaactccattgaccctccctcctaagcttcccaagtactgggattgtaggaatgagtaaccaaccaccttttgattgtatttagtcccaccccatgagatggaacccacaccacacactggaaaagtagttaagaacctgagactagataggtcaaggtcactagggggaagcctacagttattctgctaagggaacatagcacccagtggtgtgttgctatatctgtagatcagaacatcattaaaccctcaccacttaatattgtctgttatcgttcactaacatttctgggttgtcagacctatccatccctccacttatccatccatctatctatccatctgtccatccacccatcctttaactgtttattaaaagctcattctgggatgtgttctcatctctcagttctttttatggcattgttttgagggagggtctcactgtgtgcacaggctggctttgaacctgtggcagtcttcctcagtccccaattcagggactccaggtgtttgccctttgcctggttccatttttcagttcttcaacattacttcttgtgcttcctcctcccagtcctgcgttaacaattatctgtcatcatagtccagctttggctggcatggatcttaataaatacggagtcttgcagtctatacacttctggtgttactctcttggcgcttatatctgtgatatttgcccaggctctaatttattagctcctttgctgcctagttttgctttgtaggaatagaccacattttaaaaaaaaaaattatttcaggagttaaaactatgagcgtgagcttaaaaaaagtcatgcctccgtgtgtcagctcttcacaaagttgggtgacctcacaaagggtgggatagaaatgttatcacctgagagggcagagggaggaccactttgagggagtgtgtttgctaagcactctgcgtgagccatttatttaacggaagcagttgtctcaggagcaactgcagctgtcttgtatgaggagcccggcccgagaagctttgccaggttacagtggagcctgactcaaggtgaaaagcatttaccacactagggagcaatcttgttctagagaaggctgttggggctctgccaccgcgatttcctaagagtctctccctcactcgtttcagtgctaacagttgaatcagggcttccttcgtgcttggcaagggacggcttctgagctgtacaccccagccccagtcagccttacagagtaccgggaagaggcgatcctctgttagaaagccagccattggcttgagctttctctcttttgtaattcatctgttttgaagataagactttctgggctctaacttgtttgttttacttatgatttttttctttgagatttttttttttttactgtattcatttatttcggggggggggggggcagacacatgccccagcacctgtgtgtgtaaagctcagagggcaatttgaataggttcacttcttcctccacaggggtccaaggacttgatctcagggttgactgagtcatgtcaccagcccttgctcgaaactgattcttcctcactaactacagagattctcagccccgtattcagcagccttcaagttttttcctaagttcaagctttgctatgcttggataaagaataactgtcatcgtaagagagctaagtgaattaaggctgagttactgatttcctgggagtcaaaggtccctgttttaaatagaaccagaggaagtccttacaacggggctcaggctcaaggggacaccttgggaagaggagttcagggaaaggaacgttctggggaaaaaagctgcacgtcttgtccagaaggtcccttctcggaataataaaagacagcgtgtgtcttcacagtacttcctcctagctgtgaatgagagggactctgttctaaacttggccttggtgtgtgacggagctgtgtgtgtgagatcttgtcagtgaggcccgatggctgcatggtccactctctccccaggggcatccgtgaaactaccctgagagtgtctcaactgaatatctcacatcgcttctagaaagagcaagggttcctgctttctgtgcagtcagagttcgttttcctcactactggtagagagcctttcataggacactactttaaaaaaaaaaatcaccagctggccttgaatatctttaactttatggacaaccacagcggcaacatcttgtaattgtacagttaaaaagaaaagaaaaaagaaaagaacccacccccacccccccactttcttggcctggagagattggtcagtggttcttttcccgagtttagttggtaccctttcatgggtgctcaccacaacctgtagtgccagctccagggcatcctcttctggcctccgtaggcaccttgacactggtgcaacccccacacccccaacacacctgtaaacacaatttataattcaacacatcttttaaaaaactcctttctcaaataaactccatgtctaccattagctttagtcttgcgatgttaaatgagaacgttgaaataaacgatatgaccacctatctggctaggagaagagctgacgtgtggactttccgcctccgtggacccagctcttctctctctggccccactcctgccacccgcacagtgtgtggtgacctgtgtcagcattacctttggtctacgggggcctctcagaacacagacttcatggtgtgccttccatgtgtgagacactgcaccaagtgcgttaggggttcacccctagcccccacacaactctgctagctcggaatccttcacccttctcactgaagggaaccaaggctcggagcagtcggatgatctgcataaagccatatatttgccatgttcaccctgtcagctgcctgccacaggtctgaagaaagccctgcctttcccctatcttcatcacagtggagctcaatgcaaggggccttaaacaatttcttttcctcctaagtcttgacttttatccacaccatgccccctgatggatagatgttgtctttgtaactagacatagatgtgggttagattcgatttttaacttagcctttaactttcagagccgaaggaaaaccagggttaggggctaggaggtcagtgggcctgcttggtaggcttggcagggacctctttgcggggaaccctggaatagaggtggcttccttgggcagaaaattggtcagatgactctcaagcacacagagatgtgtgtgtgtgtgtgtgtgtgtgtgtgtgtacacgatcgctcacgcatgtgcctgtgtggagaaggtatggcaacaggcatttatggaggcagaagcaggaagctgcctgctcgtgttcctcatacaggaagcagagtaaaaggacaggaagtggggcccggctataaaacctcaaagccaggctgaagagtacttaagagcacatgctgttcttgcaggggactttgcaccatacagcagttaagtgtgtacagccccagttccgggggatccggcaccctttccattctctacagacactaggtgctctcatggtatgcctacatatccaggcaaaacactcatataaacagatcagagggacaatctagggggcaacctcaaagctcaccccacagtgacacacttcctctttaaagtttcacagtcttcttgagacagggctgccaactaggaagtgagtgttccaacacaggaacctaccggcgcgtttttaattcaaaccaccatacagggcttctgggtctttgctgaaaatgctaggctttgtagagctatgagccccgggaatcctcctgtctctacttctccagcagaaggattacaaatctactccaccttgaacatgggtgctggaggtgaacacttaagctcacggaagttcagcagcattttacaaacctgtcatgccttgttttgttttaaagatttatttattcataggcatgattgttttgcctgcatgaatttctgtgcactacgtttatgcttggtacccaaggaggccagagagaggccatcagagtctctggaactgaagtgacagatggttgtgaactgcagtagagatgatgaacacagactctgtaagagcccttagagccagcggccaacgcacttattgttgagccatctctccggccccttgttttgttattctgagacaagcttttgctacatatctctggctgcctatgtaattgaggctgaccttgaacttgtgacaatcccacctctttctgcctctgaaagctggcattgcaggtgtacactaccacacctgattgccaagaagagttcttttgctctcagtattcttggcaaaggaaactgcggaggtgcatccagattgttactgacgtggctctgtgggccgttgttctcctgcctgggagaacaagagaagtgaaatcaaggggtacccaaatcaaggggtgcccagaatgctttccaagctttcaggcaaccagacagataccttggatgtccatagggtctaacagccatcaccccaaggatggcctcctgcgtccctactctggatttcatattgaaagagctaattagcagctgggccctttccctgctagcacagtggcctgtgtgtttgccgctaggtatgccaaccccaggtgggttttgagcatcattgctgaggcactgtttggtgtgtcagagcgcactggcctatttctgctggccttcctttccagcaggattcctaaacggaactttgtaccacaaatgaacctggactcctacctgctgaggagttcaagagactgaaccgtgtcccgtgcagcttcccctcatttaaggattgtgaaaccccaatgggtttaaatcgatcattgtttaaacgactgtcctctctgtgtccgctcgctgcgtatgcaaactctggaagaaaccaaacaaagatctcattctgcttctcctccagcaatgactttttactgtaagaacataggaaacacctgcttgctcatggtttcgttgtttaatacagaatctccctcgctctgtaactcaagaactaacttatagatatagcccaggatggctccaaactcacaatccttagcctccccagtgttagggttatggagttgtttatctttcattatttgttaagaaaattagagcagcttgactacattttctgctgctatttgatacgttactctaagaaagcaataaatagcccctcacgaagacagcaggcccaaggatgtcctcttgggactagcatcccacttcttgagtggtaaggactgtttgtgctgcataagaatctgaatgtagaaacgggcagggagtggatgctgttgaaggaacacatacctgggtgagggacccgattcacctggacttccgtgtgatttagagaaccctctattccattcttgcctgctctctgagctggtgtgctggctacacttctcaggagcactcttgtttgtgccgtaggaaaaaataaagagatttgtcttgttttaagtaggaaacagatttggaaagtgtatttttattagagaaattagatatttggagatgctggcttatgaatggtagtgggacatatttttctcaccctcttccctttagacggggtctcactatctatgtagcccaggcttacctctcaactcacagatccacctgcttctgcctcctgagtgttggaaataaaggtgtgtgtcaccacacccagaagtgcagtatcgtttaaaaatagagttttagccaggctttggcttcatgcctctaatcctagcgcttgggatacagaagtggttactataagatcaaggctagcttgggctaaaaagtgagactctgcctcaagaaaacagacaagagagaaagacaggggaaagggaggaaattttatttcattttttaaaaaagatttatttattattacacataagttcactatagctgacttcaggcgtaccagaagagggtggccagatctcattatgggtggttgtgagccaccatgtggttgctgggatttgaactcaggaccttcggaagagcagtcagtgctcttacccgctgagtcatctcaccagcccttattttattcttaaatacaaaaacagaaatcatttttagagaactgttttcattttcacagttttcatttagaaataagcactcattgctcgttcctaatcagagtctttggtaaagaatttactgttgacaattcaaaaaacgatctatttttgaatcagtcatataaaaattgtgatcagtgggtttagagagataaagaacactgattgctcttaacaaaggacccaggttcgattcccaccacctacatggtggctcacaagtctttgtttcaggggatctaatgatattctgccatctgtggataataggcacacaaatgatattcataggcacccacacagacacagaaaataaaaataaatcaatctttaagaagattaaggatttgagtgaaatgtgtaccagttaaatgaatctcaatattttgggtgggggaagattttcaaaacaactcatttagtaatctaatcctattaatttgttatgggtttgatttgtttgtttctgtcagttttgttttattttgagacaagatctcaccatggagtcctgggtggtctagactctctttgtagatcaggctaacctccaacccagagaaacctgcccacctcttctgcccaagcactggcttgtaccaccacgccccgcccaatttgacttcccacccagtttgatttctgccaagaccttatcgcaaaattggagggagcgaagcagaggagggagtgttaacagtcttaattcgctaaggaaaacatgtgggttacaactgaagggaggaacttgccacaagtaacctatttcccaccgcagatgagttcagtttgtttggttttttttctctatgtcttgccaccttgcacatgtggactctgtatggacagtggacgtgaggcagtgagtgtcgaaaccttaaaaatgggggctggagggagagatggcttcaacagctaagaacaaagaatcctggtttaatcccagcacccatatggcagatgaaaaccaggttagaggtatcttgacacccacttttgacctctgtggacaccaggcaggaaagtggtgcacacagataaaaataaaacaaaaaaatatgaaattaagtgagaaaagactgccagtgctcgacccgagaatttattatggggtgtgttctttttttttttttttacgatttatttatttattatatgtaagtacactgtagctgtcttcagacactccagaagagggagtcagatctcgttacggatggttgtgagccaccatgtggttgctgggatttgaactcgggacctttggaagagcagtcaggtgcttttacccactgagccatctcgccagcccctggggggtatgttctaaggacaatgtgaaatcaaagaccatctttagagaatctgaacacctgaattcctatccatcacaagatggatcacaggtgtgcagttttcaaagttccctggttccacctctttctagagtttctagatgtccaagctcctttgtaaaatcaagaaacttaactttcaatctgcttgagatcaaggaacttgtctcccaacaactcccagatgagtgtgtgtgtgtgtgtgtgtgtgtgtgtgtgtgtgtgtgtgtgtgtgtgtgtgtgtgtaagagagagagagagagagaacatttcattttgtcttttgagttctatggctaacacaatttccagtatattcacatacgtatacatacatacatacatacatacatacatacatacatacatacatattatttaagtaaaatttccagcattattaaaatactcctgcttgcaaacctataagacagtcagtaagcaccaagctaaaggataggggagatttgtgactctaggtgtaattttattatcattattattgtagcattgatttattttatttgcatggatgttttgcctgcctgtatgtctggaccacatgcatgtctgtacccttggaagtcagaagagggtatcaggacccctagaacaaattatagatggttgtgaactgtcaggtgggtgccagaaatagaacttgggtcctctggaaggacagctcctactcttaactgctgagtcatctctcccacccagggggaagacttttgaccacctagttgtagctcactggtgggaatattcaaatccccgaattctctttagctcttctaggctgatactattattcactactgccctgggctctcccttcctgccaaggcagaccggtaagtcactgctcacctagtaaggtcagtgaccttaggtctgtgaccacctttggggaaagactcccccaacctagaaagagccacgttactgtattatttttgctctttcctccctggtttctagttatttatagttcatatttcaacaattgatgagagaagaagagggaaattctagatattagtcactggctccaaatctatgatcaaatgtgtgtccgaatccaacccttgtcaaggtctgcacgatcagaggttcttactcaggtgcagccattggcttctctctactctctccaccagccagccacttggagaagcacggccttagctgagtcaaacatttcttagcaacgcagggggcggggttgggggtggggttccgttcacttcctccttgtgcttggcttcccctcaattcagagcgggcttgattcgtccagtgaagttctgtactcctttctctggacaaagcagcaaggacatatcagatttgccgtgggaaatgtgtcgacgtggttagggtacaacaggtggcgtgcccaacatagcgagttcacccctgtaacccaatatgcgaggcagacgacgtagcctcccacggtatcggaacacctgtaaaatgcgcgcgaccttggtgtaaacggggtgtggtgagctgaccgtgcagcatcggggcttttccttcaaccctttacgtgctgaagattgtacagatgaaaattaagttgagggaagcagggggtcaaggtggagagaagggggacacctactctcgaaacctaagtcaccccccggtgtgcatgtgtgtagcaggtggtggcgattctgtggctgagtaatgagaaaatctgaaagtgcacgatgtccctggagaggaagagctaaatgactgaaaaaaaaaaaaaaaaaaaaaaggggtcactgcagccgctgagcctcatgattcttatgtgactgttgagtcttttaaaagattaaaaaaaactctttttaaaaaagactttatatttaattacacgcatgtgtgtgtttgagcctgtgcgtgtaggtgccctgagtggcccaaagaaagaggtcgtcagattcctggagctggagttacagacagctgtgagctgcggtgagcagcttgctggctaagaatcatcaaaaggaggctctggcttgctggcagtctcagcatcctcatcgattttagggaactcgtatcctgggatatgatgaacagtgttcacttttggtttttgtgaacccattgtatattaccagactaagcaaaactagcttagcagagatttgaaggtaccttctagaattccttttataaacaagtcaatacttacatgaatgaagccttatttttctttttaaaagaattttattacatttcgtgtgtgtgtgtgtgtgtgtgtgtgtgtgtgtgtgtgtagtctcaaactgtgagtccacataaatcttccctcccttaagtagcttcttgtcacatgtttttttttggtcacagcaaccagaaaaataaaccaacacaccaaccagggtcaataaggccggatgataacttgaagcttgctctcctgctgccttggtttgtgggtaagcagagtgcatcaggccaatgtttgtctgtttccagaacatgtgcatgcatgtttgcttgcttggtactgtacacgttgagagtgtttgtgacttccaggaatgggaagagggctggggacttggaggtggggaagatagcaggtgtaagctgccccctcaaggttcctctgtgcaggtgctgttgatctctggttatcatgcgccacctaggtccttgccctatcctgacagtgctggctccagggtcctgtgtatacagctaagcatcttctgaggggaggctctgtgtcttcactcgagtaaggttttgctctgaggacagagtatttgactaatctctcctgagaaactgtcatttcttattctcacctgggggggaaacccatttgtgaatatctctcttgaaatgagcagacgagtgctggagaaacctggtcaggaagcaagaaaccagtatcatctaagttacccacggattccctctgaacgcagaagaagaccttttagcagcggcaagcgtaatcccagcacgtgggtggcaaatttaggccagcctgagctacccgtgcccctgtctcaaaaacctaaccaaacaacaaacctccagcagtgaccaatctattgtgcctagcagtgtaattagtgaggacccatccttgtatagtctactcaattgtaagcttgtgctgagtatagttctgtatggctgtaacctcgaagcccataacggagggttagttattaggtgtcaaccaaaggcatcgtgtggacacattgaggcctctcatctcctcaggagagcctaggtttcctctgtgatgtcatggggtcttcatcctcactacttggtcacatcttcctgtctccaagcagttggtgagtgtatgtgtggttcaggggtatgccctcagtatccagctcgtatcagtaactctagaattgtttgggggcttgtgtgatctttgctggatagatctgacatcagaagtttgcccaaggtagctaagttgcaagggatggggttagggtttgaattcactgtctaccatactccaaagcctgttttctttctgaggcttagtcctaggcttgctgtgtgtaggtggtctcttgccaatatcagagagcatcgtcggtgtggagattagaagactgaggaatagctggaagggaaagatgaggcaggtggctgctgagtgaggctcagacaagaggctaattactacagcagtgccctcgcgctgggctcccacccccaccctcagcacgtgcacatgggcacagataccgtgaggggacagtcacacaggggctgctgagcggacatggaccagagaaacccttttgttgcacttctattcagtgtgagaatgacagggctgggacacttagccattcacccaggcctaaaaatagtgtcagaatggagaagtctctggtgttctacatggtaagcatttccttataaatgtttgagtgtgaaatgagatggggggaggaatatacaacctgagccttccagctcacagagccgaatgcggaagttttattaagaaaagaacagaaagggtgggtgggtgggtgggtgggaggaggaagtctggaggcagccctgaaaagcgccctccctttggagcatgggtggtcactggagcctgccattttttctccgacttgctcaagttgattttacaactttttaaagtgacagttttaccaggacgtggtgcacctatttaatgtgggctttcagggtgcttctgtaagtccccacggctgtgtaaccaccagggcatggtcgacaccttgaaaatgcccggtgtccattaccagccacttctgctttctcaccggtctacctgctggctcataaacatgtttcatagatgtatggatggttacaatgtggatttatatcatgatgccttctttcacttatttatgggggagggggatacctgctcagaggagaaggggagcaggggcaaggattgtgggaggggggtgagtggggcagtgaatgggatgtaaagtgaacaataataagtaacaaacaacaataataataatcaattacagacattattttttaaaactttattaaatttttttctaaagtacaatatattgatcatattctttcccctcccccatatcccctcagcttcttcccacctccctatctactcccaaaatatttatttttagttttctatttacctggaataatttgatcattgcacaggggcatgggggtaggagcatggcggccagagagggcgttgaatcaccggcagctggagttataagagatggagccactactggatgtgggtgctgggaactgacctgaaatcctcagggaaagcaacaactgctctgaaacaatgaacattgtttttgatctgggggaggggaggtggtaaatcttttacaattaaatgattggttgtaagattttactgatttttgtttgataagtttaaaaaacaatgaaacatctctgcagccctggaagagtattctcaagatccatgtgtgtcgggtggtggtggcacacacctttaatcccagcacttgggaggcagaggcaggagaatttctgagttcgaggccagcctggtctacagagtgagttccaggacccctgtctcgaaaaacagcaacaacaacaagaatatatatatatatatatatatatatatatatatatatatatatatatattcattccacgtgtattgtagcatgtatcaatactccattattttattgtaaagcagcgttctgttgtatgaatatatcccatttaatttgtttgtatacttttgaggggttccccctcccccgctttttggatattgtaatgctgctatgactttaagttttgtgagtgttggtgtgtgtgttcttacccttgtgtaagtggtcatgtatgtgtgtgcagaggccagaagtcagcattactatctgcccctcactctctgccttattttgagacattctctctttctggtggaacctggagtttcccatttctgttagacgggctggacagggaacgtcccaccccacagttggcctgcctagatctgtatgccttgtcaggctcctgcgaggggggcgtcgaggatccgaacttaggacatcatgctttcacaagcactgtattcaccgggctgtctacccaaaccctgttctcaaattttcatgaagtcatggctctctagctcgtggacatatatttatgatggagtttctgaaccatgtggtaaccgtcttttcagtatttgggtttttgtttttttggtttttttggttttttcgagacagggtttctctgtatagcccaggctatcctggaactcactttgtagaccaggctggcctcaaactcagaaatccacctgcctctgcctcccaagtgctgggattaaaggcatgcccaaccaccgcccggctcttttcagtatttgaaggagctgtcagcagcttgaatgactgcaccatcagacagttccagtggcagtatgggcaggttctgatttcttgtctcttttaacatatgttgttttgtctttttttaattaatttatttattccctttacatcctgaatatcagcccttgctctccttccagttccccctctgagaagagggaggcctcccatctctctctctctctctctctctctctctctctctcacacacacacacacacacacacacacacacacacacacacactcatgcatatcagccactgcaggactaggcgcttcctctctcactgaggcctgttttgtcttttgagggtagccattcccgtgactgtggagtgacttgcactgggatctcgccgtgcattttcctgatgaccgcatgtgctcaccagcttcatatgcttcctggccatggatgagtctttggagaaatgtctattcagtttcttcatctatttttaagtcgagtttttgttattaatttgtggtagctctttacatattctagatagaagctattagcagaaatgtgtcttgcaaatcttttctttcattttatggtctattatttggggatttgtttgtttttgttttatttcgttttgccttcaacacaactccagcccatagtttttctccgtatgtatttatggggaaggtactcatcacctcgtttgcttggaggtcagaggacagcttgcaggagatgtttctccccttcgaccgcttggctattgtaatttcttactgtagattgtttactaagtgtgtgcacatgcagtgggggctgtgcggtgtttgggctgcatcctacggtgtcgcacacagttttctccatgttgatcatgtcgtctcgctctagttcctgtgtggataacctgcatcacttttctttgcctacttgccttggttggaacctccagtacagcattggaaaaaaagaaatgcatttttttccttgtttccaatctgggggaggggaggtggtaaatcttttacagttagatggttggttgtaagattttattggattttgtttgataagttaaaagaaaaccaggtggaagaagtttcttctgctttatttgctgattattggaattatgaaagtttcttgatttttgtcatgtatttccacaatgattttagtaatagtgttgtgctgtctttgttaatagtgtgtgtttcactgttgattttcatgtagtaagccggtgggataagttatgcttggtcacggtacataatggttttgaaaattggtttgacttcgaatttttaaaaaattgtgtgtggcttctgggggaaaaatgcagtgtcttctaccattgccagcatcctttaaccactcaaccatctttccagtctttggtttgagacacagtggtctcaccaggcttatgccgaccttgaactcttgatatgcctgcttgtgtgagttacttttagttgtgatgataaaatatcacaaccaaaggcaactttattacaaaggaagtgtttattactgcttatggttatggagggaaagtccgtaaaggcaaaatggtgagggaggtatggctgcaggccgcaagagcaggactctggctggtcaaggtctgaggctgccagatgagggtgtcagttctggagctggagtcaaaagggcttgtggactgcttaatgcaggaactgaacttgagtcctgggggggggggggggcatcaagtggtcctacatgctgagccatctctctggctccagatttcctgttccttggttttggagtttatttccccctgagacgtggttattcctcttgggttaaccagcaggcacacactgttcatagcacttctttgtaacacttgtttctttgtgtcttttctttttgctacaggtttgccaaagttattttccttcaaaacaaaacaaaaaactaaagcctaacctttgaatcttgttaattttattgtttatactttttttttgtattttctagttgtttgaaaatttggcaggatggattttcattcctttatgccctaaagattcactatttactccctcccccactccctcccagatccactccttccttccctaccgattcattctgtgcctttgttttaatgggtattaaatctaatctgagcttcccctgtgttcatggtcacatggtcttcacctggagtttgatgttttgttttgagataaggtcttactaagtactcttggcaggcctggtactcgctgctttgcccagggtgtccttgaactctccaacagtgctcttggcggtcaagtgcctcagagcccagctcctttctggttttcaggcagatccacatgctgctcatgatcattgttacattgttacccgtccctctggcctctcctctccatacggttcctatgtgtgaatggcagatgctaactctgagaacctgcagacttcccttcacaggccgtgtgggagagctgagtacctgaaggcagcgcacagagagactggcccactggtctctcaccccctgtgatggagtccttgccgaccagtggttctagggccaaggcatagtttgtggggtcaagttgagtgggtgtgacttccctgccatgtacagctgtgagacactgtgcaacatatttaagtcctcagagcctcattttttttacacatgtggaataaggaagctactacgtcattgtgagggttatgtaaaactaacacacgcggtacactgatcacaaagttggcacaaggctaaatatttggttttgactagcatctcccttgtttactgtcactgtgatctgcatgacccttatgctcaggtggctccacgggtaactaccgagtctggagtcatgttccattggtttccacatctctgtcaccctccctgatgtccatttatctatcccctgactgagacactcttccagctgcagcctggcaggtggctaaggaccttggcagagatcttggcttattcagtcgctcatccatagcggaacgctaatggcacagagcaggaggcggattttcctaaacaaatctgaaacaagctaagggcaaggtccataaattatgtaaatggtacattttttaaaaaaatctaatttaagactggtgctcggagttccctttctgagatggatgctaatgcccttctgaacttgccaggcagatggcgtggaagccccgttgagtgacggtgtgtgctggagctatcttgagctttcagggaattgcttagaaatccagacaattttattctcaccctgcagccaaacaatggccgtaatattacagcaaggaaaaaaggtatctggattattccttattataaaaccttcggatagcctcctttaaaattaaaatgtgcctgggtttggtatgtgcacatgtaatcctgccactcagggagatatgacaggggattggtgagtttgcggccagcctgggggacatagaatatacccctgtctcaaaagcccaataatgagcaaaagaatttactcgtaacttaaaagccatcaggtccctgaatcctggttaaatgcataagatggattctggctttgagggtgggattaatgttttaaaagactaaactcagagtaaatacttaaaagtggatgctggggccttctgcaagggcagagcgttcactctttctgagctatctctgcagcctcctggatttcatctcccagtatcacataactctgccttctgctgtataaggtggcttctgtctcccctaggttcacattagatagctactactatataaacagtaagtatttgtgaggtaaataaatcttagaaatcttaatggttgaccagagcgagcagaggtcctaaaaatgcaattcccaattcccaacaaccacatgaaggcgcacaaccatctatctgtacagctacagtgtactcacatacataaaataaataaataaatgttttaaaaaatatcttagcaagcttagatgaatagtatattccatgagaagataaatgcatgtgacacattcacattaattttatgcttcaggttactgttagggtttggtgttttgggtttgtattattttgttgttgttgttgttgttgtttgttgttgttgttggttggttggttggttggttggtcttttcaagacaaggtttctctgtgtaacagccctggctgtcctggaactctgtagaccaggctagcctggaacttacagagatcttcctgcctctgcttcccaagtgctgagattaaaggtgtgtgccaccacccctaggctattgttgtttttgtttgtttgtttgtttttttttttgtttgtttttgaaacagggtctgacactttagcttaggctttgttgttccatataacccaagcctgcttcagacttggagcaatcctcttgccttccaagtgctgaggctctgggcagcaacactaggcttggcacatatcttaatttgtataactagtaacttctgcatacgctttcccaggcaagtctgaggacctggtggcactctggtcctcatgcctgctctcctcctctgctttttttcctcctgaccctttccacagcccattttccctacgagattctaaggttcataagggagaaactttggtgttttgggggacactattatagccctctcacctagaaccattcctgccagttagaataaatgaactctgtgaatggtagttgttattaattactattttactcttcaaagaaatgagtatctttgtttttttcccttttaaaatcagtcttaagtttggtgacttttcagttgagactttgcaggctttgttttggtctattttgagataagtctcgtgtagcccaggctggctttgaactcctgatcctcctgtcttcaccttccaagtacttagataccaggtgtatgctactgtgttcattaaatgttgtcagtttgacaaaagtagtgttacctggaaattcctcaatgtaggaattacctccatcagattggcctgagaacatgtctgtaaaaggcttttttttttttcttgattaactcttgtaagatatgcttttcttgctgtgaagagacatccgtgaccatggcaacttataaaagaaagcattgaattgggggcttgcttacagtttcagagggttatcagttcatgatcatcatggcaagggagtgtggcagcacgcaggccagcaagtatggtgctggagaaggagctgagagctcacacctgacccacaagcacaaggcagagaaggacactgactgggcttttgaaacctcataatccacctgaagtgaccactacctgccaaggccacacctaaactttcctaaacagttccactgtggactgagcattcttatatgaaatggcctatggggccccttctcatataaaccaccacaataatgtggaaggcccagcccacggtgctgtgtccttgttggcctggtggtcctgaattgtataagaaagcaggccaagaaagccggccatggaaagcatccctccatggtctgcctcagtttctgcttccagcttcttcttgagttcttgccctgacatggctccataatggactgtgacgtggatgtgtaagccaaataagccctttcctccctaagttaattttggtgtttatcacagcaacaaaaagcaagctaggacagctagtctgccgggtcagagtttcaatttttacataaatccacccagtgtgatgtgatggtttagaggaccacctttgaggtcaaagctccccccatggtcttgtctgtttggtgtgctgaagatctaaaccagtgttttgatcaaggtatgcaaacactatgccactgaactaactcctggctccatttttaaattttaagatgaaatatctccaactttatttatactttgctccgatatatactgtattttatgctgagtgctatgttggggtatttgacagtctaactggaggaaagaggtctgtgggaacttctgtatatcccgtgtcctttccagtggggtgtaattaggttcatggccagctgttgctaacactattaacccggctatgtggcttccgagccagtgtttggtgcaggctaatacttcaatgctgtgtgcgcatgcacacatgcataggaacagtttctttctctcatatcttagtcatgcactgatgcaaacggtagttacagcaaagcttttggaattcagaatagtaccgaatgagtagctgaggtggctcagaggataagagcacttgccacaagcctgatgacatgactcagatccctggagacctcatggtggaaggagagaactgactaatgcaagttgtcctctgatctccactcatttatgcctgccctccctccctcacccccctgcaaataattaaatattatcaaatgtatttctagaagcaatatattactattatatataaaagcaaatacatattggcatggtctttacattgtggttctattttaacttatagatgagttaaagtttataaataatactaccttagtaaggtttcatttggcctgatcagattttccctgtatttagaatatctatgggcgctggagagatggctcagcagttagagcaccgactgctcttccagaggtcctaagttcaattcccagcaaccacatggtggctcacaaccatctgtagatgacctgatgctctcttctggagtgtctgaagacagcaatggtgtgctcatacacattaaataaataaaatagtctatgaacccagctcagtagtagagtgcttgtctggcatgaaaaaggccccatgatcatgacagttcacactggcaactggacagtgtggttcacacccaaatcccagcacccatatcccagagagaggatcaggagttcaaggtcgtcttcaggtacaaagcctgaagctagctttggcgatatatatatatatatatatatatatatatatatattagacccaggctcaggaaaaccacaaagtgtaaaatccttgccacccaagcccactgacccaagttcaaccctccaggacccacacaaataccatcagagaatagactcaacaaatatgtcctctcatctctgtcccaacctggctcaaacccttcctcaattatcatacacatataccccataataaaaatttaaacacccgaagtaagtaaaaatagctgatatgattgatttcataatgtctatgtcttctttctccggactggtctgcggtttctttctttctttctttctttctttctttctttctttctttctttctttctttctttctttctttctttctttctttctttctttctttctttctttctttctttcttccttccttccttccttccttccttccttccttcctttctttctttttatttatttattatatgtaagtacactgtagctgtcttcagacactccagaagagggagtcagatcttgttacagatggttgtgagccaccatgtggttgctgggatttgaactccggaccttcggaagagttgctgggatttgaactccggaccttcggaagagcagtcgggtgctcttacccactgagccatctcaccagcccttgtttctttcttttatacaaccacatctaccttaggccttccatacttccctggtaccttctgcctctctttagagcagccacctgggactctgaaacaaaggagctttgtgaagactgaggaccggttcttcagacagggtttaactacttgctgcaagccagttggatctggagtggcttaagtcacatttgtatgctcacagaagggggtgctaggagttgggggacaatgactatgtgagcaagggagggaacttctgggttgttttttgttttcctgggggttttttggttggttggttggttttgtttgtttgtttgtttgtttgttttttattgtttgagtttattaaggccaactttgttcaaagccacagcatgaagatttcacttattttcatgttgaaggcaggctataattgccatcataattactgcttttaagtcttgtgtgaaaagctagttgctcttagctcccaactcttctgttttttaaagccagggctctgcacatgcggactaagcacttctacacccctccccttgaagggcccctacactcaggccttacccatatatcctgaaactcaccaccctctggtgcttttaggacagcgtttattagaagagcattttcatttactcacatatgtacacacattcttatgaaaaaaccccagacctaaaatactaatgttcaaaacgtgctgtaaacacaggaattttttttcttacacttattttttaaagatgtattctcatttacatgcatggctgttttgcctgcatgtatgtcttttgcaccttgtgcttgcagtgcccacaggagccagaagggggcatcagatcttctggagctcagggtatggagggtgaacctccatgtggatacggagaacttaaccctggtcttctccaagaatagcaagtatgtgtgcttaccttctgggccagagaagagcgctcagcaggtaaaggttcctgcccccaaacctgctaacctgtgtttgattccgggagcccacctggtgaaagcaaataagcacctgtcctctgatcccatgctcactgagacacatgagacaccctaaataaacacatagctttaaaaaatgttactgggtcctgttaaattaaggaatttaaatttgtcctttaaaaattatatatagatcaggctggcctcaaactcagatctgcctgcctctgcctcccaagtgctgagactaaaggtgtgcattaccacgcccacccctctagcttaaaatatataatttttaaaatactggcttacacactatggattctttagttttgcttcaattagcctaagagtttggtttcatgtaatatttaacaatttacaatcttagattttttttttatttctagtctttattaagtcactaatatttctcagtattgatcattttatttagaagcaataaaaccttcctttataaaatatggatagaagactggaaacacatttgcccctctggtcttttgacagtctaaaaaatcatataattcagtgacgtgaaccaagggaaaacacagtgttgtttgttggtattttgggatacacccttgtgtgcctcaggctggccttgaactggctacgtagttaaagatgaccttgaactcctagccagcactgggattgccgaggtgcatcagcaaacctggcttccctattcccatcttggggttcaacccagggcttgaacatagtaggcacacacacaaccactgctctgtgccccagcctgaaatgttacgttaggaggctggcaggttttcatttctctttaggctttgaagcttactttcacactcattcagagagtattgggtatcacatggtgtgaagactctctctctctctctctctctctctctctctctctctctctcacacacacacacacacacacacaaacctcaatttctctcccccctccccccgatttcctaactcttacttgcagagccatcttggctgagggtctgcctcaggtgagagatggagtgtgtttaccccaaagtgctatggatcttccttgtctttagtaccatgatgctcgttttaccaaactctctgcctgtgccgcccactgcttgtcccagcttctaacaggtgaatctatttcagcttcaaatgaataaacatgctcacatgggatttttgcctatttttatcatatttataaatttggtttttggggagctggaaacggctcggcggttaagagcactgactgctcttccagaggtcctgagttcaattcccagcaaccacatagtgactcacagccatctgtaatgggaatccaatgccctcttctggtgtgtttgaggatagctacagtgtatttacagtatacataaaaataaataaatctttttaaaatttttgggttttggtagtgtttggatgagagtgtgcccagtaattcaagttacctagcctagatatgacacaaggggaaagtaacattttctaaaaattcagtatttccaagaaattgtggcaacaccatacttttctttaagacttttgaggcagttttactaggtatgttatactggccttgtgactgttgttgaacctccaagtgcaatctcccatattctgggattagaactgtcaccctttctaataattcacagtgtgtaatgatgtctcacagtgtcactttttagtattttctatttgccagaagactttgggctcacttaaatgtgtttatttaacccccacaacatctcacatgaagtaggaattactacatttcttatttatattaagcagtggttcaatagcagtgggcacccacatgattctctgagatgattggtaagaaaatcattcatttaattttagccacgattaaaatatttctgtcaaatttcctttctatgcaatgcagtgtcttcttggggcttccccagtcatctattagaataggttttgcactaaaatctttgtaaggctacaaagcatttccccaggacagctatggcccctccctgctttctgagccacgccttcaaattcattccaggtgtccttagcaaatgactcccaaggctcaaagccattggccaatgccgagccaggagccacgtagggcagagtcacgctgttcctggggttaggggcaaaggttgctgaagccaagccgggctgtggtcgcaattagcctgcacatccagatcgaagcctggaaaggtagggaaatcttatttattcttatttatcctcattgaggtgtggagaatggttgtgtttggttaaggcattaagcgtcggtccatctgttttggttttttgttttaattaaaagtggtgtatacgtctataagttcttgagaattttaaacacttctctacttaccttgcctcctgttctctagtgatgggtgggctttttttttaaagatgttgcttagtcttacagctttccactgcgcttacttaaaaaattcttacatttaagcgatacagtataagcaaggatttgtcgatggtgtcgcaaaagcagtctttagaggagaaaatgtgataactaaaataagttaggaatcagcagtctgatgatacgtgaaactggagccttggtatttcctcttgggtactctactttgagacattctttttcaaaccgacgatagttttaagaaatggatctaaccacaggcactatgctcttgactataactataatactttttaggacaactttccacgctctgttctaatattaaccacaacaaccagaaagcagagtgtctttctcacctatctacttaaaaatgaagcgatttgcatagcagtagaagctgaacatcaagcggagcatctctctgtcttaggagccctcctccatcatggtgggagatggctgccatcagtcagtgtgggcacagagcgttagacgcgtctgtctgtcagtccatgcgtcgtcagcctgtagtgtcagccggctctcacagctactcacctgagcattctcttgtcagtgtcaaaggtaaacgtgcctgtaatgtctgtaactagtttgctgctttgttccgaaaatggctcagcatgggtttgtattctgtaacagaatagactggacatttatttaagggctgagagatggtagtgttggataaaaatattacatcaaaagcatttagtatttggtatttttatctgatttgtaaagagaatgttactgtggttatcaccggatattaagggtgtatgcgcgcttatgtggtgtgtgtgtgtgcgtgtgtgtgtgtatgtgtgtgtgtgtgcgtgtgtgtgtgtgtgccacagtgtactgtataggtctgaggacaacttgtgtggagttggttctctccggcctttacctggctgtggggatccagccaggttgtcagggtggcccagtgagcgctttactgactaagccttctttccggcacccttgccctcttcttagttttcatcctgaaatatcctgcttttactagatgtgtccaaactgtctttttttcttcctgaagctcgctctcaatggcaccttcaatgactggtctctcgatctgcggattgtgctttcgggcggagcaacggccacggtgttaactatttacctggcctgggagaataattactaaccaccatctcgatgtttctcaactccaagctgaggttcaaaggttcacatgaaccttgcggatcagaggtcagactcaaattgctgcaatttgttgctgaattctgccgatatgacagaaattcacagctatgaggattgctggatccactcctgcacacagaccaggcggggcagttaatactgtcatttgtacaagtcagcctttggcacccaagtttaataagtaaccagctggtgccttaggtttcactggtacaaggtgcacgttataaaaagggtcagatgtcactgggcaaagatgaaggcagtgaggagtggccatctcatggctaccacccatgaactaactatacacaaagatccagtagtctgtttagttcatatttctacggtgtaaatttcaacatacattcattttcttggtcttaaagagatgtgtccttttgtaaaaatgttagtaagaaagagctatctgattagggatcgttagccaagaagtagactccaaagctgcacgcttcactaatcatttcacggggtctttgatttctcaaaaactttccaaaattagatggctttttaagaatgtaggggctaagcggcagtgactcagaccatgtgattccagcctcagaaaactgaggcatgaagattgctgagtttggggtcagcctgggctactgggtgatgccctgccttttttttttttttttttaaagaggaatgggttgttttgccttggtcttttcgaggttacagtggcaattgattgttgctgtgggcctgtggataggacacagaccttggtgtatgatggagccaagctgcttccctcataaccaagaagtacaaaaatcaggctctaggacccacatctctgtctagtcactcttgagcaatgacctgagatttcctgtgaggtcccacctcttactgcctcccaagctttttgaaacatagggctttgggtcctgagacacagatcctgagagtatatagtagtatttcttttctttctctttctttctttctttctttctttctttctttctttctttctttctttctttctttctttctttctttcagtagcacaatggaactctcccaaactggactgattaattaatagaccttagtctctggtcagcctctctgtgctgttccccatctgtcacgtgagtagaattatagttcttgtttcctgtgattgtagcagcgattaagtggatgatgtcactcattgatgctcagcgcaatgtctaatgtacagtggggattcaagcaaggcccaagctgccgctgctgtcactggctccaagctggtgacttagccttgcctgttccacatctcaccccaagtggcttccccttggtctcttcctttcaggagggggggtagacacagaagtacagagttggatgagatgatgtgggggatttcaggagttattctattaaacatcgggcagaagcatgctttaaaacgtccatttcaggtcgaccactccaaagaagtcctatctttccttagcagattgctgtcacatgggaaaagccataaaatgaaataactccaaattatcttgctgccaagcagtgagacacacttgagatttaaaataagcccatgtatgatgtcttacggataagccgagtcctacacttggggatatacattacggagttatatttactgatttcaaaatgaagttctcatttctgtcacaggtcaggacttggtcttttgcaaaactgagaaccttcgcaaaaatgtcagctatgaaactattaccttggatttattcatttcgtttctttacccttttctaattcagtgcctcttggataaagataggatttgaatgaccagagacattaaagctcagtacttggtattgagaaaagtcacaatgacatctcagattaattaaagctaagtactggctctgggccagcactgagtggaggactggggtttcgatgtgaatcagaccagattctgccctagtaaagttttaatttggctgataatgaacccagttactaacagttattgtaagcttgggccatatgccaaaattctaccccgtttgtccttcaatgtgccaatttcctggggttcgacctagtgtcacgaagagtgctagaagacactgtgggcacatgtttcagggtctcttcatactgcttcagggaggagtgagatttacagctgagctcgggctggccatgcaggggatctctgatgccccatgaatgacctgtaagggaaaccgtgttgggagataaagctggatgaggactaagactcttcaggtcttatgaggatactgactttctaaaaacagcggcaaggtccagcaatcggacccaatcgtaggattttaaaggccactttggattcattgtcgtgggcaggagtgactgggatgaaggcggtccaggaggctaccgaagctacaggctggtggtttacagcatccttctgcatgtgggctctttaactcatggagtgataactcaagctcaggacacagtgagaaagcttgaggctttgacagttgacagcattcgtgaggccaagtggcaactggaactctgacgtccaaccacacagtgtcctggtagctctgagtccgttcatcctacgaaagcatccgtttttcaataaaaagtagtcctgccagcttagaggcgcacgcctgcttcctcagtactcagagctgacacaagtcnnnnnnnnnnnnnnnnnnnnnnnnnnnnnnnnnnnnnnnnnnnnnnnnnnnnnnnnnnnnnnnnnnnnnnnnnnnnnnnnnnnnnnnnnnnnnnnnnnnnnnnnnnnnnnnnnnnnnnnnnnnnnnnnnnnnnnnnnnnnnnnnnnnnnnnnnnnnnnnnnnnnnnnnnnnnnnnnnnnnnnnnnnnnnnnnnnnnnnnnnnnnnnnnnnnnnnnnnnnnnnnnnnnnnnnnnnnnnnnnnnnnnnnnnnnnnnnnnnnnnnnnnnnnnnnnnnnnnnnnnnnnnnnnnnnnnnnnnnnnnnnnnnnnnnnnnnnnnnnnnnnnnnnnnnnnnnnnnnnnnnnnnnnnnnnnnnnnnnnnnnnncggccatctttctcctctgtacttttctaccccagtattcctccctccattttctctgcatgtctgcacccctccccacccatatcgcttttcttcccacactggctcatgagcctctttgtctcttggtctctacacacacttacacccacctaaatacatgaatttagaagctggagagtagattgaaattgttatttcagcttgcatttgtgaccaagattgaagtagcacagggcatgatttgacaatcgactatgtttaaaaaacaaacaaatgtattagtttataaggtttttttatttgtttgatctttaatattagtgtgtcctgtttcattccaaccattgaatttgaaacaactttaaaaaccatgtgtacagagcactgggatggcttggtctttgacacttttgtagaggatctgggttcagttcccagttcccatgtgatcacccgtccatctctaactacagtccccactgttcccacgcccttgtctgtcctccctagctgcttcatgaacacgatgcccataattactgcagcaaaacattcatatgcataaaatgaaaaagagagagaattaaatcttttaaaagagaaggacaatcgtaagtttaaatatgtgggcctgtgctctacctcagctgaggattgttcttgctgcctgatgatgcaaacctgcctaccagatttcaactcatggaacccatatggaggtgggaggagagaattccactgtgccatacatgcacatatcatacacacatcatacacacatcatcaccatcatcatcaccttcctcaccaccatcatcatatacttcaagaaaagaaaccaagtatgacaaccagactctaacagtgactctgtctacagtctgcacattcatgagtctgaggtaggaagcttgccatgaatttcaggcctgggaaacctgtctcaaaaccaaattccaaccaagcactaccactaaaaccaacaaagactatctgtatcctgacaagatacagaaagaatatgagctgaaataaaatcagggtacacagcaaaaatggagacatcccgcaccatccgatcccaccacatttgagtttttgctttgttttgttttattttgaatagccttgtctgtcctgggattcactttgtagaccaggctggcctgcaactcagaaatgggcctgcctctgcctcttgagtgctaggattaaaggtgtgggccaccaccatgccagcatttacaacatttactgggaaccaggagcagctctaagatttgcttcatgccccctcacacacacacaaaaaaaaatttaggaaaagaaaaagaaaaaagatagataaatagatagatccaagtttatgggttttattttgaggttttttttttttttttttgagaacaatcagaatagcaaatagtgaagttcctatgaaataaatcctatttagatttcttgtaggaagtcagtcagaatttcctggagatgtatatttagcccatatgttatacttgaaggagttttgttacttacatagttatgagtaaccctctcagtgaaccttctttccctacagtatagcataaaactggaccctgcgtttcattatatattagtgatttgctttcagattacagagtttacgtgaccgctgccgagatactgcatttgctgaggggaacatttactaacacacacagcgggaaacctcaaagttctgtgcaaacactaccaagttcatactatttcctgtgggagacctcccctcaagaaagctgggcacacctgccgtgatgctgcaattgatttcaagacacagcttataatttgcactttaatgtccaaggttttatcaaactgtagcacggggttggttgttatccagcaggtgacacacagagctattttttcaggttgggtaaagactatatgcatcatgagctcatgtgtttagtggctgcagctctctaaggctttggcccttttttggaggggggaggggatacctttgttttcttttcttttttttcttttttctttctttctttctttctttctttcttttttaaatacatgattaggatttgacccagggcctggctggggttatcccctgtgttctggtgaagacatggatcctgcagaacaccagccattctaacatggatgtggttaaacgatttcatggggttttttgtttgtttgtttggttggttggtttttggtttttcgagacaaggtttctctgtgtagccctggatgtcctggaactcagtctgtagaccaggccggcctcaaactcagaaatccgccgcctctgcctcccaagtgctgggattaaaggtgtgcgccaccacgcccggctacgatttcgtgttttaactggcttcagaggccacttgatccagaagattccaaagcatgccctatagagtcctaaaggtcctcccatgtccccatgaagccactggctcttgtgtttgttttggttggttggttagttggttggttggttagttggttggttggttggttggttggttggttggtttttggtgaagaatatatgaagcaaaccaaaaatgtacaacagtggcaaacccagctatttaactagccattcagctagtacttcaaacaagtgaagggatttctataaagtcagagaccaaaggtaaaggcatggtgggatatgcctatggtccctagcacttaagaggcagaggcaggagaattgcaccttctaggccattctgagatatatagcctgtctctgtctcacagaagacaccagggccaggatatggacacaaaggtgttgaaagtctaatctccaagccctcactctagtcctacatactggcgccatactggagttgagaaatatggacgcacagacatttggattgtcaggtagcttggtcaggtctcttgatagttgtaacagctgggtagagtgtgtctccacatatgaagtgaaggaaggatattctgtaatacttttactttgtctgtgtgtcttgaacattttaatttgaactttacagtcccttcatttgaatattttgtaccattaggatttctaacatgaacttaagacctgaattgatacttcccatttttttcataacccactcttttgaaaaaaaaaaaatcctcaagaaatcttgactgtgattttagggcagttagtcactctcaagtcacctctgactaattgcagatggatcactaagccttgttcctgtggtcctggggacaggctctggatgcggtcaggcactagtaatgatttgttagtgatgtgtaacataactccacagccatgtgggaggcctcaagctagatatttttatctctgtataaggaggtaggtctctttgcgagtctctgggctgcatctgtgttcttcctaagctgaatgtgtatcaggcaagtcatggctgctccaaaggtcaaaacacaccacaggaaaggaattgctcatgttcctgacgcaattccccatctcttcaaggataagataatgagttacatttcttggtttctagaggacataagagtaataaaggtttcttgactaatcggagtcatgatagttcattttagaacgaaaacctcctcagtttctaggcccatgtaaaacttacattgaaataaagcaaagcaaaacatctctaccattttcttcaatgctttagggtttgcctcagaggacacgtcaagaactgatcagagaaatcccaagcgagctgcctgaaccttcgagaattctcttgttctaccttccatataaagaaccaggaccaatcgcattggtgacctttggtgagtgcacctcccagaatccttttcttccctacttaagtaagaacataattcccctccctatcaaacaggacatgtgtgagatgacgcatccctggtgtgtttacatggtaaactagtgggatgtcacacggaatgatgagcccacactacagagccttatttctctgtacatgtcacgtctttgtggcttgaaaggacatgtcatgtcatgttgaaagagactggagtaacctggaatgcttacagtctacctctgacttcagaggactctagcctgcctttctttctctctttctttctctttctttctttctttctttctttctttctttctttctttctttcttccttccttccttccttccttccttccttccttccttccttccttttttcttgttttgctttttgtgtttgttggtttcttaaaatttattcactttccatttgctacccctgtcccccattgttatgttttaaagacagagtctctcgtagttccaggtagctttgaacttttaaccttcctgtctccatcccgaaaatactaagattatgggtaggcgccaccacaacctacagtcatcagtattttgatatctttcaatgcatggtacacaaggaagggtctctgtacaagacagaagattcggtgtgacactatttgattttgggactgtcctcccatcctctgcaaattgaccttcttgcttgttatttaaagcagaagtagctgtcacatcagactttccaattcatgacaccttgtcctttcttcagtaaccagcttgcttcacaaagcatggcttcagtgctcatagaatgctcatttcattgtaggactgaataatattccattggaaggcatggaccaggtcttgctaattcttattcatcagcagacatcagggttgttccctggttttggctactgtgaataatatgcccaagaatacctaagtactacttttattttcaatttacatctagcaatggaagttgataaatcaacattttctttcttcttttcctgaagtagcaacagattgttttccaccattttttttaatgttgttaccatcattgtacagagaggtctagtttgtccacctaactggcaacagtacaggagtttgtcttgattatcaacattataatgaggataaaaatgctatgtcaaactggctttgatttttctcacccctaaggattaacaatgctcagtgtctttttgtgcacctcttgtatcttgaagaaatgtgtgttcaagtccctcacccatgttaatcaacttgcttgctttgcagctgggtttgtggttctttatggattctgggcgttggttcttcatcttaagggaaggcatatcccaggtagaagtttctaagatgccatgagtgacatgaactcaacatccagctgcattgtttttcttaataggctttagtttgtcccacagatagacaagagaaagggtttggggagacagagagctcctgtaactagcaaactatagtgagatcagtgagtggtttttgcttgataaaattcccaacacaagaacaacagaagctgacagtattttaagcatgccgtgcccgtctctgcgtgtgtgttatgaggatattcctttggaaacggagggagcaagagaggccacacttgatgtggttgggagtggagagtgttaggtggatgcctgcaccatttacacaaaaaaatcagttgttcctcatgctgcatcggagaaattaaaccagcctacccacaatactgtgggcaagctgtttccagaagtttccctagccatgttttattgtggacagaacctacatatgcttccaatataaaatgtgaaatcttttcagcacctttcctggtagaattttgagaagaaggaagcaacacccgactgtgtacactgcccctcctagtctcaaaggtctccaggagctgactgctctctgttgggccgcagataacagcaggcttgcatttatgcaacccatagttacaggattttctgattcggttagactttcaacatcagaacacttggcctggggagtcagtgtccaaattccaacccagttagtgctaaatctgttagcctaatcttcaggacagagtttaccaggcccacccctcttctggtttacattggggttggtttataaggagcaactctgttggccatttgtgggccattctcattcttgctctactataaatggggatttggaaaaaggagaaataactaagggaattacattttctgattttggatggcacccgatagcctatgcttttctgaggccagtgcagtgcgtttcctttgaaagtctcttcacatgtgattaactcagagctcccactctgtctatatgaacttgagaataagtgatttgctcgcatcggggctgtttttattcattagggctcaactaaaatattaactccaaatgtgcatgctgaaagcagagaacatgtgagaaatgatgcatcaattcaactccaccaccatttccagagtttaagagatgttaatctctgacagaccacacatttcttgacagtgtaccgtattttctgtttatttccaccaatacactaagagcatatttcctgaaattctttaatattgttttgcttcctagaaccattcatatagtcagtcgtcaacccgagcaactctgactgcctaggcaggttgtagatagaggctggaaaatggctctcgttggtctccttctcttccctttcctcagaagtaaacaaagcaagtcatttgttcctaatatcatgctcatttcaccttcaagacttgtttgtagataaatgaacatttcagtttttcataaccaggctccccacccccacccccttcccgatcatgagccctatatagccgcactggaggaaattatttaaacaagctctaagagcaagtagcaatcagattgtcacatagcttgactcccatttcttactgtgggtactcattaaccaaggcgattacagttgggagtcggagagagaggatgagaggaaagtgcattaacaaggaaaggaaagcagggacgaatgaggaaggaagacagtgggcctcggaaggaactggctcttccagcctgtgttccctcagcttagtcctgagtgttgtctcctgtatggaccgaaggccatgtgactgatgggtggccagggacttggggtttgtgtgctcgcacacagagacctatgtgagcgtctgagtcacgtgattggtatcagacctgatagtgtgagagctcctttaggcaggatcccccaccatgtggcagagacctccccaggagcagcctttgttccccaggggaggttggaatgtggaccccctgcctggacactcccattgtctttcactagaccattcttttcctttctttccttttctttttttttttcttttttttacagagactatagttgtagtgctctataatagtgatagcattcaaaagtagatattttagacttactttattttttctttttaagatttatttatttattatgttgtaagtacactgtagctgacttcagacactccagaagagggcgtcagatctcagagccaccatgtgagtgaactcaggaccttcagaagatcagtgctcttaaccactgagccatctctccagcccctagatttactttatgtatatgagtgttttgccttcgtgtgtgtgtgtgtgtgtgtgtgtgtgtgtgtgtgtgtgtgtgtgatgcccatgtctgactggtgcccatagagatcatgagggtgttgggtctcctgaactggagtcatagatgggtgttgggtaccaaacctagaaactctacatagtggtgggtgctcttattccttgagccatctctctagccccttcaaaaaatgcttttaatttttaaaatgtatttatttgattagcttatatgtgggtatgttttaatgaatgtatgtatatatactgcatgcatgcctggtatccacagaggtcagaagaaggcatcaaattctctggaattggagttacagagctgtgagacagacatgtagatgctgggacttgaacctgggtcttctataagagcaacaagtgctcttaactactgagccatctttccagcccaagaaaatatttttaatttcaaaaatacctgttaatcagtttaagcacatttaatttttctttgagaatttcacatatttcactactatatttacattatttccacccatccctccctgcctcaaaggcctcctacatccctcccacttcctcccaaatgtatgacctcttccttaattattgttattacatatacataagacctgctggtccaggctttgttgctcaatgtacctgtgtttaggactgaccacttggggttggatgacctagtggtgttattttgagcctgaaaaaaaagctgattctccctcttgaggcagccatggattgcctatggtttgggtgggggccttgtgggattcccctcaacacttggtgttgactgttcactgtgtaggtcttgcttaggcagccatattgttgcgattcctgttgcaattgtggggcttccctggtatgacaatatggtactgtctagcagcagacttcctggtcctccggctctcagtatttttcttccccctttgcatttccctgagccttacgtgtcaggattgcattatagaatccacaccaagtcttttcattttagccagttctatatctctctaatggtctccatctgctgcttaaaaacttcattacatccgcacacaaaaattatatccctggcttatttcccttcctgggggatactctttcactgggacacttgtcttcaggtcgttgaaaagcaagggcatccaccttgcacaggatctgtgtcacccctgctccaacgggagcagatcttgtttcgtagttataactgggatgactaatgttaaccaaacaaaatcaggtcacacctaaaactgaagctaatgtttgactgtgtcgatccagtccagagcctttgtttcaggacaggcaactggtcatgttccttccagagagacctgtgagattcttgtaaatgactgtttcacatgtcccaccacaaggtcacactagggcaagccccagtgagcatgcattcatggaccatgggacactagcggtgttccatgttttcacagtgtaactgctttttgcagcctagtaaagcgggagggcaggacacccctcatgcacatcacagcaactgtgccaccttatattagaggaagtcctcgttttcatcttcattcatatagatagatagatagatagatagatagatagatagatagatagagagtattctttcttgaaatacattttgtacaccagtttgtacaccatttttgtgttctgcatgtgtgagggagtcagatcccttagctaggagttataggtagctgggaactgccttgtaggtgctgagaattgaacctgggtcctctggaagagtagccagtgctcttaactgctgagcatctctccagcatccagttttagaattttaaaattaattgcctctccttcagtccagccccttcttcctttgcgtctacctcaacatctctctcagcatcttgttcgaatctctctcaaatctcttcctgcatcttcctttattctctgtgatggtttgtatatgcttggcccagggagtggcactatttggaggtgtgaccttgttggagtaggtgtgtcactgtgagtgtgggcttaagaccctcaccctagctacctggaagtcagtcctcagatgaaggacaagcagccttcagatgaagatgtagaactctcagctcctcctgcaccatgtctgcctgaatgctgccattctcctaccttgatgataatggtctgaacctctgaacctgtaagccaaccccagttagtgttgttctttataagacttgccttggtcatggtgtctgttcacagcagtaaaaccctaagacagaagtggttaaccgggactgggttattgctgtgctaggcctgaccaagcttttgtttggaagaatgtagatttgtggactttggatttggaaagctgtggaatgctttaaatgtggcttaatggactatccgagtaagaatgtcaaagactttgttgctgagtttgatttgaactgtgcagacctggcccaagaggtttcagtggagaaggattccagaatatggccaagcatatacaaaccatcacattctctatttcccagaatcctctctcttcctgccagtgttccacctcctatttcctgcctcagttcattggccataggctttttattgacaggtgatggttataagggattctctgtacaggaccaggatgtcagtctttttggctttgcaaaccttacagtcactgctatagtaatttaacctttgttacataaaagagccatagacagtactaacaccaatgtacatggctgtgttgaggtaaaactgtaaaaatatccataaaggcaaagttggcttcatcagccctagccctgatttgctgacgacttctctagggcacagattttgaactactcctcacagaaatgtcataagaattgaggaattcccatgagatgtcttgtactcaagtgctgtaagtttactagccagcgtgcttagtcgatttgctattaagataattgttcaagaaattctttccagtccatctcctttcctgaaaagaggattatttataagccatctcttctctttattgctgccctgtcctctgcacatgggctaaccacaccatacagccacttctccagaaacgcgagccgcatggaaggaagcgccgccccctaagggttcttcacagggctaaatggtttggccataaaatgggagttgcttttcatgagtttaatgaattgtataaagtccttacaaagacatttatagtaatataatctatgataacatagttctgaggataacaagataaggaaggcgtctgtctctccataatcagtcagaggtttggaaagttctaggcctttctggatgtttatagcagcattattccttgggtttgacgtgttgcccactgttggttatctacattttgagctagccttagcttcaacgcaataaatgcttactcggtgggtgtatgtgacctcctagtactgagtactcttgtgcctttgtggctaccacctcaccttgctacactgtccccagcacagcactttgtgcaaaagcatgtattgattgctcctggtttgcttgttaagttgaaaactacaatcttttccttcaacaaatatgcattgtcttttaattcacaaactttgagagtcaggaacaggcatagactgtcctcatggagttgacatttaagagatggaaaaagactgagggaaaatggtagttgcagcttgtctgaaaggggacaatgacagaaagccacagagttgtctgacactaaccatggctggcaagacagagaccctcaggtttatcctgtgccattcattctgaggtcctagatcccctgtcttatagatgctactcaccctcgcttgtcctgggcacttcctaaatgagtacttcctaaatgcattgatcaaatcctgagcagaaccattgtgcaagaaccattttttcacttggagattcatctgaggcctcctagccacatccttctgcctgcagtttcccattgccttcacacagaataaggggtgtgttctagcccagtcaccacccagctccacttgcgaactgagcctcttctgtctcttttacacctcttgcatgtcactctccataattccaacagactccccttggcttctggcatccttctgttctttccgctttcttgctagattatgaacacaaagactgagcagtggtcgcacgttggagcacttagcacagcccagtcctcagaagtgcccagtgggttaagtgagagaatgaatgtgcgaatattgtttccttgtctacatcaccatagcatcgcctttggaggacagaagatgacttcagtaccagtgaactgactgtgttctaagaccacattgtcagggaatgtccataggatgccttaagcaacacgtgactctgacgagatgaggcttattatgctatcacagaagtcagtagtagaattttaaaatgacccatgtcttgaaaaccagattgtcagcagttctcatgtatctcggaagaggtgctccatttaaatgagacactgtgatagctggccaggtcattagcctgatttcagaagtcttatttgtggtctgtcaatcagcctgtggtggcagattgggaatcagatcacaaaatgtgatagtagtatatgatggcaattgttgcacgaaaaataaaattgataacacttctgccacattgttaaatagggtgtctggtatctcagacactaacctgtctgtccccttgaacaacactgcacgtgtctcagctggaaggcagaactgttggcctggttgggtggtacatgcctacaatcttaatattcaggagatggaggcaagaggatgagtgagctttaggcagcttggactacagaccctctgtggtctcaaggggaggcctagagggtgaggaagagttcaaaagaaagaatacaaaacaccagatttatgttgaaaggagatataggaaataacaacatgtactgtttacatattgcatacagtcttggcaactccagtagattccatcagccgttctccacaaagagccactctgcatatttcccaccccacaaactgcacagtctgaagccatctctggttgtcacacattgtcaggtcgtgtgtttgtgcatctcctgggtagacggcagggatgcttccaaacttcctactacacccagggcatcccctcacacagccagaatgctgacagacctacagaaggttcaaaatcctgcgataaatggtacctcgggtgcctgcgcagctcagagtctgggactgggaaatgagatcatgtgcgtggaaacaaacaaacaaacaaaaatcttccaaaccaccgcatctcttcaagctacagcatctgatagactgcagcagcttctttctctattcaggcatctgcctgccttcctgtcagacttttctgtccttcccagatctctcaatggctcaggccagcagagccagaataaggagggaaacgataaaccccctcctactgtatgccagtggcttgtttaggcgtttgtttcctccagcatcagtgaactcgttaagaatgagtgttaagtgttgtaatgcttataaaaggatcaacataatggattcctagcagatatttaggtactgtcaaactccggggcagaaaatccctctgctttgcccactttctggaaagtagccacccctcctgagccatacagctggtgtccctgggaacccacagcaaagtctccttttcaggactgtgttgatagaagtgcctgggaaaagagcctcttggctttgcttctgtttatcaaacagagccatgcattgagtgatgttctttgccacaacagactgtgttaagagcatcaacataacctggccctcctatggggagctgttccttagtcgggggcttctaaaggtagaggctaggacttcgtgatctcctgtctctttaagactttgcttacagcaaggagactcacagaaggcagttagtgtagacgggtgaggggtgcagggtgagccagagctcccatcccctgcttattgtttggggcccctaggtgaattcctggtcctatagcctgacttccagtgggaaccctcttattctttcagtcttgggatggacggactgacagacctgccctggtgccagagctccaagagtgggagcagccttcctgatgtttatttgagtgggtggtggtgacttggtactggacaaaaagctaaatgccacatgttaaaaaccctctgccgaggctaatctttctctcctggtttcttcctgatttgtggtgagctctttcttcacacagagtatctccatcacccatgaggttttcaccacctttgtgacaaagctctccctaaaatgtgaattctggccttaaatcaaccccccttttcctctttcctttcccttccaaacccatcatccccgaccccacaacactctatctctgtcatcagaattaacttggagctcttaacagtttttcttcctcagcctcttgagtgctgagtttataagcatgaaccacttaaggcagcttaagtaacattctttaaaacaacaatagcagttgctaatctttctagcatattgtgagtcaggtgtcttcaagtgtcaatgaatcctctcaggtagcagctgctgactaaaccaatttagtgatgtgtgtgggaatgaaagtcagagctcatgggacagggttagaaagtggcacacatgagatttgaactcacagaaaggacactttcattgtttggactctcctccaccttttcctcttcctcttcctcttcctcttcttcttcttcttcttcttcttcttcttcttcttcttcttcttctctctctctctctctctctctctctctctcacacacacacacacacacacacacacacacacacttcagaactatgaaccaaagttaactgacaatccaagtaattctagaataaactcatacttgcctttgataaagactggtttttgaacactagaaatagttcttaagtatagtggcaacctttgctgaaccaattaaaagctaaaaatctgagtgaaagatactctgaaccttactaaaaccctaactcaaatctgagagtttgtgatgtaagcttaccttgtaagtacaaatgtaacctagaacaaaaattctaccagaatccagaatagcgacagcttttttttttttgaaagtatattttcatacagtagcatatgccaagctgaacaaatgagtcccttcaaataccctgctgtgctcactttgatgctggctgccctccgtgaggaggaaagcgtattcagcatgcacaaagagagcatgtactgggtgggtcctgcctccccaggaatctggcatccaccgggatgcttggaccatttgcagctcgtgtggcaagtctcttcaggttctttctggaacagcctctgcaaagtgctctagccaaggcttaggtgagaatcagacttatacttggatgcctgagccacagcaccagagaagtcagccagcttacctgtgacacgcacccgggaggctgacacaccagtctccaccagaactcaccggctaggcgtctgtgctgactggtttaaagctgaccctggccctgggaaccttttgcttgctttcctgtaaacacaagaatcttgctcagggccaggattcttgcctcgagctcacgttcaagtttcttatagtgacattccctgatcccttatttggaggttttgccccaggagcccgtcacatatcatttcccctaatcctccccctatgaggaggatcatttgctgcagctgtggtgtgaactctgagtcaggctgacactgcgactcattcccagagcttctacctcattgctccatgcctgtttctttctctgtaaggtagagaccctaatgataccccttccccatggtatccatccatggggatacacagagcacagcgctgccttttacataacagtctctacggatgagtctgtgaagctttgaagagtttacagggtccccctcgtggttcaccactggaggactcaagatcacccttgctctctccgactccatctgtttcgtgtgctctgaaatctgaagtactctgacggctcccctgaactggagaagtctatgctatgtgtctggatgcttgttgcactcatagccagtccacacctctaccttaaacaaggatcttgacattcagtatttggcatctgtctcagacacttccctgcacagcatgctgccgtgtgttcctgcccttgcccttctaaagagaatattctaggccagtctagaaggcacaagcctcttccttgctcgccctcctgggagctgaggttgcagctgtgtgctgccacacccagtccaaggctaatttttaatccctttgtttgtttgtttgtttgtttgtttgtttttgacttgtattttgacttggtttctccttgtatccctccctggctgtcctccctgtagaccaggctggccttagactctgactgcctctgcctccctagggctgggattaaagtcatgccccagcaccacctggctaatctcagggccttgcactagctggacaaatattccaccactgaactacagtcttaaaggccagcctggaacctgatacattgctaagcatgacctcaaacccctgatcttccgtatctcctaaaagctggagtgtctcctaaaagctggagtgatcagcctgtgatgtcacaccaggccttcaaggttcattttatgtctgtttgtttgcttatttattagtctcgtgtgtgtgtgtgtgtgtgtgtgtgtgtgtgagtgaatgtgactgtgtgtctgtgtgagtagatatacacatatacacataggccagatgaagaggtaggcttccttggaaccggagttataaatgtttacaggatacccagctcgtgtggatgtttgttgggtctcaactctagctcacatgactgtgcaacaagcacccttaaccactgagccatttctctagctccctggggctagtatttttttttcttccctatcacaaggccatttcttttccttttttaaatataatttttaattaaaatataattacaccatttccccctcttgccttttctccttctaatccctcccaggtatccagccctcctggttctcccccaaattcaggactaattattaaattctgaggtggctgggcattgaccttgaggactgtgatcttattagaaacaaattgttaagaagtcaagcttgaccctttggaagcagttcctggtcagtaggcaggcatgtaaagagcttagacttcaacttccttgtgtctcagcataattcagctagctgggaggtgagcgccacaaggcctacctgcagctaacatggggatgcacagggttagcttactcagaaactattgggtgggtgggggatagatgggtgaatggtagatagatgatagatggatggatgggtagaagaatgaaaacgtcctctgtctctcaaactgtcattcacatgagagggtcaggaactgagtcgtgccctctcaccaatatttctttgtccagatttcataaatactgcactgcagcttagattaagatgagagcctgcatggggggttgtggggcaagggatggaactgggactatgggaatatattttatctatgtgtgaaactatcagagagtgataacgcatgcccgaaataccagcacttaggaggctgagcaaggtggttgtcatgagctagaggctaacctgggaccggccaacctgttcaaagaaaacaacaacagattgtatatgaaatacatgtgatgtggcttaggaggaggctcactcagcaaggctcatgagggccagaagctggataccaacacccacgtaacatggcaatgcgctggctgcaacctcggtgctagatggtgagatctggtgagccgagaagggtggatccctgaaatgtaccggccagcctgtccagccaaatcggttcagtgagcaatcctgcctcagaaaacaaggcggcaaacaaaagagggagttatccaatattgaattctggcttttgcacacaaacatggacacacatatgcaaaaagtcaacatgtttttgcaatggtcctgaaattaagccatgattcagcctgggactcagaagagaagaaagcagataggcttatggagtcaaatctgcattactgagcttcacttagtcaccacactctgacagcagtcaccaaagtcaggggccaggctagagagtgagcatccgaggctttgtgggccacactgcccgtattccaacgtttgaactctataactctgccataccagttgtcaacagaagtctctcccccacccccacccccaccccacattaagaatatggttttatagatagggctttatctaaacaagtggcagaccatatgtggtccctgctgagctccgtctaaagcatctagagttagttgtcccaagtccagtttgctattggattggagagaaaagacatgttagcgccacagtggcccttttaaaagacagtaaataaatggttactttttattatgtctaaagatttggccttaagtgtatgaatgagtattttacataacttatttaactgtggcaggatgataaggagaatggagcttgtagaccctaagattttcataaatgtgctcaatggatccagcatctcatctacttatctatttatctagctatcatttgcaatgctgaggatcaaaagcaagaccttgtatattatatgaacattcgggaagctggagagatggctcagtgtgggggcttgctgctcttctagaggatccaagttcagttcccagcatacacctttgctgtctcacaactgcctgttattccagctccaggggacctgaggccctcgtccggcctctgcaggcactcactgcatgcaaacatacatacacacataagtaaagaataaaataaacacattcttaaaggcatgtcttttttttttttaagggcctatataaaaatcccagttttgttgccttaggggcggggggggggggtgtggctgcagtacactaaggcgtaagttctattcctgtgatcatccatcagtgtctatcaggacctcatgtttaccgtactgtagcacgtagagtctcccttgatcatatgtatgtttctatatctatttgtcatcctctgttgcagttcactgactttaaacagtctcctaaaacgtgtgtgctcatcttcctttgggagggagacagacattcacactcaacgctgacactgagggtagaggaaccaatgtatcgctccaaacggacactgagaggacccttataaggagctgttgtcaagctaacttgcaagcactgaagcacaaaggaaacaagataaataaatagaaggaggccctatccaaagatacatatttaactttttattacatttatttgtgtaggtaggggagcaggcatgtgtgtagaagtcagaggacaacttgcaggatttgatcttatccactatagaggtctcaaggttgtcaagcttagtgacaagtgctctaacccactgaaacagtcccccagagataatttctaaaagctctggaaaacacgcttttaaatttaaatccctcaaaaattcaaatgattggtctgagtttttgccagaatttgaataaaaaataatattgcctctcttgagctgttgcgatgttctaggcataggtcaaagttcctcgttcgagctgggcgtggtgatgcatacctgtgtaaaagtaatcttagcactgaggaggttgaggcaggaggaacacaagttcaaaaccagcctggaccccaagtgggaatgtctatatgtgttactgttctgttctgtgatatgataatattaccaacccaaaacccaaaatcaatagtgcctcacggttccaggggctgggaatccacaatgaccggagcaggtggcagcaggcagcaagcctgggaggtgggaacagccagctgagggctcacatcttgaaccacgagtattgagcaaagagggcactttttgttagctcatttgttatgctaaaagtgatatcattaggattcccctttataagtagggaaactgagtcatatgatagctaagtgaactccttctaagtcatacaactaggaagagttaactaggactcagacagccatgctgtttggctaagtggcgaatacatatctctgttttgtgtctctatgtagatttgaggttctttttttctttatgagaccagctctcattctgtatgagaatcatacaaaacaaacccacgatcctcggccttctgacattagaatcacagatgtgagacaccatacttagctttcctttctctttttctttttgtgacactgggtatcgaacccaggacctctcatgccccctaggcaagcacatcctctgccaccttacttcctagtccttgaatttttcctgaatagtctcatgtacaatttacagctctacgtttttaaagtaaactggtttttgggttgttttttgggttttttgtttttgttttgtttttttggttttttcgagacagggtttctctgtatagccctggctgtcctggaactctcactttgtagaccaggctggcctcgaactcagaaatccgcctacctctgcttctcaagtgttgggattaaaggcgtgtgccaccacgcccggctaaagtaaactgttttcctggttatattagttaaatgatgaaaccttaggccatcattaaagtgacatttttacaaatagtgagaacatgtccggatgtttctaaaatatccaaagccgcaaagaggaagaaaccatacctcagacactaacaaaaggtagagaaagttttgcggtagttatcagtgagtggacatttgtttcttttttgctactattacattttatgtgtatgggtgttttacttgcatttatgtatgtgtgtatgcaccacgttcttgtctagtgcccaaggaggtcaaaagagggttttggatctcccagaacttgagttacagacagttgtgagctaacatatgggtgctgagaatcaaatttggatcctttattaaatcagccagtgctttgaactgctgggctatctctccaacccatttcttgattttctatagatttcatttgttgaataataagatctacttcattctttaaaaagttcagccgggcgtggtagagcacgcctttaatcccagcactcgggaggcagagacaggcagatnnnnnnnnnnnnnnnnnnnnagcactggctgatttaataaaggatccaaatttgattctcagcacccatatgttagctcacaactgtctgtaactcaagttctgggagatccaaaaccctcttttgacctccttgggcactagacaagaacgtggtgcatacacacatacataaatgcaagtaaaacacccatacacataaaatgtaatagtagcaaaaaagaaacaagtgtccactcactgataactaccgcaaaactttctctaccttttgttagtgtctgaggtatggtttcttcctctttgcggctttggatattttagaaatatccggacatgttctcactatttgtaaaaatgtcactttaatgatggcctaaggtttcatcatttaactaatataaccaggaaaacagtttactttagccgggcgtggtggagcacgcctttaatcccagcactcgggaggcagagacaggcagatctctgagtttggggccagcctggtctatagagagtgagttctagggctacacagagaaaccttgtcttaaaacaaatgaaaggaaggatagaaggaaagaaaggaaaaagaaagagtttattcagaaccttgtcattacacaagcattgtatctaactttttaaaatatttatttatttatttatttatttatttattatatgtaagtacactgtagctgtcttcagacactccagaagtgggcatcagatttcgttatggatggttgtgagccaccatgtggttgctgggatttgaactcaggacctctggaagagcagttggcgcttttaactgctgagccatctcaccagccctgtatctaacttttaatgacatcattacacacttcctctctgaaagaaggtggctacgtaattaaaattaaaatgttaattcagtttcttgctcccttaagctccatttgctgtaggtggctagtggcagcttttccatcatctcctccaaaactgtactgagccaagtgaggtaactcagggggcaggaaggttgtgtgagttcaaggccacaccgagctacttacgaaggcctggtctttaaacaaaacaaaataaaccaagagttgaccttggtttcctggctcacatcccaacactcaggaagctgggatagggggattgccctgagatccagaccagacctggaagagaattgagaccaggtaggtagtctatgactagtacgacgcagaccctgcctaaataaataaatagatgttttgcacagcacctttctgggggaaaaaagaatatggactctggagccaaaagcccaggttcctatgtgaactggcgcaatttacatgacttctgagtctctttgcctacaagcaagcagagttgaatgtcaggtaccgtgtgcaaaggctacgaaagtgagctaagaatgcagatggcatttctttgaaacctgtgttgtcttttcccagtagaaatattgcatcacagcttcccgagttaacctggctccttgtggaccaaagctgttcacaaacttttgcctgaatgttataaaactctgactagttagtaggacaacgccacagtggttgagacaatcccatttcctgttgggtacttaagtgcacggctcagtagctaccttgtaggaaaacacctccttgaagtttactctaataagcacactgtagtatctggaggtataacttagtggtagaatgcttacccagcatgcacaaggccctaggttccacccccaccccaccccaccccacccccaacaatgcactcaccacaatggggacacttatgggacaatgatgtccttcactttctatcagtacaatgggaaggtctacctttaaaaaaaaaaaaaaagctgtgtgtagcaaagaaataaaatttgcaatgtgctgtagtgaaatgatactggagtcgaaagtgcaggaatgaaacgaaaatcattgtttgctacaaaaattaagatttttccccaaagatggcagcaggttctcacagcttggctattttaaggccacctgcatttccacagcggcctcctcaatctaagatctcaattcagcaccccacgccctggctgttgacggtagtgcatcaccagagagtgagcaaaaacaaagaaagtgagctcaagatgaactccttgccgggttccccactcacactcttcctttctcttttgcaggtttccaccagctgtggatgcctttgacattatgactgctgaagattccgccacagccatgaacagcgatccaacagtggggtcctccaccaaggtaccggagggtgtggcgggcgcgcccaatgaggctgcactgttggcactgatagagcgcaccggctacaccatggtacaagagaacgggcagcgcaagtacggtggacccccgcccggctgggagggcccgcatccccagcgtggctgtgaggtcttcgtgggcaagatcccacgtgacgtgtatgaagatgagctggtgcctgtgtttgagaccgtaggtcgcatctatgagctgcgactcatgatggatttcgatggcaagaaccgcggctatgccttcgtgatgtactgccacaagcatgaggccaagcgagccgttcgggaactcaacaactacgagatccgccccggccgtctgctgggtgtgtgctgtagtgtggacaactgccgcctcttcattggtggcatccccaagatgaagaagcgcggggagatcctggaggagatcgccaaggtcaccgagggcgtactcaacgtgattgtgtatgccagtgcggcagacaagatgaaaaaccgaggcttcgcctttgtggagtatgagagccatcgtgctgcagccatggcacgccgcaagctcatgccgggtcggatccaactgtggggccaccagattgctgtggactgggccgagccagagattgacgtggacgaagatgtgatgcagacagtgaagatcctctacgtgcgcaacctcatgatcgagaccaccgaggagaccatcaagaagagctttggccagttcaacccaggctgcgtggaaagggtcaagaagatccgtgactacgccttcgtgcacttcactagccgtgaggatgctgtgcatgctatgaacaacctcaacggcacagagctggagggatcctgcttagaagtcacgctggccaagcccgtggacaaggaacagtactcccgctaccagaaggcagccaagggtggtggtggctcggctgaggccgtagcgcagcaacccagctacgtgtactcctgtgacccctacacgttggcctactacggctacccctacaacgctctcatcgggcccaaccgggactacttcgtgaaaagttagtggagagtcttctcttgaggcccccgtgggtgtccagccccctagacaagggtgttagattgagcgtggctacaatttattaagccctaccagtttaggttgaggttctgagcactgactcatggtcacaattgctctatggagagaaccgtccctctgggtgagcagtcaaatcattggaacgctttgtcttttgctagggcctaacccatgtagagcaggcctgcttatcccttggaggttatgttataatccaattctcagccatgcctgcaatcccagcattctaaagggtgaggctagaggattcctaatttgaggccagcctgggttaccacttctgaagttatattttaaggtgttggttagcaaagccgtggttccttatagtcactacggatataagaccaaccatgacactataaaaacataacatagagccgggcgtggtggcgcacgccttttatcccagcactcgggaggcagaggcagaggcaggcggatttctgagtttgaggcctgatctacaaagtgagttccaggacagccagggctacacagagaaaccttgtgttgaaaaaccaaaaaaaaaaaaaaaaaaaacccaaaaaaataacataggttcaagggcccacggtccctgttcactgggtctgcgttaacatactctgcctttttttttctttttaagcataaaatgaggaaggaagatgggcacctccttttccagatctaactttttttaaactctaaaattgaagttacaattacaatccttggaactcaccttgaatgaagttggcagattagaatgttaaagaagaccaaaataggtcgtccgaagcatcttatgagcccactaaaggccagaatggtggccacctgccacttagacagaaggcaaactgaagcccctggactatccctgtcgctggctcacccttttgtgtgttgttattttaaagcaggcagcataagaggccgagggagaggcgcagctggaaacaggaccccagggcccaggggttcctacctcggaggatattccgctggccgtggtatatatagccgatatcacgaaggcaaaggcaaacagcaggagaaaggatatgaacttgtgccgaatttggagatctctcctgtcaatccagttgccattaaacctggcacaggtcagtacaaaccagaacaaactcaacatttggtcttaaaccccacccatctctttcaagtgagtcccagtcttcatggctcttggatcttatgtggattcatctgcacttgtgtaaaaaagaatccccacccccatcatggcctcatctctctagaatttaggggaacagtctagttgggcccaggtcatgttagactgtcagggcatctttcagacggtgtcacccgcccgtcactgggctatgtctctgtctgtgacctagtagggagagacgagagtgggaaatagttagagaggtatgagactctctgactcccctgtcatctaggacctgccttttcctttcgagtgtagataaacgcccatcactgagctacaacccagctgtgtgccagccagcagaaagcagagggcacagggattacccatttggagagaaagtagaaacttcttttccagagcaaacagtgccagttttccagatgagacaacggtgaaggtatttacagctggattgtacagtccatagatttagaatagagatgctcgatcctttgagccaaggaccttgaactttgattttaccaccagcttcccacaaacttatctgtcagcattgtcgggtggattgtcacctggatggtcacccgctgtgaggaaggatgagaatctgtaactgggtttgagtttggcaaacccattgtctgcggattctccaggcgctaacctctgaacccatggcgaattcctcctgtggataaccagaatgattctctccctggcgtcttggcctcactcagggtagtagagagagagtggagtagagagagctttcagcccctttcctgactgcacactttttttttcctagagaatagacaaggaattgatatgtttagaacataaatttaaagtgccgaaggaactcagtggtaactggggaaatagccctactaatcaccgcaatactgtggcttatggtgctcagatgccttataaatgccattggcactgaacagtctttagccatgtaaagtcctgtgtgccagggagagtcctgtagccagagtactgcagttaccctgtatggctaccacgtggtttcaactagtagcccaatctggacctcatttaaactcacaactttgtcagagacagacagacagacagacacacacacacacagagagagagagagagagagagagagagagagagagagagagagagagaccagggcagtgctactgcctagtggaagatttggttggaaaggaaggtaacagtctttggttgtgattttagatttttcatttttaactgaatggccaagccattgtttatcttatgaccactttgtttcttcacctttgatcacatccatcttcgtagaagaaatgtgcttacagttggagagaaaacacaaacgaaaggactcttggtgtgtacgtttcatgatccggcttatcctctcagcacacacagcatgcacacacacaagctcccccaaaccgggtctagcacctcttcctttgatctcttgatatcgcacatggacgttgggtaactctatctgtttgaatctctgcttgaaacctttcctttggactctactcacaaaaagtatttgagttggcaggtttgagtaaaaaaggcacgggaggcttttctattgtctacacaatctctacacacacacacacacaccctgctgcatcagtaatactaacatgacatacaaggcagggatgatacactcacatctctaagctgtcagaatgatacctcattcaacctgcttcgtaatacattgtgaacacgcaaagggcatcggtggtggtgagtaatgtcagtgagaataaacagagctcacactcacacgtgtgaggaaacgtcagtgcagacgcctcactggaaatgctcctgccgcagggcgctgtggagaaactccatccgatgtggcgccgcagagccaagcagagcagtgggagtgtgcaggagtgtagggctgctaacctggactttaaaacataagcagcaagcgaaggaacctcctcaggggtagtgattaatgcgcctgtctcacgtgcttctcttacagtggccatccctgccatcggtgctcagtactccatgttccaggcagccccagccccgaaaataatcgaagatggcaagatccacacaatggaacacatgatcagccccattgcggtgcagcctgaccccgccactgctgctgccgctgcagccgctgcagccgctgctgccgtcattcctgcggtatccacaccgccacctttccaggtaaagttcttggcatggcggggaatttatatttggagccccctcagaggtctttctgtggctgctatcatttatctatggagcctctctcaatcatagactcaattagtattcaacactgagactatacttggtacaatgatatttgaaaatgtattggcttttttttttccccaagggcaggagatcaaacttagggtggtaagcaaatattcctccactgtgatggcctcctagctcttaaatcaaaacaaaacaaaacaaaacaaaacaaacaaacaaacaaaaactgtgaaatagaggaaagaaatgttagctctatgaaaattgtttttaagtttattatttttgaatgtatatatacaggactagtatggctcagcaggtaaagactcttgcttccaaatatgatgacctgaattcaagaccccggtcccgaaaggtgaaggagagagacaactctgacttctctatgtgtgggctgtggtccataacctacccctgaccgaccgcgtgtacacatgtatatgtacacgcgcacgcatgcacacacgcacacacacacacacacacacacacacttgtgcagaggcccaaaacatgcctatatggacataagaatgtacatatgtaattcataagaaattgttttaacggagtagatacagagacgcctcctcccctccagctatgacgcagactgtgattgtcctgtctttggtctcagactgtgattgtcctgtctttggtctcagactgtgactgccctgtctttggtctcagactgtgactgccctgtctttggtctcagactgtgattgccctgtcttttggtcttgtcttttttccactttggccctggttagctcttaggacccgactcttcatctcttctgtctcccctccacctgcccaaatatgctctcctggacctctcgttagtacgttatactgtgacttatgcctgcacatttgttctttcttggaaagctgccctccgagactaagagtcttcattgtgtagcatatggggaaaagcatctgttgagcagaagaaaaaaaaaatcgtcgaacaatttctctctgaacgagtgaatgaatcctaagtatgaatggcccgggtctctcaactcattgaacaacagttatccaggatgtgtgttttgaaaagcagaaatccctgtctatgaagagtgcctgtcatttgggctgagctggggttctagactcctgttgtgtacaggtatctcaggtgattttccagtggccaggcatctgaattatcatggctattcacctcccttttcctctctatactaagcctcaactgctttattcagaaagggttaaaccagttggaattattcacacatcaacttgatactaagtaaaaaaaatttttcagctcaatgcctttttgtttgttatctttcactttcgagatgcggtctagatatgtaacaccacacacaactcaatacctcttagaaaataatttttaaaaatgtcccacactgtataagatttgagtttagagggttggagagatggctcaacagttagaagtatgtactgctctttccaaggacccaggtttagtttccagaacccataacggccggtaaccccagctccgggttaagatggagttgtagccctggccagcctcaattgcactatatagaccaggctggaattcacagagctccgcctgcctcttcttcctgagtgctggattaaaagcacgtgccaccaactggccttgactaagggttttgatgacgtaataaaatgattcaaataaggatctaagaacagcacctggaaggccagagtctttcagcatgatcatcattgccataattattacgttagatagaagttcttttgaacatagtttcgggagtccagtttatagattttgtgatagagataacctgatcagaatcccagtatttgggaggtagaggcaggaagatcaggacttgaggatcatcattgaggtattgagggtcaccattggagacccaactgggctacatgagagtctatcccaaaacaacaacgggaggaaaacaattaggaagcagccacatctgtggcacagacctgttaatcctagttacttgggaggccaaagcaggagggtagaaagttcaaggcttgtctggtcaacaaagcaagttcaaagctagtctgggtgaattagatcctatttcaaagtaaaaggttaaataataatgttattaataataagattattataataaagcatagggactgaagcacatttgcatagtatgtatgagatgtcctaggttcaattcacaacattgaaaagaaaaaacaggctggagagatggctcagtggttaagagcactgactgctcttgcagaggttctgagttcaattcccagcacccacagggtggctcacaaccatctgtaatggggtctggtgccctctcctggtgtctctgaagagagcaatggtggtgtactcatatgcataaaataaataaataaatcttttttaaaaaagaaagaaaggaaaggaaaaacatcctatgaaaaccttgccttttaaatgtagttttccattttgtatattctaagttacttattctgaagttagagtaaggtgcagaaaagatagcagcatttagttgcaatacttttattccttatgtggtgttttatttttgccccaaaaccaaaactaaattcgtggttcttagagatatgttgacccttacagtcttgccctgtccctttctctcccccccccccgccccccgccccaacttggtatgcttcactttcaaacagaaagggggacacccaggacagcttaaaaattagtgctcttaagcagattctcagcccctcattacctctctttgtggctttaactaaccgaatagaatggccaatcaaagattccactgtataaatctctggctcaacctgcagcctcacgctttgacaggagtctgaacactactaagtttgagcgcatcaagcccttcaaggatggctatttgctctgactaatctctttcttctgtactgtcactcacctgcctccctaccttgatgtcttctttccctccccactggggtgcttattattctaatagatgacgaacctgctcaggaaggacttcagtcttgtctgtttgtctctcagggccgtccaataactcctgtgtacaccgtggcaccaaatgttcagagaatccccaccgccggcatctacggggccagctacgtcccctttgctgctcccgccactgccacaatcgccacactacagaagaacgccgcggctgccgtgtatgggggctacgccggctacatacctcaggccttccccgctgctctccaggtgcccatccacgacgtctaccagacttactgagaacgggggaccggagccaaggcaagccaccaaaccccgctgaaggaacactttattatttatgaagaaagaacgtgtcgggttggtacacgtgcaaaacctgcaggtgaagaagaatgttatcaaatagcacactgaaatattttattatatccatgaagttttcactcgcttttttttttttttttttttttttgaaaatgacttttcaacttagcaggcccgcgttcatacatttctaaaagacttgcgacgcctcacgccttaatgccatctcttaaagtttgtatgctcttctgcttttgtacagaggtttggttttttgttttttaaggatatattttcagtatgaaggttattttcttaacttctgcactccagagttttctattttgtagaacctttcaaagtatatcagctatatgtatgtatatcaaaaaaaaaaaaaaaaaaaagcacacccgcgcatctagggaactattttgaaaactatattcaatatttaaagacacaaactgtagtgctctgaaatactacataaaacattattttattttttaaagtgatgctggaaagtgcaattttaaaatgaggaaaaaaaaagtctctactgtatttccactggcattaagggttgacgataatgccatttattcttgtcatgttttctgggtttatggggttttggtttggtttggggtttttgttgttgttgttgttttgttttgtttttaataacactctgttcttaagccaacatggaaaagactcctcacatccagagtcccaacactggaaagctctgacctgccctcactaccttgggctctctctcctgagtccttagtaactgtgccccgcccccgccccgccgtgccccgccccgcccttctccttccctagctccagtgcaactttggcatatctaagaaaaatggataattccaatagagaagacaactgatgccttttatacttcttcctgggattgtgttggggtctttttaattatttttggtttgtttagggcgtctttttaattatctttgttaattatatttggtttgttctatgtgtatcttcagtagcagaatacacattaaggacaagattttaccatctttgcctaaggcatctctgcatagctatttaattgttcagtatgaaacctgacctttctaattctttgactttttttttttgaagtctgggtttttagagaccaagaatgtatgtgattatagacaagacttgtcagtgggaagttaagcttctcgctgcctttctttctcctgtgtttcctacagaatgcctggtgccatcagggatgtcggaagccctgtgtttgtttagcagggcttcccgccgttgctctgcatttggtaggtgaacacgggcaggtgaacacgggcatacacatccaggagaagtctctgtaggagtttaagggtagattgtaaataacttctgacgcttgctcgccaaagttgccaagttcatggcctgtagtgtaatgcgaaatgcagccattttatttcaatgttattcaaagtgtttgcctttttttttttttttcttttttggaagtaaatgcacagatgctgggttttgtgcctgttttaaggcttttctttggcagagtgaatgtaaaatacagtagaaaagataatatcgtcatctcttttatgaattatatcaacttacatctttttaagaaggctcagtccaggatgtgaggtgtgcaataagggtagcagatgcacagttgtgtttcatggcatgacagagtccatccaatctcccttcccatcagagttttgctaataggcttaactcttatttgtggactaatagtaggatcttgccctcagcaaacgctttctgcttttaaattaagagagtcccaattgtcttttttttttctgcctcccccccactttatcttgacgggatggattttatatatataagaaatatttatttaactattctatagaattatcgagtgcctgctaagacctttaagcatccctccttccttattgcgtggtatagagcagctgggagagtgagaggcgtcactcgggaagctgcagccacacgggcctgttggaatgagtgacctccttaaaggtatcaggtcctcatcccttgactggtgaggaaaaagtgccttcctgccggccacggactgacatggaggtcttcggatgagcccggatgcccatgttcttactgtattttacaagtgcctggggaaatattttcaaaaataatattaataatttaaaaaaaaggaaaaactatgcactaacttaacgtggcgactaccttaacggcaggcgttggtggcagccagttaagcaccagtgtctctgcagtctgtggccttagctgtccctcttgtttctcaaccatttcacgtacactactgaggtaagtttataacttgaaatgtgaactttttttttttttttaggattaagaacaaactaatataaatgtttttaaaagttttagtgtttgggttttagtcatgctactagtttagtttttagcttcgtatttgaaaagctttttagatctcgctgcatttacatacagtacattcttaagatgtatgtggtaaataaagctttctttaaagcagtttcaagactttcttttcctttaaaaaataaaatcaggaagtttttgcaacagtggggggatggcacaaattcagtctttgcagttgggaaaatggccatgtggaaatgcagaggaaggcagttgcaatgttgaattatcgttcagtatcctcagaacttcagcccagcatttggatgcaagtgggacgtgacagagcctgtcactgcttccaatagtgacacgtgatgcttcccagtcagaaggagacctgaaggcagctgtgatgtcattgccagtgagttcacaaaatcactggctgacctccatgttgggcacagtatctaaagcaaaggcaggaggatttctgagttcgaggccagcctggtctacaaagtgagttccaggacagccagggctatgcagagaaaccctgtctcgaaaaaccgaaaaaaaaaagagagagtggggaggcaaagagcccctttatagtgagtctaacaggcatgactgttgccaggtaactgtggggcagagcctagacaaaatgccaacactcatcctatagggtttcaactcttttggccaaactctatctccaaaaatatttatactatgattcataacagtatcaaaattgcagttatgaagtagcaacaaacatactttggtggctgggggtcagccccacatgaggaactgtattaaaggatggcagcgttaagatggttgggagccactggatcacctcacaggatgctttctcctgtaacctgctctaactagtgccctggattgctggtttctagttcctcatgctactacccataggaaaaaatgatttctcagacacttcctctataagcaggcaagggttccacagaacagcttggctttctaatcagaatgcctccgggaacttccagctttgcctcttactggtcatttgaccttgaagaccaaaaccttccagtcatgtgatcttgaaaaactagggcatctgacctcaaggttataatggtttttaaaaaaatatttgtttatttatttatttaatgtacccatcactcctggggcacctgtacccccaggcttggacaggaagcagatctgctggcaatataccagatgatcaggggctgaggaaaccacttggtgaatcgggtgtggtggcgcacgcctttaatcccagcactcaggaggcagagtcaggtggatttctgagttccaggccagcctggtctacaaagtgagttccaggacagccagggctacacagagaaaccctgtctcgaaaaaccaaaacaaacaaacaaacaaacacttggtgttgctttcttgagagctttagtggtgttgcctctgaggaagaacaggagtgaggcctaccctcttcctcaaacactgaccagagatttcatcttgttcactgtaggaggaagctctgacaactatcacaaggaggttggggggcccagtaataaagtgggaagaactctaagttattccttctgcttcaggatttcagttttgtttgtttgttttagaggatttctgagttcaaggccagcctggtctacaaagtgagttccaggacagccaggcctatacagagaaacccaccccccccccacctccccaaaaaaagggtagcccttggaccaggcatggtgatacaggtatttaattccaatagtacgaggtcaatcgtcaatcaggttcaaggtcagcctggaatgtggtaagatcctgtcccactctgtgccacccttaccccctaaataaaactggatctatccacatggatgaacttgcaagagtgtcttgttacatggtacacctagctactctccttggaaggctgtgccccactggatgctttcaggcctcagtggaacattagccaaccctgaccttgcggaaactccttgtggagttttcaagcatgaccaaggctctgggagatcgctttgtgttccagactccaggctctgggatcttccatcctcctctctctggggtctacagcagttgcttgcacttgccagagcatcccccactgcacttggataggcatggcacagggatgcaggcctttgcagaggttccaagacatgacttaaacgaagaggacaaggaggatgaggaggagagttctgaggagaaccttgagacccccaggtttcctcggaaccatttcatgagttctccatcacacacttatgctcacacctggaagtagtaccagatcctgtatttgcaagaaataccaccttcccaagctaatctttagccacccttacttcttggcttgccctactttgtcaaaagaaaaaaaaaaaaatccttactgattaaccagccctgaggtttaaataggccttagtcattctgaggcaggaaggacgtgtctcaagcctaatggttcctgaaaggacagtactggagtttgccggggtcaggacatgttgaactctgggattatgataacataaggtcttgccagtttgctctggctgggacttttcttctcctctttcctgggacttgtattcaaactctggtggtaactaggaaaggagatggggtttgaaatgtaaatgaagaaaatatctaataaaaagaaaactggtggtaccatgagacaaagctaccattcccattgacttcaccaccctcatctctaacccagttcaaatctggccatttgacacctccttaattgtatataaagtgctatgctgacgtaatatacagagagagagaaagggagagagggattttggagatgaaatttaattctaaacatggtccagcctttacagaagagggacattgtctgaaagtaagatatatggacaaaaataaactatttagcataccttcccaccccttcaggacaattactcaaaggatcaggaggcttagtcaaggcctccccccgaacatttctttttcttgttccttctcccaccccgccccccctgtttggaataatgttaaaaatctgaagaaggcgacccacctgccaagcaatactcgttggttcacagtacctactgtgcctgtagaatacttacgtcaaacagtattttatatgaatgatttttttaactcttaaaaaaaaatgtccatctgtttgtgtgcgtgtgtccatctgcctgtctgtctgtctgtctgcacatgcaattgtcagcagacacctttcaggaattgtttcccccatgtaaatcaaaaccaaggtaagtcatcagacttagttccaagcactttgcttgccaaacaatctcactggtcctattaagaaataagaaatcgggctggtgagatggctcagcaggtaagagctcttccgaaggtcctgagttcaaatcccagcaaccacatggtggctcacaaccacccgtaacgagatctgatgcccttttctggagtgtctgaagacagctacagcgtacttacatataataaataaataaatcttaaaaaaaaagaaacaagaaatctagagattggagaactggctcagtgattaagagcattgactgctcttccagagaacctgggtttgatagacatacaggcacaatacccctacaacctaaaataagtttttaaaatccaaaatagtgtacatatcatatgtagcttcatgaattgccaaactaagcactcaggtaaaacatggattattccggctcatacctggcttcccctctggtcagtggcgaaatgctgtcctttccacaagaactcctttcatgggccaaggagtttactcgctatgacctcaaacctctgctactttcccaggtcacccctaacgcgtcatgcctggtcagtgaatttcatgatagctcaatgtgctggttacctttccatcgctgataaatccggagatcagaacaactgaagaaaagggggaggggccttattttgggtcacaagacatcaagatcttgaaggtgtggtgtcaagagtatgaaggagggctggagagatggctcagtggttaagagcactgacagttcttccagaggtcctgagttcaaatccctggaaccacaaggtggctcacaaccatctgaaatgggatctgatgtccttgtctggtgtgtctgaagacagcaacagtacagtcacattaaatagatagaaggagagattgatagatagatagatagatagatagatagatagatctttaaaaagaataaaaaagaaagaaagtatgagggaagtcagggagagagaagagagagagatctagaccctggctcaccaaatacctttgtatttggtccaggcccccaccttattgatggtaacactgtccatactctgggcaggtcccctcttcagttaaacctctctggaaatgccctcatgatacacctgggagtgtccatccatgtgattataaatgtagtcaaactgtcaatgaagattaacctgtcactgggcatccttgcttcatcatgtccctctgcccctgagaggatacctcacagcctgttggttttcctgtcctccatcttacattttcctgggtcctgcgtgttctgtaacaaagtgaagtaactctgtctattcttgggactcacttccctgtcgcgctgatctctgccctccaactcctctcaatctcctccatcagtaatactttagcttccattttttttattgaagtaaaattaacataaattttactgtttgagttgttttattagaagcacactattcagtcatttttatttattactccatagtattgtcatcatcatatatttccagaacatttttgtcatccatccccaaagaaaaccacacatccactaagcactcctagatcctctccacccatggctgctggtgcctgcttattcatgctctgtctgtatacacttgcctctcaggaccttcgcatcgtgtgcaagcatgtatggccagattctttcacttattggaggaggctctcagagttcgtctactgcatacgtccactacttcccttattgttatacctgaataatagtctattgtataacagctcattgtatttatctaacttgtggttggtagaagtctatattgcgtctactcttgtgaatactgttgctatcactattctggtacacgtttttatttaaacacatgtttttatttctgttggaaggcagtttgtggggtgacctgaaaatgctgtgtgtttgacttctaggaaactgatggcctgttttactaactagctgctccattttacatgggacagaaggcttctggtgtccccacctccttgccagtctttgttttctttttaattcttcccctgaatttagtcttcttagtggctagaaagtagcatctcgttgtgggtttgatctgcatctctctactaattgtagtggtttgaatatgcttgggccagggagcggcactgttaagagatatggccttgttggaggaggggtggtctttttggaggaggggaccctcctcctagctaagtgggagccaatctgctcctgggtttctttggatgaagatgtagaactctaagcttttcctgcaccatgcctgcctagagactgccatgctcctgccttgataacggactgaacctctgaacttataagccagctccaattaaatgttgtcccttataagagttgccatggtcgggctggtgagatggcttagcagataagagcactgactgctcttccgaaggtcctgagttcaaatcccagcaaccacatggtggctcacaaccacctgtaatgagatctgacacccttttatggtgtgtctgaagtcagctacagtgaacttatgtataataataaataaatcttaaaaaaaaaaaaagagttgccatggtcatggtgtctgctcatagcagtaaaaccctcactaagtcactaatgatgttccaggcaagccctgtaccatggagacataattcccagctcctttttgcatttggaatgttcttatacaattgttgacaattctgtactttggagatgtttgttcacatactttgtctttttttttttaagatttattttatttatatgagtacactgtagctgtcttcagtcgcaccagaagagggtgtcagatctcattacgggtggttgtgagtccaccgtatggttgctgagaactcaggacctctggaagagcagtcagtgctcttaaaccgctgagccatctcttcaactctcctttgtctatttttgattggattgtcttcttgatacatataaaagttatttacttttatctacctttacattctaattctctcctgtctctctatttaggagcctggttctcgtagagctcagactggcctccagtgaattctgcaggcaagcataaccttgaactctggtcctctgcccttcccttccaagctcaggggtgctgtaccaaagatgcaaaagtcatccataggctctggacagcaaacacacgtcagacccatgtactccctgtctcctgagctgtcattttacattcttttgtgacccacctccaccaccgcacgaaaggtttcagttttgatggcgtcatactgaacattcacgcccggctttaagattatattttactctaagagttttacactgttcaacttttacacctagatctttgatctgctgggtttcatttcatttttactgttatgcttacaaagcaaatggatcccaggaccttgcacatgctaaataagtcttagacacccgagccatattcctaggccttatttgaactactttttgcgtatggtgtgagatcaatgcctgctttagcctgttttctgttgcaaataatacagtatcacagactaggtaaattataaattagtttattttggctcacagttctggcccatggtgaaggagccaagcctccccatggccttcttgctggcagagtcccgggacaattggggcacccccaatgacaggaagttcacatgtctaggtctgtcctctggctttcttacaaagctaccaggtggggcgcaccataaggatcttatataaccctaatcacacctcaaacgccccacttcttcacagtgtgctgagattgagtttccacctcacaatacctcacgctggggattaaactcgagcctgtgctgctgccaggacggtaaacccagttcggacctcaggagggctcagcttcatccttggagcgatttcattgcgtgagcacattttgttgaagattatactccccctatacccctacaccgaatgctctcgttcctctttcctcagatggagggttcgctggcttttgcttagccctgtctttatcgccatggccttgatcaaaactccatccttttacagaactgcccctgtggagtgctctgcaagtccacatggaatttcagaacagctttctcacttcctgtggcaaaggctatgaagatttgcctaagcgtgcactgttgtgcccgttcaataaccccaaagaccaccgaggagcagtctccttagcgtctttttattccagcctcagcttgacagccaactctgacatcacaggacccgagggtggaagcctcgagcccagtttcaagcaagcatttatagaggcaagcaaacaagtcaagagggtttctagcccggcacacacacgattgggggactattatggaattttgttgccctttaaaattattggctggtgctgggagccaaaccttaaccttaacttctgctttcctcctgattggtggttgttaggaagtgaagtgccaggggcaggcctgttggggagtaacctggaaactctgctgcgcacaggcttattggttaactctagttcaaccataggtcaggttctctaagacgggagtccgaacccaaaatgaagttgatctggtctcgcctgctctacctgtagatcacactggtgaggcttgctatgctacgtagcaatatcaagggttgcctcctgtcagagctaaatgtctttgatacccaggttttcacggcagcactgtttagttaggttcagtcctaagtatttttatttcctgctgtggttaaaaatgtgattgtaaacttcagatttgaatcatccacccctaaggcggaggaacgcatctggtttctgtatgtttttagtgtccgtttaaagttcgatttatttgtcggcttactcaaaaaaaataaaaaataaaataaaaatggtgctgcaggctcaagcctttaatcccagcactgaggaggcagaggacggtggatctctgtgactttgaggctagcctggtctacaaagtgagtccaggatagcc

SEQ ID NO: 654 - DNA, 3139 bp, Mus musculus
gcgggatccgaccctgtgccgctccgcccgggccacagccgcaccgcagccggctcgtacgacccagctcagccggccgccgagcgcccggacccggagaagccaggctctgggccgggaagacgtttcttaccgcaggtcactcaggctaaaaaattgtgacaaactggaattcccagaacccgggaagagttaaagcctagagcgatctaatctgttgctttaagtcgcacggtgggaagtagtttggagactctttaatttagttttctatttaaaagtgtgcggccagcgaagatgttgtaggtgacttcctagccttgtagattgctaccgggctgtgaatggtattaatttctgaagtgagcgacgccaagtacttacggaagctcaggtaacacacaagttagaagaacagcttgtttcctgctacgcagccaccctcagcagttcccagctcactgaagttcggtttccaccagctgtggatgcctttgacattatgactgctgaagattccgccacagccatgaacagcgatccaacagtggggtcctccaccaaggtaccggagggtgtggcgggcgcgcccaatgaggctgcactgttggcactgatagagcgcaccggctacaccatggtacaagagaacgggcagcgcaagtacggtggacccccgcccggctgggagggcccgcatccccagcgtggctgtgaggtcttcgtgggcaagatcccacgtgacgtgtatgaagatgagctggtgcctgtgtttgagaccgtaggtcgcatctatgagctgcgactcatgatggatttcgatggcaagaaccgcggctatgccttcgtgatgtactgccacaagcatgaggccaagcgagccgttcgggaactcaacaactacgagatccgccccggccgtctgctgggtgtgtgctgtagtgtggacaactgccgcctcttcattggtggcatccccaagatgaagaagcgcggggagatcctggaggagatcgccaaggtcaccgagggcgtactcaacgtgattgtgtatgccagtgcggcagacaagatgaaaaaccgaggcttcgcctttgtggagtatgagagccatcgtgctgcagccatggcacgccgcaagctcatgccgggtcggatccaactgtggggccaccagattgctgtggactgggccgagccagagattgacgtggacgaagatgtgatgcagacagtgaagatcctctacgtgcgcaacctcatgatcgagaccaccgaggagaccatcaagaagagctttggccagttcaacccaggctgcgtggaaagggtcaagaagatccgtgactacgccttcgtgcacttcactagccgtgaggatgctgtgcatgctatgaacaacctcaacggcacagagctggagggatcctgcttagaagtcacgctggccaagcccgtggacaaggaacagtactcccgctaccagaaggcagccaagggtggtggtggctcggctgaggccgtagcgcagcaacccagctacgtgtactcctgtgacccctacacgttggcctactacggctacccctacaacgctctcatcgggcccaaccgggactacttcgtgaaaacaggcagcataagaggccgagggagaggcgcagctggaaacaggaccccagggcccaggggttcctacctcggaggatattccgctggccgtggtatatatagccgatatcacgaaggcaaaggcaaacagcaggagaaaggatatgaacttgtgccgaatttggagatctctcctgtcaatccagttgccattaaacctggcacagtggccatccctgccatcggtgctcagtactccatgttccaggcagccccagccccgaaaataatcgaagatggcaagatccacacaatggaacacatgatcagccccattgcgggccgtccaataactcctgtgtacaccgtggcaccaaatgttcagagaatccccaccgccggcatctacggggccagctacgtcccctttgctgctcccgccactgccacaatcgccacactacagaagaacgccgcggctgccgtgtatgggggctacgccggctacatacctcaggccttccccgctgctctccaggtgcccatccacgacgtctaccagacttactgagaacgggggaccggagccaaggcaagccaccaaaccccgctgaaggaacactttattatttatgaagaaagaacgtgtcgggttggtacacgtgcaaaacctgcaggtgaagaagaatgttatcaaatagcacactgaaatattttattatatccatgaagttttcactcgcttttttttttttttttttttttttgaaaatgacttttcaacttagcaggcccgcgttcatacatttctaaaagacttgcgacgcctcacgccttaatgccatctcttaaagtttgtatgctcttctgcttttgtacagaggtttggttttttgttttttaaggatatattttcagtatgaaggttattttcttaacttctgcactccagagttttctattttgtagaacctttcaaagtatatcagctatatgtatgtatatcaaaaaaaaaaaaaaaaaaaagcacacccgcgcatctagggaactattttgaaaactatattcaatatttaaagacacaaactgtagtgctctgaaatactacataaaacattattttattttttaaagtgatgctggaaagtgcaattttaaaatgaggaaaaaaaaagtctctactgtatttccactggcattaagggttgacgataatgccatttattcttgtcatgttttctgggtttatggggttttggtttggtttggggtttttgttgttgttgttgttttgttttgtttttaataacactctgttcttaagccaacatggaaaagactcctcacatccagagtcccaacactggaaagctctgacctgccctcactaccttgggctctctctcctgagtccttagtaactgtgccccgcccccgccccgccgtgccccgccccgcccttctccttccctagctccagtgcaactttggcatatctaagaaaaatggataattccaatagagaaga

SEQ ID NO: 655 - protein, 602 aa, Mus musculus
SRQVLTEAQVTHKLEEQLVSCYAATLSSSQLTEVRFPPAVDAFDIMTAEDSATAMNSDPTVGSSTKVPEGVAGAPNEAALLALIERTGYTMVQENGQRKYGGPPPGWEGPHPQRGCEVFVGKIPRDVYEDELVPVFETVGRIYELRLMMDFDGKNRGYAFVMYCHKHEAKRAVRELNNYEIRPGRLLGVCCSVDNCRLFIGGIPKMKKRGEIEIAKVTEGVLNVIVYASAADKMKNRGFAFVEYESHRAAAMARRKLMPGRIQLWGHQIAVDWAEPEIDVDEDVMQTVKILYVRNLMIETTEETIKKSFGQFNPGCVERVKKIRDYAFVHFTSREDAVHAMNNLNGTELEGSCLEVTLAKPVDKEQYSRYQKAAKGGGGSAEAVAQQPSYVYSCDPYTLAYYGYPYNALIGPNRDYFVKTGSIRGRGRGAAGNRTPGPRGSYLGGYSAGRGIYSRYHEGKGKQQEKGYELVPNLEISPVNPVAIKPGTVAIPAIGAQYSMFQAAPAPKIIEDGKIHTMEHMISPIAGRPITPVYTVAPNVQRIPTAGIYGASYVPFAAPATATIATLQKNAAAAVYGGYAGYIPQAFPAALQVPIHDVYQTY

SEQ ID NO: 656 - DNA, 112241 bp, Homo sapiens
  misc_feature (1)...(112241): n = A,T,C or G
gatgggcagctaaagggactgaaatgaagaggcaagagccaaacttcaggccctagagcagggctgggccagtatctgaattctgatagcagcactgccaggccagccccagggcaaatgcaaagttgattggtttttcttaagaactcttacttttctttctgatgctcactgccaggtgtccaagggccctggagcttcccaaatctcctttctacttaagcctattccctaggtttttaccaagccttggcttttaaaatgcccctcttcttagttaccaaaaaactccagtttttgcattttttcccctatttatcctttttttccccttcctctctttgtcccattctttcctctaggctattttcgaagttctttcgcccctggcttctgtatacacaactgcctttagaataatccagtgtgcctcaccttaataaaaatccagatttacaaaacaaaaattgtttgaaaggtgaatgtttttgttaaagaaatctggccaatatgaaagaccagcatctctttttttatgtttatcactttgtttgtgacagtctcactctgtgatctgcaaccctgcctcctgggttcaagcgattctcgtgcctcagcttcccaagtagctgggactacaggtgtgctaatagtcgtattttgtactaataaaatagctggctaattttcgtatttttagtagagacagggtttcgccatgttggccaggctggtttcaaactcctggcctcaagcaatctgcgcaccttggcctcccaaagtgctgggattacagacctgagccatcatgcctggccatgtttatcactttctacatttcattatagcaagcggtaactaggggaggtcccctagttgggtgcaagcagattcatttttgtatttgcaaatcatgtaacacagtgaaattcatagccttacccccatactggatcataaaaatattttactttccctattttgtttactatcaagcctgagctcattaaatatatccagtggcctggatcaggatcatgtgaaaaacaggaccttggcttgcttacaacgtttgcatttgttttggttggtacagattcatttggataaattcccagcttattctcaaagaagattctagcgcagtaccgggctcccagtggcttttcattcatagtaatgagcattagccgagcgtggtgacgtgcgcctgtagtcctagctactcaggaggctgaagcaggaggattgcttgagcccaggaggtcaaggctgcagtgagctgagcggtgtctgtgcaccattgctgcattctagaattcccagcccagaactatgctgttgtcatgcctaggaaagcatccatgagaaaatccttttctgagtccgaatgccaattccagttctggttagaattccttgacacacacggcacttccagccttggttttcacggttgctgtgatagcagaacacacagctgtgaaacagagagaagatgagcaacagaaatggatgtgctaaaatgtgagatgaaaatatgcagaaaagccaaccatctttagaaatctcatttattcagggttcagtgtaagcctaataggtacaagctgagattttggagtctggtgggttccagtcttgctttccaccaataattagcttcacttgacttctttgggtttccgtttcctcatttgtatgagaaaatagggatcatgagagtacttgccacatgagatttggcaggaggttgtatatgtcgagaatttagcactgtgtctagtacacagcaggtgcttaataaatgtttgtattagtgttttagcacatgtgggagggacatagccgagtgcagtgtttctcaaattttggggactctggacatcttcacagacagataagatacagggcactcaattggctgtaacttcagataaacagtaaataatttattagtacaagtatttcccaaacattgtatggaacatatatgaaaatattcatttcttatctgaaattcaagtttaattgggcaccctgaagttttatttgcgaaatcagacaaccctgttttcctttccttttcttttcctctttttttttttttgagacagggctcactctgtcacccaagctggagtgcagtggcgcgattactgctcactgccgcttcaacctcccaggctcaggtaatcctcccacctcagcttccaaagtagctgggaccacaggtgcatgccactatgcctgactaatttttggtattttttgtagagacaaggtttcaccacgtcaccctggctgattttttttttttcctagatggagttttgctcttggcgcccaggctggagtgcaatgggcgtgatctcagctcactgcaacctctgcctcctgggttcaagcaattctcctgcctcagtctcccgagtagctaggattacaggtgcctgccaccatgcccagctaatttttgtatttttggtagagacagggtttcaccatgttggccgggttggtctccaactactaacctcaggctatctgcccgtcttggcctccnnnnnnnnnnnnnnnnnnnnnnnnnnnnnnnnnnnnnnnnnnnnnnnnnnnnnnnnnnnnnnnnnnnnnnnnnnnnnnnnnnnnnnnnnnnnnnnnnnnnnnnnnnnnnnnnnnnnnnnnnnnnnnnnnnnnnnnnnnnnnnnnnnnnnnnnnnnnnnnnnnnnnnnnnnnnnnnnnnnnnnnnnnnnnnnnnnnnnnnnnnnnnnnnnnnnnnnnnnnnnnnnnnnnnnnnnnnnnnnnnnnnnnnnnnnnnnnnnnnnnnnnnnnnnnnnnnnnnnnnnnnnnnnnnnnnnnnnnnnnnnnnnnnnnnnnnnnnnnnnnnnnnnnnnnnnnnnnnnnnnnnnnnnnnnnnnnnntcatacccactgcacccccagcctgggtgagtgagactctgtgtaaaaaaaaaaaaaaaaaaaaagatttttgagaaatgcaaagtgcttttaaagtgcttttatttgggttctatatattgatatttactgcattagaaattaaaattaagaaaaatattaatttcctttaacaagaataatagtaagctcattttttatgaaaatgttttcatgaaaaataattatatttccaaaaaaagtagataaagagaagatcatgtcgtttatattttttcaaatctctttgatgattgtcttgatagaagtcagctgtatgctcatatttgcttctgcttcaatctattgaggtatgtcattttcactgaaattctatagggaaagaaaattcaacctcacaaagatatgcaattggaaaagggaggaatattatagtagaatttttggattattgtgaacattcttctttgatactaaacccaaactctacaagaggtagtttttgttttgttttgttttgttttgtttgagatggagtcttgctctgttgcccaggctggaatgcagtggcacaatctcagttcactgcaccctctgcctcccaggttcaagagattctcctgcctcagcctcccgagtatctgggattacaggcgcctgccaccacgccgggctaatttttgtatttttagtagaaacagggcttcaccatgttggaaaggctggtctcgaactcctgacctcaggtgatctgccagccttggcctcccaaagctctaggattacaggcgtgagccactgcacccagccaagaggtagtttcttaaaggttagttgcagcagaatctgaaaccataaaaaggaaattttcatgctctgttacattaaaattggttggcccatcttgaactttgaatggactgcttacccatgcatgattctgtaacatcatggttggttatttggaaaatattggttcactgaattgtgaagatcttccaaatattgaaacatttcagtatgtatttttaaaaatccacatttgttaatgtcatagctgatctcatgagaaaagcctttaatcactgacaagcagtcaagcttgtggtgataaatgcaggttgcccccaaattttttcttcctttttttgtattttttaaaattatttttcttctccttgcacagcagagctaactcataggcagtacacccagagttagccaggttcccccatatttaacttttgcttgaaagcttgaatttgatcattggaaatcaatactgtctgttgtgttctttgaagtgccagggtcacttcattcattttctagaaaaggtctgccaaatattcaagtctaaataatcatagtttgttttatcaagtaatgtagcctgtgactctcaagtgatttttccttgagacagcaatcataatttggtatacagtagaagtgctttatcatactttctgtttcatcgcacagaatatttttaaaacatctacttgaattgagacttaataaaataaataggctggatgtggtggctcatgcctgtaatcccagcactttgggagtctgaggcaggtggatcacctgaggtcaggagttcaagaccagcctggccaacatggtgaaaccccatctctactaaaaatacaaaaattagctggatgttatggcaggtgcctgtaatcccagctacttgggaggctgaggcaggagaatcacttgaacccaggaagtggaggtttcagtgagcctagattgtgccactgcactccagcctgggcaacaagcagactctgtctcaaacaacagcaacaaaaaaattaaaattaaaaaatttaaaacattttaaaaagaaataaaaaataaaataaaattaatactgtgttaccaaatacattcttaaggaaaattggctttaaaaaaaggtagaacaacttcaaatgcctggtggtaaaaaaatgccacaattactagtatactttggtggcactgcctctcacacggctagaagttttagccaccattgcctttttatcactagtccgtgtcaatgccgtgtaaaagggaaatatgttagtatttttaagaaccgtggagcctctcagcattccagggacctcactttgagaactgctggtctagcggttgatgtccccatgataggcagcaccggacagtgtagactgatctcccctctcctattgcagcccctccttccttgggcagtttgggaaagcaccaagagcccctgggccctttcttacacatctgttgaggttggctaggtgatgagcagtttctgaggtcacattcatggtactctttgaagtcctctaaaggggtttgagtatgattcatgggcattcctaaacctttggaagattccggaagatttagaagctccagattaaatctctacctctcctttctcctctactatttcctagtgtccaagggagctcaaaacccctttcagaagctgaaactattctgcaggccaaatatatactagcctcaaagatattcaggctagacatgggcccctacagctgaaagatgctttggaataggcctggggcgatagagcagcactccccagagacacattattctgccctattgcagctctgcagttgaaaattctaggggtatacctgcatgctggcataccaaaaccaatagagaaaaaactccacttagaatcacatggctggaggtggaaaatgctattataaaacatttctattgcacagaaggcacagtcctttctcagggacacataatttagtctctgagcagcatgagacttttatgtgccaagtgccgtatagaacacggggaattctaatacaacctacagggtttaaagtcaaatgacaaatttgtgatcacagaaaaaaaagaacataaaaggcttacccaaagtgggagaagccatattttttggttggattttatggtcaaaggagggcttcaatatgaaatagagttcatcagtagatttcaaagtgagcagtagagatgatcttaattagggataagagggtagggtgggctgggcacggtggcttatgcctgtaatcccagcactttgggaggccaaggcaggtggatcatgaagtcaagagatcgagaccatcctggccaacatggtgaaaccccgtctctactaaaaatacaaaaattagctgggcatggtggcgggcgcctgttgtcccatctactcgggaggcttaggcaggagaattgcttgaacctgggagatggaggttgcagtgagccaagattgagccactatactccagcctgggcaacaatagcgagactccgtctcaaaaaaaaaaaaaaaaaaaaaaaaaaaggagggtagggtagagggaagtgggagaggagggtgaggagaccaaggtaaaggattgaaggatgctgggtgtggtggctcacacctgtaatctcagcactttgggaggccgaggtgggcagatcacctgaggttgggagttcgagaccagcctgaccaacatgcagaaaccccatctctactaaaaatacaaaattagccgggtgtggtggtgcacacctgtaatcccagctactctggaggctgaggcaggagattcgcttgaacccgggaggcagagattgcagtgagccaagatcgttccattgcactccagcctgggcaacaagagtgaaactccatctcaaaaaaaaaaaaaaaaagattgaaggagaaaaacagttgaactggttctggtcagaggttggcagaaaatacatgcaagtgatttttattttttattttttttaaggacaagatctcactctgttacccagggcagagtacagtggtgtgatcttggctcactgtagcctcaactacagtgaggagtcccggcccaagcaatcctcccacctcagcctcccaagtagcttggaccacaggcgcatgccaccatgcctggatcattttttatatttttttttttatagaaacaagggtctcactatgttgcctaggctggtcttaaactctgggctcaagtgatcctcctgcctgggactcccagagtgctgggactaccggtgtgagccaccactcctgggctggatcttgatttagaccaggcttgtccaacctgtggcatgtccaggatggctttgaatgtggcccaacacaaattcataagcttcctttgggatttttttttttttaaagctcataagctatcattagtatcagtgtattttatgtgtggcccaagacaattcttcttccagtgtgacccagggaagccaaaagattggacacccctgattgggcagtagggtgtgtaggctacagtgtgcatgtgcatgagagtgtgactcaggcaaagagaagggctccaactgggacccgctgaggttctcagatctgtcattattagctgtgtatccttgggcagcctctctgagtctgtcctctcatctgtctgtttaattaaatgaggtgtcatatatcaaatacttgattattgtaggcacttgagatgcaatgtttgcagctgggcgtggttgctcacgcctgtagtcccagcactttgggaggccgaggcaggtggatcacttgagctcaggagttcgagaccagcctgaccaacacggtgaaaccccatctctaaaaaaatagcaaaattagccgggtgtggtggtgtgtgcctgtagtcccagctactcaggaggctgaggcaggagaattgcttgaacccgggaggtggagattacagtgagccatgatgccatgatggcaccactgcactccaacatgggtgacagagtgagacttcatctcaaaaaaaaaaaaaaaaaaaaaaaaaagaaaagaaaagaaacaatgcttgttttgtggtgtgatttgatggctatcttattggctatctggacttcataatcccattttctcatcctcattgaaatacaaaataaataaataaataaaagcaaagcaactaccttaaaaccccaaattctggcatttgtttatatagtgatccttctgtatccatggggaattggttgcaggccccccagattttggatgctcgagtcctctatataaaatggtgcagtatttgcatatgacctacacatatcttcccatatactttgagtcatctctagatgacttagaatacctaatccaatggaaatgctagtaagtagttgttatgctgtattgtttagggaataatgacaagaaaaagaagtctatgtgtttagtacagacacagccgtccttttcacatttttacatttttaattttttgtgggcacatagtagtatatatatttatggggtacatgagatttttgaatattcttgatctgtggttggttgacttcagggatgcggaacccacagacactgagggctgactgtacgtagaatatatgcctttgaaacactgttttggattcagattttgtgtcttcaaacttttttttatcaaaatttaagtatatttctgaacagtaaggcattggactccatgccagggggtgcagaggtgagtgttctggtgatctagaaaggagttgagggtcgggcacagtggcttatgcctgtaatcccagcactttgggaggccgaagcgggtggatcatttgagatcaggaattcaagaccagcctgaccaacatggtgaaaccctgtctctactaaaactacaaagaaattagccaggtgtggtggtgcatgactataatcccagctacgcaggaggctggggcaggagaatctcttgaatctgggaggtggaggttgcagtgagctgagattgtgccactgcactccagcctgggcaagagggcgagactccatgaaaaaagaaagaaggaaggaaggaaggagggaaggaaggaaggtggggagggagggagggatggcatttgaggacacgcaaataccctaatgcagagtggaatgagacaggtgacccaagaggggtgctcatgggaaagacttctgtgataggagtaattaatccctagcatgcaggggatttactcctcttgggtttgcataaagaagggcacgcaagggacaagaggtcaagtgagataaaccctaacattagaataaggggctggcccgtgctgagggaggaaggaagatgaggagagggatctgagaggaaactatgccacaggtggcggggagagcaggttagaccaggtggggccttacggctctgagaggaggtgcttttggaggtcagtggcttaagggaaatcctgggctgtcaggaaaggccacctcagcccctggcctgtcagcaatggctcagtgaccttgggctgtttttggatctttctgcatctctgaatctcgagaataataataatacctgtgtaaaccatgcactgggttgtgtgatatgtcacataaaatagtagaaggagaaatagaatgatgagggccaggcatggtggctcatgcctgtaatcccagcactttgggaggccaaggcgggcggatcacctgaagtcaggagttcgagaccagcctggccaacatggtgaaaccctgtctctactaaaaatacaaaaattagccaggcatggtgtcaggtgcctgtaatcccagctacttgggaggctggggcaggagaatcgcttgaacttgggagcggaggttgcagtgagccgagattgtgccactgcactccagcctgggtgacagagcgagaatccgtctcaaaaaaaaaaaaaaaaagaaagaaaagaaaaagagaatcatcgccctcccccaacacccattatgttcctctcagggaagcaaggcaagaaaggagagaggaagagagggaaaaaagagaaaaagggaggcccggatgaggcgttaggaggcgggtcagctcactgtgatagagggcaagacgagaaatgttgtgaaagcaaaaggagctgacaggcagggctggggggcggggaggccctgttgccacgccccgggcaggcagataaaacggtcatttatggtacccaccctaacagattagtcagtcagacccaggaggagtgaggtcaattgccctttagtcccaggactaaccggaagcttctgcaacaggaggacattgaaaataagatggaacccatccacataaggtaggagaccaaaaaatgacaacaacccttctgacattttaaaactgtcaagaactgctctgtgccattttctaggctcctggagctggagagctgtcagttcttggaaataacttctgtgtttctagacatttgtactttatagatgaggagacgggctcagggaggttaagttactccctcaaggtcacacagctggagtgtagaaaacacatgatctcaattctaggttcagttttgttttgctttgttttgtttccaccccagcagatattttaaaggtaggaaatgcaaaattctgagcactctcttggggattggaggagtgggtggggacagagaatgggttatcttatttgcctatcctgcctgtgggtgtgattctgcaaccaaagccaattctggcttcttctctagacggtcttggtctctttttagcgagtgggcttgactgtagctaagtaattctgctttttcatgtcttagatgtcccactcagtcctccagtagccgatgagtgcgtgctgcttgcatgggcccaagactctagcaatctctataggtagtttctgtaaaaccaggcagatagatcatccctgggcaccctctctttatctcattaaccctggtggtaccaggaggcacctgacattctaatagtttggtgccagcaagtttctgttatccttcagttgtaattgttaacttgaatggaatgcaaaacttctggtttggagcagagttgggtcttaactgtgaataacttgaaggatatggaaaatgggaagtacctttggttattgtggaggatggtttatgagcactttttgagttgcattttctctgataaataggaatatgtggtcaatgtggagatgctactgcgtctacatattcgccggtgaactccaccctttattaactcttgcctttgacagtttttcagctcagcaagccaagacttgtttgaggattagaacaatgagcttatcgttatgccacctttaaaaaaatcgctctaacgcttccagcgtcaaggtttatttctatgagcctttccggcaactccgcccccaccacctgaaagtttgacattgctttcccccttaaggggaagtgtggaaatagagcctgcttgttcattttcattattgtacattacatgatatcttttcgaccattatattgtgttccctcagtggtgtttgctctgagggtgggacacaagcctgtttagtgtctcgtaaaacatttaccaaaagcactgagccatggtttttgaagggcattccgttgccagagtgtgggaggagagagcaagcagggaaagagagcgccaggtgcttagcaggtacgtgcttcctactttagtatattcatattaaaaatttcaaattgcatacgatttgggttcccttctgcggaaggggcagggatggtgaggggaagacgggggcaaaagggatttctttgcaaactctattttttagtggctcggagtccccggataattgtaatctttagcttccatcaaatgctgtttttggttttgctagagggacatgtgtgtaatggagagtaagtggaaaacctacttgtgcttgagattttacagtgggctgaatcagaatcctttagcaaagagttcagaaccaggtcctgtgtttctgggaggcaatgtgtaaccttgcgatttgcacttctgtgagctcgggaattcattccatttaaaggttttgctaaatggtggttctggtttcatgaaaatacttttaaactttctccccccaccccacccccaattctgttaaatttagacaagataacagcaaattaaaggtcaggttaggctgggtgcggtggctcacacctgtaacctcagcactttggaaggccgaggtgggtggatcacttgaggtcaggagttcgagacgagcctggccaacaaggtgaaaccccatctctaccaaaaatacaaaaattagccgggcatggtggtgtgcgccggtagtcccagctactcaggaggctgaggcaggagaatcgcttgaaccccggaggcagaggttgcagtgagccaagattgtgccactgcactccagcctgggtgacaagagcgaaactccgtctccaaaaaagaaaaaaaaaaaaagtcagtttaaaacggcctcttatcctcaaatctgtgtttttgaaacagaccagcttgagaccgactttttctatactggtcatggtttaggagaaactaatgaataaatacttcttgggaatactaagtctttataatctagcttttttgggtgggtagaaaatataataaagctacagccttaatcaaatgtttatgtatgatcaattgtaataatgatatgccacacacagatagcagtaactgtgttattaatagttaaaactcaaacagttataggaaaatctaggaaaaaaaatagttccaacagatttctacaattgccagttcttggggaaaagtgttgcagtataaaacgggcaatataacaagggtgtgggatctttggcctgtacaaggacagtactaagttgaagagctcaccaattatgaaagaacatgatttgggtatatttttgcccaatgacgcttgcagtaagaagccaagggttttttcttctgagaagtggccagtcatttgaaaacggctggaagaaatgattgtttcaaaattggaagacatttcctccacaggacaaacttcgctgtggctttgtatattcaggcaaataggaagaaatctaacaattgtagaggttaaagaccttgagttccctggaagcatggcaggtttaatatctttttatatgcatatcggaaaattgagtttagcagaaagtcatttcactactctgaccactgcaagtttatgtaacttttgacaagtggattaatgttttcctatgtctcttttaagattttgatacttactgtatctaattgcctgttacacaggtgcacttagattgcttgagtctatcaagtagggaaagagagccataccatgtgaatccaaaatagaaaccctgaccagtgaaataattcatgcattaaaagcacactttttcttttcttttctttccttttttttcttttctttctttcttttttttttttttttgagatgaagtctcactctgtcacccaggctggagtgcagtggcacaatctcggctcactgcaacctctgcctccggggttcaagtgattctcccacctcagcctcccaagtagctgggattactggcagccaccatcatctccagctaatttttgtatttttgtagagacagggtttcaccattttggccaagctggtcttgaactcctgacctcaagtgatccactcgcctcggcctcccaaagtgctgggattacaggcgtaagccaccgcacccggcctttttttttttttttttttgagatggagtttcgttctgtcacccaggctggaatgcagtggcgcaatctcggctctctgcaacctccacctcccaggttcaagagattctcctgcctcagcctcccaagtagctgggcgcccaccatcatgcccggctaattttttgtatttttagtagagaaggggtttcattatgttggccagactggtcttgaactcctgacctcaggtgatccacctgccttggcctcccaaagtgttgggattagaggtgtgagccaccgcgcctggcaataccacactttctaaagtagattgagcctgtgttgagtctgaaattttatcaaaggaacagaaagactctggggaaaaatctaaaaacaaaccatttctagacacttgtcattccttgtttccctttatttcactaggaaaatccatattcggtacaatctttttgtttagtttttcttttttcttttcttttttttttttttgagacagagtcttactgtgtcccccaggctggagtgcagtggcacaatcttggctcactgtaacctgtgcctcccaggttcaggcgattctcctgcctcagcctccccagtagctggggctataggcgcctgccaccacgcccggctaatttttgtatttttagtagagatggggtttcaccatctcctgacctcaactgatctgcccacctcggcctcccgaagtgctgagattacaggcttgagcccctgtgcccagcccgatttagtatttccatgaggaattgtaagaaactaagatcaacaaaggctacgttggatcctcctgttaggggttcttatggtttcatgatagtttattgacagatctagtcatgcatcacattaagtcctgaataacttggcccacgtttctggcattttagactctgctgctattaaacgtgatatgataataatgcttctatgtcaggttggctgtattaggcatataattgagtaacgtctctacaagcgttcttgtttgttatctgctccttccatcctttagactgcaagttcttcttgatttgtaaaatgtcatgaggctgaaatttctggggacaataataggacccaaatgaaaaggcatttcacaacatgccataatgcctaagaggcaggcctgctgtcttttctgaacagagctgtatggctttgttaaggaacaggtaggtgacaacctttcaaggtgattctggcggctgtgccagaaaagtcacatgcgtaggagctcggagtcagaactacacgggcaacttggaggaaccttcagacacttgggccatatgtggctggttttgctttttgcaggatgaagtaaaaactgaatgcgtataggttagcccagtgataatgaaaaatccttcagttgtctagcaactcaagatcttaagtaaggcaataaaacagcccccacagcagccaaaattaatgccataaattctattagtacctcactcagtgcctgttgactctttgtatttttcagtagagacagggtttcatgttggccagtctggtctcaaacccctgacctcaaatgatccacccgtctcagcctcccaaagtgttgggattacaggtgtgagccatcatgcccgtccccctattgactcttagtttagacatctttcaataacatttctggttcctcagtgcataataaatcacgactctttcttttctcctttctacttggctgatgaccattcaagcaagcattcacacatggactcattcattcagtcagtacttactaatggctcactctgggatagggtctcatctcacagttcttgaatgtcacctcttcaaggtgaccttcccaggtcccctaaaggaggtcctctaattttgctctgaaaatacacattgtatttgttttatgcttgcctcttttgctaaaatattaagttcccttaggtcatggatcacaagtgtctaacttgctactgtatctctagctcttagcatatcccacgtgttcaaaaatatgtaccagatatatgaataaatgaatgaaaggaaacaaatgagaaggacagggatgattacaggcaggcagacaatggtgagaaatagggcatataacaaaggggtaaaactgctgccatccaatccagaagcaatggtccccgaagctattgccccatctcagctgagctctaccatgtaagtttctttacttttttttttttttttttttgagatggagtttcactcttgttgcccaggctggagtgcaatggcgctatcttggctaattgcagcctccgcctcctaggttcaagcagttctccttcctcagcctcctaagtagctgggattacaggcatgtgccatcatgcctggctaattttgtatttttagtagagacagggttttaccatgttggtcaagctggtcttgaactcctgacctcaagtgacccaccccccctcagcctcccaaagtgctgggattacaggcgtgagccactgcacctggccagtttctttactttttttttttgagacggagtctcactctgtcgcccaggctggagtgcagtggcgcaatctccgctcactgcaagctccgcctcccgggctcacaccattctgcctcagcctccgcagtagctaggactacaggcgcccgccaccacgcctggagaatttttttttttgtatttttagtggagacggggtttcaccgtgttggccaggatggtctcgatctcctgacctcgtgatccacctgccttggcctcccaaagtgctgggattacaggcgtaagccaccgcgcccggcccagtttctttactttttaaaaattttatagagacagggtctcactatgttgcccagactggtctcaaattcctgggctcaagtaattctcccacctagaccacccaaactgttgggattaaaggcatgagccaatacaggtcaccaacatgtaaatttctatggataaccttggttcaccaagaagaatgtgctttggagcctctttaaaatgatagtgagggtacaaatcattttagaaatatttttacccaagaaagtaatagtgtgtttgcttacatgagtaaattcagttatttggaaaatatcctatacaagtgatgtctacaattatgaagcaccagtgaatgaatttatcattcagagaaaatattaaatcaaataactactttgaaaaaaatatattattattatttatttatttatttatttatttattttgagatggaggctcactctgttgcccaggctggagtgcagtggcacaatctcggctcactacaacctcagcttcccagattcaagcaattctcctgcttcagcctcccaagtagctgggctacaggcacgcgccaccacacctggctaatttttgtatttttagtagagacagggtttcaccatgttggccaggctggtctcgaactcctgacctcaggtgatccgcccaccttggcctaccaaagtgctgggattacaggcgtgagccactgcgcctggccgaaaacatattattttaaatattcattgaagtgtataacataaaggcagtaaactgcacgactgttaggtacacagcttgatgaatttttatatgtgtatgtacctgtggaaccaccacccagattaaggcacaaaatattttcagcatctcagtatcgtcgtgcctctcctcccattatcccctcaacccaaggtaaccaccattctgacttgtatcaccatagattacctttggctattcttacttcattaagatggaatcagacagtatgtactcttttgtatctggcctctcactcaaccctttatcggtgacgctcatccacatagtttcatgtagttataatttatcctgttgttgctgcatagtattcctttgtaagaacagaccacaacgcagagcattttcaggaattaaaaacatgactatatgagctgaaaatcattccctatctgtgccagctctttaaagttaagtgatatcttaaggtgggatggaaatattatgacctgaaagggtggaaggaaagaggtctgtttctgggagtgtatttgctaagtgctctatgttggctgtttaactgcagtaattaccctagaaggtgactgctgctgttttgtacatgaggaaactaagcatcagaaaagttttatgactttacagtgaggctgaacaaaacgtgaaaattgttagttacaccagagggcagtcccgtcctggcaaagacaatgccagaacgctgttgaggctccgccacctccgatttctgaggctcaggttttacgtactgcagacttttcttttctttttgagatgggatttcgctcttgttgcccaggctggggtgcagtggggtgatctcggctcaccgcaacctccgcctcccgggttgaagctattctcctgcctcagcctcccaagtagctgggattacaggcatgcgccaccacgcctggctaatttgcagacttttctatcttctgttggagagctggccagccatctgacttttttacttaggtcattttgtctctttttcccttcaaatttgttttgttttaaaaataagacttgctctggactttttttttgagatggagtctcactctgtcgcccaggctggaatgaagtggcgcgatctcgggtcactgcaacctccgcctcccaggttcaagtaattccttgcctcagcctcccaagtagctgggattacaggtgcacgccaccacgcccggctaatttttgtatttttagtagagacggggtttcaccatcttggccaggctggtcttgaattcctgacttcatgatccatccgcctcggcctcccaaagtgttgggattacaggcgtgagccaccgcgcccagccgtaactctggaattttaaatttttgcttatgaatacttgttattttcagacacacatggtattaatatattcaaaaactttcatttagcaatttttgaatttttttttaagatcaggttttagtgtgtatacataaggaaatatttaatcatcataagaaagttaggtgaatttcaagtgagaattactgagaagtttcctgggagtcaataatcatgtattttaaagtggagtttatggacgtgcttaaggccaggtgtagtggcttatgcctgtaatcccagccacttttggaaggcgggnnnnnnnnnnnnnnnnnnnnnnnnnnnnnnnnnnnnnnnnnnnnnnnnnnnnnnnnnnnnnnnnnnnnnnnnnnnnnnnnnnnnnnnnnnnnnnnnnnnnnnnnnnnnnnnnnnnnnnnnnnnnnnnnnnnnnnnnnnnnnnnnnnnnnnnnnnnnnnnnnnnnnnnnnnnnnnnnnnnnnnnnnnnnnnnnnnnnnnnnnnnnnnnnnnnnnnnnnnnnnnnnnnnnnnnnnnnnnnnnnnnnnnnnnnnnnnnnnnnnnnnnnnnnnnnnnnnnnnnnnnnnnnnnnnnnnnnnnnnnnnnnnnnnnnnnnnnnnnnnnnnnnnnnnnnnnnnnnnnnnnnnnnnnnnnnnnnnnnnnnnnnnnnnnnnnnnnnnnnnnnnnnnnnnnnnnnnnnnnnnnnnnnnnnnnnnnnnnnnnnnnnnnnnnnnnnnnnnnnnnnnnnnnnnnnnnnnnnnnnnnnnnnnnnnnnnnnnnnnnnnnnnnnnnnnnnnnnnnnnnnnnnnnnnnnnnnnnnnnaggttgcagcgagccaagatcgcaccgctgcactccagcctgggcgacagagcagaatctgtgtttttggtagagatggggtttcaccatattggccaggctggtctcgaacttttgacctcaagtgattcgcctgccacagcctcccaaagtgctgggattataggcatgagccaccacgcctgaccaagatttttttgaaggaaaattggagagaggcgttcaagccactgcttgtttggctccatctgaatcattcttttcctccaataaagagcaaagtatttaggtaacataagaagtagaatcaactggtttctagcacccaaggtaggtacaaatgtccctggcactcaggatggtctcagagacactgagtcagccagaaggtaacttggaagccagttgagtacaaaagccattgccacaaggttgacctcatgctggtcttgtcctgtgtaacagaatgaaagagccagtcaacagcggagccctctgcccttcccagtgcagtggctttctctgtatagaacttttaccttttccacaaagattccaaccatgggtgtttattgttgggattaattgagataatttgcagtatattaaagtatctggcacatcatgggtgtctaggagatctcagtttgccttccctttgaacaggattccttggagggaaatttgcatacatgaacggaaccggactcttacttaatagtgaattcaagacattgaacattgtcccaggtggcattttttcccttgaggattgtgaaacatttaaattagccattgtttaagtaagcaccgttgctgtcaatcacaaatgcaaacctggacttggagtagaaacaaaacaaagacttttattctgcttttccaataaaatggcttcttactataaagccataataaatacctactgtttcattttttagtaagagtattagagcaatttgtctgtaccatcactgctgttgtttgatagtagataggtcagagaaagatcatataatgaaggttacagctcactgcccacccaacccccaatgaagattgacttgtcatatgataagggctttatttgctgcataaaatgacaagtaagtttttttgttttttgttttgttttgttttgttttttttgagacagactctcgctctgtcacccaggctgcagtggtgtggtctcggctcactgcaacgtctgcttcctgggttcaagtgattctcgtgtctcagccttctgagtagctggggactacaggcgcacaccaccataaccagctatttttttttttgtatttttagtagagatggagtttcactatgttggctaggctagtctcgaactcctgacctcgtgatctacccgcctcggcctcccaaagtgctgggattacaggtgtgagccaccgcgtccagccaaaatatatatgtttttaaattctaggaaataacgttgatttggatatagaaaaattaaataccagggaatgctggcttataaattttagtccagcatcttttttttttttacacttttttttttttttttagatgaagtcttactgtgtcacccaggctggagtgcgatggcacaatctcgcctcactgggttcaagtgattccccagcctcagcttcccaagtagctgggaacacaggcacataccaccatgcctggctaatttgtgtgtttttagtagagatggggtttcaccatgttggccaggctggtcttgaactcctggcctcaagtgatcagccacccatctcagcctcccaaagtgctgggattacagacgtgagccacagtgcccagcctgttttttttctttttagacacaagatcttgctttgtcacccagtctggaatgcagtggtgcaattacagccactgtggcctcaaactcctggcctcaagcaattctcttacctcagcctcctgagcagctgggactacaggcatgtgccaccgtgcctaactgatagcccagcatcttttaaagataaaaatctttatctttgcctaaaggaaaattaaggaatcttgtgcttattctgaaaaacaaaatacaaacaacaattttttgtcttcagaggttggcagtccttggtcctccccaagtacttctttggtaaagaatctgccattggcagataactcacaaatgacttatatctaggccctacaaaaaccatgaccaaaataaggaatgtgaatagaaggtggacaaattaaatggtgataatttttggtgggtgggactttcagcacaaataagtaatccaatattcttttaatttaatttctattaacaaggccttatcatagaagctgaggtggggagggaagtagaaataaacagtctaattcacaaaagaaaaatactggtttacaacctcacaaataacctgcaaattaaaacaacaatgagggtcgggtgcagtgacccaagcctgtaatcccggcactttggagggccgaggcgggtggatcacttgaggtcaggagttcgagatcagcctggccagcatggtgaaaccccgtttctactaaaaatacaaaaagattagtcaggtgtggtggcgggcacctgtaatcccagctactgggaaggctgaggcaggagaatttcttgaacctgggaggtggaggtttcagtgagctgagattgcactactgcactctagactgggtgacacagcaagactccatctcaaaaaaaaaaaaaaaaaagaaggaaacaacagagagataccatttcccttccatgaaagaccccagcttattcatacatgcctggtggccacacaaataggtatgccttattcagaaaacagcatgtcaatgtatgtcaagaaccttaaagatgcttaactcagtatccctactaatactgttccaaagaaagaatgcaaaatagaaaaccatccctgaagaatctgagcactctaattcccacccataatgagagggtataccatttccttaaaaaaatttttttttcacttttttttccaagacgggggtctcactatgttgcccaggctggccttgaactcctgaattcaagagatcctcccacctcagcctcccaaagtgctgggattacaggtgtgagccaccatgcccagcctaatttcattgttaattttgcttatttccgtgtcctcttttgcgtccctattgtctttaatatgaaatctctggccatacctctgtgtgtgtgtatgtatgtatatatgtatctgtgtgtgtatatgtctgtgtgtgtgtgtgtaatatatttacatatattcttctctcccccctcttaggctcttccatgctttccatgagtttcttatataatgagaagcagcatataatacatattatttctaaaaataactgaaataattaaaagccttctgctggcaaatctacaagacaatgacagtaaacactgtccaaggtgaggggcagcagtgaggggtaaccacagtcactgtctctgctgcccttcaccttcacctttttgaccttccagtggacaccgctagtagcacttctcaaactggaatcctctgcatcttttcagaacgtccaggactggcattgctggtacccactcctcctctttcactcttgtcctcccttagaggcaaacctgcaaatcacctctcatgaataatcccctcatccatgatgtgaagtacacctactcttcccaatgcccaccacctactaatggccatcagcacctccaaaagcatctacccagcctccttccaccttgaggccaccttgtcaggagagtcctttgcctaatgcagactcatcatactcctgtgacagtttttctttcttctcagttttaggttctgatttcatgtctttgtagtgcttgtttcaaagacaggaagtgaaggaggagggaagatagaaatgtcagactttagtcactgtttctgagtctgtgatgtaacactgtcctctgtctgtccaggcttaacaaattcaactgttttctttttccattcttttttttttttttttttgtacagacagggttgtacaatgttacactatgttgacgaggatggtcttgaactcctagcctcaagcaatcatcctgccttggcctcccaaagtgctgggatcgtaggcatgagccaccacgcccagccgtcttttttttcggacagggttttgctctctcaacccaggctggagtacagcaatatgattactgctcactgcagcctcaacctcctgggctcaagtgatcttcctgcctcaacctcctgaatagctggagctacaggtgcatgtcaccacacctggctgacttttaaatttttttgtaaagatggcgtttccccatgttgcccaggctggtcttgaactcctgggctcaagcaatcttcctgcctcagcttcccaaaatgctgggattacaggcctgagccactgcacccagcaaattcaactgttctcaagttctgtgtcgttggagtcttactgattcacgagcactcattggcctctcttcctcacctcttctcacccctccttaccagagagatgggaaaaacactgtcttagctggggaagcatttctcagcagcattcagggagttcagtccacttcctccttcatgcttgacttcccttcaattcagaccaggctatattcatcaaatgacgttctggactccattttttgaacagaataacaaggacacatcaaacaaatttgctgtgggaaatgtgtcaacatgaaaacaatataacaggtgatttgtccaatgtgacgtacccacccttctcatccaagaagtgaggcagtccaacctgctttagacatatgtcagaaacagttacaaaatgctcaagcttggcctctgtaaattcattctattgagctgactggcttgtatggaggttctagaccatgttagtgttcaagtctacatggatggaaaccttcaagcaggccaagcaggagacaggtggaagaagatgtgtgcatttgagggcctcgctgtggggcttgtggtggtgttgagtgggtaattaatgtcagcatcagaaagggaattctgcctctggagaagaagaactaaaagactgaaaatagggccactattttctgagtttctgagctttatttcactcttatctgagcatctgttgactcttgagaaaagttgatcacacatttctaatagtgtattaaagtgtattggaagcttctgctcaccattgcaatggaaaaggcattagttagattagcttctccaccagagtgggtgcagcatttctaagacttactgatctaactctgccccaaatctctcattcttctgtccaggagctaccctgtgaacacagacatgtgttgtccaatatggtagcccatagctgcatgcagtgcagttatttaaatttgtttaaaattaaatgaaataattccttgtttgcactacacacatgccaaggactttgtggcacatgcgtatcagtggcttttgtattagacggtgcagacgcagagtgtttccatcattacagaaagctctgttggatggcactggcctagatgcttgttttcagcatctgactatgtgaagtatgggctgtgtatctctccaccctctgaggttagaactgtgagcagcagaacctaaatgggttttgcataccaatcctctttctgctttccacatcttctttgtcatccaactttttttatcatccaaattttattacaacctttgtcttcatgtttctccataaggtatgatgctacattgcaaggatcaagttgaagtttagattatgcttaaattaaaactgcgactgttttcctatgttttattttactcgtcacgataaatgaagccagcagctgctcttctatgcagcatttggactctgagttaaaacttcagtcacccgggatcgcttgttttatattgctgttttgtttttttttttaacattgaggaacttaatgaagaacataatcattgccagtggccagtttaaatattgacttgcagatattttttcaaaccttagaatttgaaattcagaaacaagtgaaacctgagtaagagacgtgatagaaaaccaaagaatgtcacgaccatggtcagtgttttctgtgatagatttgttactgaaaaaattgtggttaaggaacatctggtaagtcaatcaggttttaaatgtattgagaaagcataagaaaagttgctaaattattttttaaaatgacttaaactaccttctaattcatttggtaaaattcagaagtttatgtactatgttgttatccctgcaaggctatacctatgaccaattcattaagtacaaaattaaggcaagttgtttagggtcaagtagatgaaacttttgttggttttatatatatatatatttggagatagggtcttgctttatcacccaggcacagtcatggctcactgcagcctcgacctcctgggctcaggtgattctcctgcctcagcctcctgaatagctgggactataggcacataccaccacacccagctaatgtttgtattttttgtagagatggggtttcaccttgttgcccaggctggtctcgactcctggattcaagcatttcgcccatctcggcctcccgaagtgctgggattacaggcatgagccgctgagtccagcccttttttttttggggggggacgaagtctggcccttgtcgcccaggctggagtgcagtggcacgatctcggctcactgcaacctccacctccagggttcaagtgattctcctgcctcagcctcctaagtagctgggattacaggcatgcaccaccacacccggctaattttgtatttttagtagaacgggatttcactctgttggcgaggctggtctcgaactcctggcctcaggtgatccacccgcctcggcctcccacagtgttgggattacaggcgtgagccactgcgcccggcctattttttaatgtcacaaccagatatgttagaattgtttaagcacagctagtagctttgggataccccaaatacaaaggtgttttagggatttatgttatctttatgctaaaaaaagtttatagagggttataattatattattatggatcttgcaaaagagcggcattaagcacacatttattgaatgaatgactgagtgaatgagtgagtgaatactctataatatgattaacccaatggttctaagacctgcaattgtgacctgtgtttatctaatttattccaaggagtcatagaacttaattttttaaattctaataacaggctgagcgcggtgcctcatgcctgttatcccagcactttgggaggctgaggcagcaggatcatgaggtcaggagttcaagacaagcctggccaacacggtgaaaccccgtctctactaaaaataaaaagattagctggacgtggtagtgtgtgcctgtaatcccagctactcgggaggctgaggcaggcgaatcacttgaacccggaaggcggaggttgcagtgagctgagagcgtgccattgcactccagcctgggcgacagagcaagactccatctcaaaataaacaaataaataaaataaaacaaaattctaataacaaattgaaattagatttaccttaattttacaaaagaaaatctacatcctaacctacttttaatgaaataggggtgctattacatcaatcacagaatgttatttcaaaaccttaagagaactttgactagccctctgagttttgcagtcttcatgtaagtatgtactaattggttttgttttttaaaaattacaaacatattgaagtttagagggaataaaatacaaattccaatatacccatcacacagatttcttagttattaaggttttgctacattgtgccatctatcactcccctttccattcagctaagtcttcttttatttatttatttatttttgagttggagtttcactcttgttgcccaggctggagtgcaatggtgtaatcttggctcaccgcaacctctgcctcccaggttcaagccattctcctacctcagcctcccaagtagctgggattacaggcatgtgccaccgtgcccggctaattttgtatttttagtagagacggggttgctccgtgttggtcaggctgtaacacctccagtttataaaggcaccaaatcacagtcacatttatacattgtgttagaagtgaaaacttgtattttcagacgctatgtataaatgccttataccttcttgcaatcaaaagctagcacatcgtacatcaattgtcatacttaacaatttttttttttttttttttttttgagatggagtctctctgttgcccaggctggagtgcaatggcgcaatattggctcactgcaacctccaccttctgggtggattctcgtgccttagcctcccaagtagttgggacttcagacaagcaccaccatgccaggctaatttttgtctttttagtagagacgggtttccccatgttggccaggctggtctcaacctcctgacctcaggtgatccccccgcagggattacaggcgtgagccaccatgcctggccaaggccaatacttaacaatttttaatagaatgctgtagtataatttgcttttcaagaattcccaagaggaattcctaaatttaccagtaatataagtatcttcaggaaagggaatttaaaaaagcatcaattttaggtaaccagtattctggggtgtgcattactggaaggctcacctttggttatatggcccaaaccaattgtgtattcatcaaactaagcagaaccagcttgttcagtgaagtacgatcattttaaaaatgggcattagaattttgaagttggtctgctaacagcgctcaacatttgtctctgctttctggaattagataaacatatatatatatatatatatatatatataaaacaagcacttacattttatttgcaaaataaaggaggcttactttggttttggttttggttttgagatagagtcttgctctgtcatccaggctggagggcagtggtgtgatcatggccccctgaaaccttgacctgccaggctcccaggctcaagtgatcctcctgcctcagccttccaagtagctggaaccatagacatgtgccaccacacctgactaatttttttttttttttaatttgctgtagagacagggtctccctatgttgcccaggctggttttgaactcctgggttcaagctatccttctgcctcagcctcctaaagtactgggactgcaagcaagagccagtgtgcctggccagggaggcttactttgaatttataagtatttctctgggttttgctagtttttatttttatttatttatttaaaattttttaaaaaattattttatttgagataggatctcaccctgttgcccaggctgcagtgcagccttgacttcctggactcaagccatcctccatcctcagcctcccgagtagctggaactacagaccacacactaccacgctcaactcatttttaattttttgaagagaagggggtcccactatgttgcccaggctggtctcgaacttctgggctcaagcgaccctccaccttggcctctcaaagtgctgggattacaggcttgagccaccatgcccggccctttgcttgtttttaaatagtcatatatttgtacacatggcaggatattagaaggatatgaactgaaagtactttggattttgtcaaaagcaggaaaaaagtaaagccagaagtaaagacacaccgaagtgagggaccatctttgtagtggagaggggtcgaacttgggagttaaggccagctgggattcagatcttgctgtgccatttaattgctgtaccttgtcttgggcaaattctttaacagctccatttttccatttctttctttctttctttcttttttttttttttttttgagatggagttttgctcttgttgcctgggctagagtgcagtggcgtgatcttggctcaccgcaacctccgcctcccaggttcaagtgattctcctgcctcagcctcctgagtagctgggattatagggcatgtgccaccacgcctggctaatttttgtatttttagtagagatggggtttcaccatgttggtcaggctagtctcgaactcctgacctcaggtgatccacccacctttgcctcccaaagtgctgggattacagacgtgagccactgtgcctggacatttttctgtttcttatgctaaaagcaggaatggtactactttccaatccagggtggctgtaaagattagagattacgcatgtaatgtgcttagtacggcctgacacactgtaaacttcgaacagtgatcgctgtggttgtctgctggtagagaggaaacagagtagcctaggtagccattttggttggtagctatttgggttatagccaaaattggctgaacaattgcaatggttggataaagagtttatgtgaatgtctgcatagacaagtgattttttttttccagccttggctacacattagactcacctggctggggtggtgttagagggtgcttttaaaaactattgcggcccaggaccctacaaagattctaggtttttctctctttgtgtgtgtgtgtgtgtgtgtgtgtgtgtgtgtgtttaagttctccagccaagatacagaatagtttagaccaagtgacagtttggaagctatcactcctgctggtagccttgccttgatttgtgagtgagccactgcataacccacacaacacaggtgctgatctgattcaaccctagtcaaaaagtcttatggattttccacagtttcctgtgcaagttgcctccttgtgggttttgttctttactcttgtttcttctctctgccttttttctcagaggaaagcaggagaaggcagatgaaataaaagggaatagaaagatggggatgatcaattgtttcttagtcctttgagccatctcagttaacactgtcaggacattaggcacagacaagagatcgacaggcaagagagcttttcagggcagcatgtaagcggcaatcagctataatcagtgaaaaaggttctctccacgaacgtgagggtattctgttagcttctactacagaggaaagagagagagagagagcgcgcacaatgtgaccacttttcagaagttataaataaggaacctccaggaggagccttctttgattacaatgtgctttgtcaattttcagtctgagtgctagcatgcctcttcaaagaaatgttagattagcaccactcttctgttatcccaaaaactctgtagaaattattaaatgtccttttcagtacagggaacgagtcataacctaaactttttttttttcttttttgagatgaaatttcactcttgtcacccaggctggagtgcagtggtgtgatcttggctcgctgcaacctctgcctcatgggttcaagagattctcctgcatctgcctcccaagtagctgggaccacagacacctgccaccacacctggctaatttttgtatttttaacagagatggggtttcaccatgttggccaagctgttctccaactcctggcctcaagtgatccacctgcctcaggctcccaaggggattacagatgtgagccaccatgcctggctgagtaaaattttagggaacaaattgaggagggaaaatggcaacttttcatgagacctggaaaaatagatgggaagaatggatcagttgagatttctatgggacctcggtcatcccatccccatagtaatatataccaaggaagagccagggtgaggccctttgttaattcagaacttttggctgcaagtaatagaaacctaatccaaaatagtttaagggctgggcatggtggggcgtgcctgtagtcccagctgctcaggaggctgaggcaggaggatcgcttgagctggggaattcgagactagcctaggcaacatagtgagactcccatctctaaaaataaagaaaattttaaaaatagcttaaggaatcaatcgacaaatgaatgcatcagattatatttatacatatatatttacctaactggaaattccaaagcatgcagcatgacatgctttggtcatcaggactgtttttctctatatgttttctgtgttggttttattttctaccattcctgaggaaaacctatagcagtcttatctgcaggatgagaaattcccccaaaggactctgattcaccctcatggtaccacacctgtacctgtccctggcttctggggcttggaggggtctgttattggtagacttgggaaggtgagtgcacaggagaaagcacatatgggctacacctgagagccctcgtctcaatgcggtgctttgttgatctctgatttaggaatctccacatcctatcccacagactcagttgcccccaaagctgaatgacaccttgttccttgccctcccacagattactgactctccggattatctctgtacagctgagccactcattaagtggtagatttagcaagatattgctctgaggacactaagtatttgacttgtctctactgacaaactttatcatttcttgttttcaccaaggggaagccatttctaaatatctagtcctagaaattagcatagaagtgcaggaaaggtctgatcagaagggactcatgttaacattatctcactgctttatttcaagagtaagaaaacctctgaagcagtgactggggaggtgggggataaatgcaacatgccattctgccgtgtattataattattgagaacttgttttgtcttttcgagtcatctgtaaacttgttgtaagttcaattttgtgtctctgttacccggtatcacataaaagggggtcaataaatatgtgtccattgaaggaagaatcaaggatttctgaccattgttctttggcaaagttagaattatcagttgaaattcacagtattaaccctaagacatcaacattagtttgttatacaataaatttattataattaatatcctttatttttgagacagggtctcactctgttgcccaggctggagtgcagtggtgcgatcttggctcactgcaacctctgcctcccgggttcaagcaactctcgtgcctcaacctccggagtagctgggattacaggcatgcatcaccatgcccatctaatttttttttttttttttttgagacagggtctcactctgtcacccaggctggagtgcagtgccagccactgcaacctccgcctcccaggttcaagcagttctgcctcagcctcccaagtagctgggattacatgtgcccaccaccacgcctggctaatttttgtacatttggtagagacagggtttcaccatgttggccaggctggtcttgaactcctgacctcaggtgatctgtctgccttggcctcccaaagtgctgtgattacaggtgtgagccactgcgccaggccaaaacatataaattttattttctgcattcctagggctctttgtgaagaaagaatttcacattctttgagcacttaccgtgtgccaagtgttctgtggacacattgtcttactgaagtcttacatccaccccagaatgccttcttcctcctcctcaaccatgaagagaattaatccctcctgcctccttaatgccacctgtcatggcctttatcacactgcattggaatttgtttgcatttctatatctcctactacactatgagtttttcaatgacagtctacatgtgtcattcaggttgtaacctcggcacccagctcatagggggaatcctataaatatatcttgaaattgggtattatgtgatcttcatttgacaaagttgacatcgtaggcttgcctggggttcctaagtggaaaatgacagggctagtttttgagcttctctgtgccacactccaaagcctgttttctttctgtcttctttgcttaatgtttgctttgtttagcttggttgcttgggaatattggaaagcaacattgagataatgagggtgatggaggaggggaagcagaaggggaagatgcaggggagttgctgcctgctgaggctgggaagggaggctaattatgcattgctcagttaagcaatgctccagccccctgattcccatcctcatcacactgcacactcgtgtgtgcgcgtacacacacacacacacacaggtcatgatgggagtgctgagtgaacagggaccagggaagcattttcttggaaagctattcactgtgagaacaaagagctgggacacaaagccaggcagccattgggacataaaaattgtgtcataaggaaacttctctgtaagataattctgcatggtgaggtttttagtgataaggttctagtctgaagtgaaattagtggagaacatggaacatggacatcatggcatccacaggtgcatgcctgagctttgttccttggaaacaatgatcggaacaggagaggtgtcatgggagcctttgaaatgtgcccttctgaagtggagggtaataagtggcagcatctgccatacttctcccactctcgcaaagtgtgacttcattatttttttcttttctttacttttttttggacacagggtctcgctctgtcacccaggctggagtgcagtggcacaatcactgcagcctcaacctcgggggctcaagtgattctcccacctcagcctccgaagtagctgggactacaggcgcatacccccaggcctggctatgtttttgtatttttcatagagatgaggtttcgccatgttgcccaggctggtctcgaactcctgagctcaagtgatctgcctatctctgcctcccaaagtgctgggattacaggcgtgagccaccgtgcctagccttttttcagttcaggttttaaaccagaacctttatggcatgactaatcactgaaattcgtgagataagctggatgttgcaatagctgccttcttgggtttatgtgttgttctttcacagaatccatgcctgaatctgcagtgtgcaatttttaggcgccccatatgatcagtcctggtggtgtttcaacttttagccttgatacttcagttacactttctcttgcacttggcaatgtagccacatttgccacaggttgacttctgaaggtggtaggcttcagagccacagcggtggcacatcgtgtgcatcttattgcgatgctttccagacgatgacgttctctttgtcatttggcttctgcagctgagaccaaagagtgtgtgtagctttagagaaatgtctgttcagactctttacctatctttaagttgggttatttgtcttattcattattgagttgtaggagttctttatatattctagatacaaggctattatcaaatatacatctgcaaatattttctctcattttgtaagttgtctttcctttcttaatggtgtcctttgagaaataaagcttcccattttgacaaaggacaatttcattattttttcttttattgctgtgtttatcatatttgaaaggtatcatatctaaaaggctgctgcctacctgagctaaggtcatgaagatttatacccatgttttcttccaagagttttacagttttagctcttatgaggtggttgatctataatgatttaatttttgtatatgatatgaattaggggtccaactctattcttttgcattgtgcgtatccagttattaaagcataatttcttcaaaagactattcccatcaaatagtcttggcacccttgtccggaatcgattgaccacagatacatgttttgggttttttccctgaactctcatttcgaatctattgtcctatggccatccttatgccagtaccacgctgcccaccctccccgcaccttatggttttcccctaagatttctgcaccctatacactgtctcgtttactgtagctttgtagtaaattttgaaacctggaagggtgagtccttgagctttgttcttctttttcaagtttgttttggctattctgggccccttgaatttctgtaggaattttagtatccatttatcaattttttttcccagaaactagctgagattttgatgggaatattgtgttgactctgtagatcagatcgaggagtattgtcattttagcagcgttcagtcttctattcatgaacaagcagtgtctttccatttatttagattttttttctctcttttttttttgagacagagtctcacttgtcaggctggagtgcagtggcgcgatctctcctcactgcaacctccgcctcccgggttcaagtgattcttatgtctcggccaggcgccaccacgcccggctaatttttgtatttttaatagatggcctagatctttgatttctttgaacaatgttttgtagttttaacacttgtattatttttgatgctattgtagatgaaattgctttgttaattttatattttagtttgttcattgctagtagatagaaatttataattgatttttctatattgcttttatgtcctgcaaccttgttgaacttgattattagttctaataattttttaatggattccttaggttttttacatgtaattgactacgtcatctatgaacagagttttatttcttcctttcccatatggatcccctttctttctttttttttcttttttctttttttctatttatcctggctagaaacaagtacaatgttgcatatagaagttgagagagtgcaaatccttgttgctgttcttcatggggagagcattcagtctttttcacattaagtgtattagtcatgggttttttgtagatgttatttatcagattgaagaagttcccttctgctttaatatgttgtgttttagttatgaagggttggtgcattgtatcaaatgcttttctggcagctattcagattactgtgtatagtttttgtcttttgttgatatggtgtattgcactgattgattttcatctgttaagctatcttgcatttctgggttaaatcagacttggtcatgttgctgaattcagtttattagtatttagttgtgtatttttaaaaagtccatatgcataagacatattgatttgtcattttctgataactttgtctgtattttctatgcatgtaatactggcctcagtgggaagtgttctagtcccttctgttttttggaagaatttgcgaaggattggtggtaattagactttaaaacatttgatagaatcctccagagaagtcatctgttcttgggcttttctttgtggaaaatttttatgttacaaattcagtgtatttacttataagtctattcagatattctatttcttcttgagtctattttggccctttgcatctttctaggaatttctcctctacatgtaggttatctaatttgctggcatataattgttcatagtatttctttgctatcctttttatttctagaaggtcagtagtgttgtcacttctcttatccctgagtttagtaagttgagtcttttcatttctttgtcattctagctagtggtttgtcaatgttgttgctcttttcaaagaaccaacttttggttttattaacttttattttgtttttatagtccgtatttgctttattcccacctaaatcattattatttccttccttaatctgtttcagatttattttgcccttcttttttctggcttcttaaactgaaagcttagattgtttactgtattttaactgttatctccattcccccaagctccattttacaggacagtttgtgagtatgagtgaccaatgctgaaacagtcagggcatgcaaactttctcctttggggacagagttacagggcaactgaatacatgaggggggcatacagagtacagttgacacagctgtttcattatggtgcagtccatatagcattgtgattctggggcaaaaacttgggctctggggtttgggaacctggatatgagttctacatctgccacctaatagttgtgagactttgaacacttatttaatctttgtaagcctcagtctccacatctgcaaaatagcagaaagataattagtacctcataggattgtcgtgaggattaaatgaaatagcatatgtgaagcacccagaactggtggtaacaactgttcaataaagattaactattctaatctggttgttgttgttaggtcagatgggcctttgctgagtcaactccatgtaaagtagctacagagcttgttgttgtgtttccattagtttgtacctctttgccaaccatctatgaactctcctgtatgtactaccagggtggacctcacctgcatttgctaccaggtgctgagatacacttctcacttgcggttgcaaagctcaggatgttatttccaaatgagctcttttctcagaccaattgccggccttgcttatttgatcatccacccatattacaatgatgatatgagaacaaatgaaggtatgagaagaaaatattttcctaaacaaatttgaggcatgcttggggtggaagtaccataaattatgaaaatggtgcgcactgaaaagttctaattttcattttatagcgtctcaagttctcccccttcccccccacccttttttttttcttttgagacagagtctcgctctgtcacctaggctggagtgcagttgtacaatctcggctcactgcaacctctgctcactgcagcctctgcctcccgggttcaagtgattcttgtgcctcagcctcctgagtagtggcgattacaggtgcgcaccactacactggctaattttgtagtagaggctgggtttcaccatgttggccaggctggtcttgaactcctgatctcaggtgatccacctgccttggcctcccagagtgctgggattacaggtgtgagccaccgtgcccagcctctctctctctttctttctttccctcacccctaactcttattaatccctttcatcaaaagcttcactaaagaacagaaaggatgtgcgttccgttttttccctcctctggccctgtaggtgcagagaaattacaaaatactaggctatacataggggaaaagtaagaaaaattcattagcatataaattgataaccagctttctttggtctatccatcaacatgaattttatccaagtagatttatttttttggaagactaaatttagtgtgaataatcaataatatattaataacaattaaatttgatttatctcttcatacttggggcttgccattcttattctttgtgtagctatgcttacgaagtgttatgccaggacgtgaaaggtgagcacagaggggtgcctagttgactgtctggtttttgataaaaaaagaaatgatgaggccaagcatgggggctgacgcctgttatcccaacaattttgggaggccaaggtgggtggatcacttgaggtcaggagttcaagaccagcctgactaaccaggtgaaaccctgtctctactaaaaaatacaaaaattagctgggcatggttgtgcacacctgtagacccagctactcaggaggcaggaaaatcacttgaacctgggaggtggagtttgcagtgagccgagatcgcgccactgcactccagcctgggcgaccgagtgagactccatctttaaaaaaagaaaagaaaagaaatgatgatgtagagctgaaattaccaacatcatcagatggaggagtccttgaggaaatctgagttcccaagatgccaattcctttggggtcttttttgttgctttcggttccatctgccaatccccatgaaggctccactgagtctaaaagagctaacagatgacccttgaccatcctaaggttgctcattgtgtctgtccctcttgggggagcacagagaataattttttgtggctactgaaatcttaggactcttccagtttaagtaagtcttaaagaaatactggccttgactttaggatccaaaataaacctgaatccttgtgagtgtctagacaacaactatagaaaacagcaacaatcagagatcacctgacagttaagaactggctaaaaatgtttgcacattaccaagatcaagcaacatataaattacccagagacatagaatgaatgttgcataaatgcctttgttattaaacaggatgtgtgctctgttgaatcatagttacatgggggaagtcctcctgcctgaacttctaaatttatgggaatcacagtcaaggttgctcaatccatgtgccctctacccaaccctcaccccatttcctctaaagatcctctactgggggtaagattttacaacttccatttaaatctgtgatggggtttcaccatattgaccagtctggtctcgaactcctgacctcaagtcatcacccactttggcctcctaaagtactgggattacaggcatgagccaccacacccagcccaaatttaaaaatttttgctgatatagtaggactcactgtttcgatttctatctattttaatcagacaaagtttgatttgaataaagttgaactattttcatgtttattcatcatagaatcttgtttttctgcaaactgcctgctgatatctttgctcgtatgtattgtgttgtatttttttgttgatacggaagcactctggcatattaaggaaattggctctttaatgacacactcctaattgtagtttgtctttgattttgttttaataaatgttttaaaattccatttaatgctcagttcttggaaaaaggaagagtgattgggaccaatgtttagttcaatttgaaattcagataaataatcagtttcttccttagctactgtatttagtttctaaactcttcacactaagctcttttttttttttttgaaacagggttttgctctgttgtccaagctagaatgcagtggtccaaatatggctcactacagttggagcttccgggctcaagcagttctcccacctcacacccccaagtagttgggactacaggcgcatgccaccatgcctagctaatgtttgtatttttttttttttttttacacagatggccttttgccatgttgcccaggctggtctcaaactcctggactcaagcaatccgcccacctcagcctcccaaaatgctaggattacatgagtgagccaccctacccggcctattttctctttataacagtatattctcatattaatgtgttgtcccaatttttaaaattgtctatttgagtaattatccagaatcatgactgacactaccattttcattaatactttagatcaaagtaattctcacttaattcttatagtaatttcacctgacacttggggactggtaattttagcattggtgtttctaaaaacatactgtgataagctgctccatcaccatgtatttggtttctttgtctataaaactaaagccagagaaatgaggtgcttgacaaagcattgaggtgtcaaggggcacatacagatttcaaattggaatcctggaacaaacatggtaggagaacagaagagggtcccatctgcatattcttactgcttagataaagcagctgtcgacttggctttcctttatcctgactttccagagttgttcaccaaacaggtaacaagattgagctttaagtctttatttcatattgattcttcataaattaaattatcttatgacttatggctccatgttgtaagtaaaaagtcatttgaccaactgtttggaattcttgtcaataacaattattgagcacccatgttagtgaatttctgtgtgtgtgcactgggtggtgagaaaaggttgagagcaaataccttgggtatactttgtaaggaaccatgatcagcttgtcatgcaaacatatgacaactgtgcaaacattttttacaagagacagtcttaacaaaaacaaaaaagaaaaagaaaacaaacaaaaaaaaagagacaatcttaaactttgtgtataagctttaattttcaaatgtagaatcagaagcattgctgtttaggcaatgttgtgatgaaacaggaatcaaatttgatcccaaatgacaaatacacaattgccaaatatctagaaaagaagaaatgctgaagtggtgtggcagtgagtaaagttgtgttgagaaagatagatacctggataaaaaaaatccttttggaggaaggtgattctagaagagagttacaaaggaaaataagaatctggtagatagagaaggaaggaaggtagtcttggagattttgtgtgtagctgtgtatctgttgaggttgaagggaacaaagggaaattatgcagtgatttgtcatcataagttaaccagagatttgcagctcatgatcaaaagcctgcaatgttatggatgaccaaggatcacctcaaattcccttcatgggagtaacatgatcccaaccatacctaaggaaaatggttcatcctactgctttcaggatggttagcagggaaaggtgtcagctaggaaacccaatgggtgggggtgggaggttgtgcatggttagtgctgaactaaatcaggaagaaaggaaaagaaaggaattggcagaatgtaatgatgggtcgaaatggagagaatgagggacagaacaaataggttcgttttatcaaatcattaaaattttgctgatcaaagtcatatatgttacagatatttaacatacatgtgttacatatgtattttaatcacccatattcatattcttactctccagagacgaccactgtcaatattttgttatatttttctacatttgattactataatatcagtagaaattgtaccctacataaagttttctctactctcttttttcttaagctcacatattgtgaacctttactcatgacattaaattcttcataaatgtaatttttagtggctggtgtgtcaccatttatttaaccattcctataaggattgtttctcaatgtattataaagaattctgagataaatatctttggatgtaaacatgctttttttcttatttcttaaggatagatttataataacatcattgctaagtaaaaagaataaacatttccaggctcttcaaatacactatgcaatttcttttttagaagggttttgatgctttcatacttgttttactgaagtgtgacacttaatcactattaagtattttagctaattttattggttgattaaaaaatgatagtgtattgtattgtactgtattgtattgtatttttgttcttttgagatggagtcttgctctgtcacccaggctggagtccagtggcacaatctcagctcactgcaacctctgactcccgggttcaagcaattctcctgtctcagcttcccgagtagctgggattaccggcgtgagccaatgcacccggctgcacaccagtgatcttaaaaaacagaaaagcagatcacagcgcttctctgctcagaatcctccaatcagccaaggagaacttgaagtcctctcctgggtgttataacgctcccatctgacccctgcctgtctcgctccctctgcttccgctaccccgcccctttcttgttgttctgttcttcagggactcctctgcctgtcaccatccaatcttcggggtctagaacaaagccacgcatagtaggatcaatagccattgttgaacgattgagtgactcttgcaaccaattcaaaattgaatgccttgccaagttaccatttgctcatggaaaatcaggctcattgtgtcgaaacgatttgcttcactagcattttatgttgttctttttcctgagcttatactcctcgctaattttagcatcccgtctaaactgatcagccttggagttgaccttttaaagatgttctcgtgtttctaatttcacctgtaatcattaatagcgtaaccagtatttatagatccatcgcagctaaagttttagtgtttgatttttttcgaatgatttcaattatttccatattgctttcaaatttctttagaatatctacttttatttttcaaaaaataagagctcccttttcaaagtggtaaaataatatgttgaacaggtaactaggcttaaataagaactgaaccacaaggtcttaagaagaaaaattttcaaagatttttagactccacataactcatttagttacttgctagcttatcaagctcctgaaaaatttccgtttcttggctgattataaaatatgtctaaggtttattccaattttaggaatactcaattcttgaaataaggaacattcttcaggaaagaggtgttttactttttaaatcacaaagtaaacaaatacagagaatacatattttgaagtgtaggattttgtgattgcctctgtttgtaacctgatgcaattgtaaataagaatgcaggctaggccaggtgcttacacctgtaatcccggcactttggaaagcagaggcaggtggattacctgaggtcaggagttcaagacgagcctggccaacatggtgaaaccccacctctactaaaaatacaaaaattagccgggtgtggtagcatgaacatgtagtcccagctacttgggaggctgaggtgggaaaatggcttgaaccggggaggcggaggttgtagtgagctgagatcgcgccactgtgctccagcttgggtgacacagtgagaccctgtctcaaaaaattaaaaaaataagataaaaaagggaatgcaggctagttatacctcctccaggaagctttccccatggactctgatctgtcttagcaatactcttcacctgattgtggtggctcccattgtctggatagcacatgctgttccatttctgtgtattctatatgttgtaattatcagacatttaatgatctctccaagaggattattagctcccagttaatagaaatcacatcatggccaggtacggtggctcacacctgtaatttaatagaaaccacatcatggccgggcgcagtggcacatgcctgtaatcacaagtactttgggaggttgaggccggtggatcgcctgaggtcaggagttcgagaccagcgtggccaacatggcgaaactccatctctattaaaaatacaaaaaggctggatgcggaggctcacgcctgtaatcccaacactttggaagaccaaggcgggcggatcgcttgaggtcaggagtttaagaccagcctggccaacatggcaaaaccctgtctctaccaaaaatataaaaattagctgggcatggtggcgcacacctgtaatcccggttactctagaggctgaagcaggagaattgcttgaacctgggaggcagaggttgcagtgagctgagatcatgccactgcactctagcctgggcaacagagcgagactccgtcaaaaaaaaaaaaagccacatcatgatccaggtctttgactgcacttccccagggcttgagtacatctcaaaaataaaaataaaaataataataataataataataataataataataataatacaaaaattagcagggaatggtgacattcacctgtagtcccagctactctggaggctgaggcaggagaattgcttgaacctgggaggcagatgttacagtgagccaaggtcacgccgctgcactccagcctgggtgacagagtgagactccgtctcaaaaaaaaaaaaaagaaagaaacaacatatgatccaggtctttgactgcacttccccagggcttgagtacatctcgggatattatagaaagtgctacttaaacaccagttgaaatggaagagcatagtacttgataaatccagaatgttaggggatttttgtggcaattttgaggaaattattaaaatatcatttgattattaaagagtaaaactcacaaaatacttggcaaaaccacacacttcctgagcccttgttaacctgactgccttgttcctcctggctcaggaggaaatatatctacttttcatattatgacaatgtagctggcttttccttagcacaagtggaagaaagggctataatgttacacatgatatgtgacttggtaataggtgtcttctctccaccagcattcaatatgtattctgaactttctctttttaagattaagaagtctgttaaaactaccacagaatctattaggtaaatactaataattacttagcttatcagatgctacattttgctgtgttagagggacagacagaaagggatcgccataaaatctagcaggtttctaagaattaatgaagagtgctgcctcgggtagaggaagggcttagagagaaaatgcaaagagaattctctttagattcaaattagattttgtggctttcttaacttatggtttcattcattgaacattaaagggtttcctacttagctccaaagatgccatctcaaagttccaaagtttttctgggttagtacagaagttcctgtccctggcaggctgacagagcagcaaggtgaaacatgggtaggtaggtagagaggtagctaattaggaggaaagaaagaagattatctacttagcttgaggcggtaaagtgtgatctctaagagccagaatgcctgggtttgaatcctcactccactacttatttgctggctgttggtcttggaccaattactttatttcttgttttctcatctataaaatggagatgaggctgagcgcgtggctcacggctgtaatcctaacactttgggaggccgaggcagatggatcacctgaggtcaggagttcgagaccagcctgaccaacgtagtgaaaccctgtttctactgaaaatacaaaaattagtcaggcatggtggcggacacctgtaatcccagctactcaggaggctgaggcaggagaatcacttgaacctgagaggtggaggtcgcagtgagctgagatcacagaattgcattccagcctgggcaacaagaataagactccgtctcaaaaaaaaaaaaaaaaaaaatggagatgatactagtacctgcctcaacctatgtatgggggttgcctgtgttaatatatgcgaaacacttagaacagtgcctggtgaaggacaagggctgtatgtaggagttagctatagttattttattacaggtggatgtgatgaataattttaatctttaaaacagttgtacctctgggcacaatggtgcagctgtagtcccagctacttaggaggctgagggaggaggatcacttgagcccaggagttctagaccagcctgagcaacatagctagactctatcacaaaacaaaaatgagtaaataaaccaaggatgccaattgagaaggtaccattttatttatatttatatatttatttatttatttatttatttttgagacaggatctcactctgtcatccagtctggaatgcagtgatgcagtcatggctcactgcagcctcaacctcccaggctcaaacaagcaattttcccgagtagctgggaccacaggcatatgtcaccatgcgctgctaatttttttattatttgtagagatggggtctcactatgttccccaggctggtcctgaactcctgggctcaagcaatcctcctgtcctggcctcccaaagtgctgggattataggcatgagccactgtatccagcctaccattttaaattttaaaaggacagcccacagatccttcctaatgtccagataaggaacactcatttcagatatgacaatgtccattgtttaattcttccttctctgtgactgttgatgctataataggataatagacaaattaaccgaaagaaaatactatggtgctttaatcatataggcttgtggatactgctttatacttcatctgtttttcaatactggttaattagcttcttagccaactattattgctgataccaccaatacagttatgtgatttcattatcagtgtttgacaccttttcaggtgaaggctaccatctgaatgtctatgcgcacacatatgtgcaatttcttttatgctttagtcatgtgttaatacaataaacagtttcagcaaaggcttgaaattctaaatagtgtcaaatatacttgtggaaaatgatatgctactactatatacaaaagcaaatacacacataatctttgcattggctatatcttagcttttagataattaaactaaaaagtaggctgggcatgggggttcatgtctaatctcagcattttgagaggccaaggcaggcagatcacttgagcctagcatttcgagaccagcctgggtaacatagcaagacctgtctctaaaaataagaaagtaataactaataataataactctcttaccaggatgccacagtggccttaatagatcctatctgaaataggccacataatcatgtcttactatgctccatttcttcctctcctggacctgagtcctgtttcttacccctttttccaaatctacctcagagcttatctcatcccaggcttctgttttgcgtctgtacttttttttccttttctccacagcctcagacctcagaactgcctgctgtcactctactctaaatcaaagatgctttgtaaaagacaaaggatcactcctccagggatgatttaagcttgttgcaagccagagctatacagaagttaatgtgaccgggtgtggtggctcaggcctataatcccagcactttgggaggctgaggcaggtggatcacctgaggtcgggagttcaagaccagcctgaccaacatggtgaaaccccgtctctactaaaaatacaaaattatccgggcgtggtggcgcatggctgtaatcccagctactcgggaggctgaggcaggagaatcgcttgaacccaggaggcggaggttgcggtgagccaagatcgcgccactgcactccagcctgggtaataagagcaaaactctgtctcaaaaaaaaaaaaaaaaaaaaaaagaacatgccacatggctcatgtggcatgacttttctactgtgatgcacacgtgcctatacagagggctgtgtagtaggagccacttttactatcagtagaaggggtgacttgctttttctgtgtacttttctatattttttgagtttgttaaaactagtatgtttatgtgcatgtattttttaaattaactttgttcaaagccaaggcaggaaaaatttgctcattttttatttagggcagcccataattgtaattgttgttttcaggtattcagtgaaaaattgctctctccttacccccttagtcttaaaattcatcatcctgagatggtttatttcctatgtttttgcctaagttattttttggtagcatttggtataggagcacacgtgcacacactcacaccaaacctcaatctcagaatactctctaatgcttaaaacatgccagaactttttcttatataatatactaaattactcttatagaaaaacagactttctgagtcccatttgtagtcgagaggaatttaaatttgtctgaaatcagtagtttttgaaaacactgccttagtaactgactgcttcagagttccttcagccagaacatagcgatttagttttatataatatttaacatagttataatcttagacttgttttggattttgaccctatgttaacttgttgataatttatagtcactgtcgatagctattattctatctaggagtaataaaactgtctttttaaaaaatatatgcgtagatgaatagattgaaaatgttcttgtcgtcattctggccgtttttgtttgtttgtttttcgagacggagtctcactgtgttgcccaggctggagtgcagtggcgccatcttggctcactgcaacctccgcctcccaggttctagcgattctcatgcctcagccttccgagtagttgggattacaggagcccaccaccacgcccgagtctcgaacttctgacctcaagtgatccacccgcctccgcctcccaaagtgctgggatgacaggcatgagccaccacacccggcccattctggtctttttacttccaactctggctccttccagttactaaggtttaactgaataagcttaacaatgatacagtgatgactcagggaaaactggggaccacatttttttgaaatttttgttttaggaggagttagtttctccttcctctcttgatgtgctgcagagctcactttaatcctgatgcagaggacacagaagtcacattgctttcaggacctcctccaggcaacttcagctcccttttcctctaacctcccaattgcctgaactgacaaactcagcctccagagagactttcgatgaggttccatcccataactgcctgaaaaggagtgtatttactcagcttaagtgcctcaggtcctcctgatctgttgttgtgtacagatggttttattaccataaatcctgctgtactgcctgcttctctttcattctatgcctcttctacttgtctccacttcttatgagtaaatcaatttctagctccaaactgataaagtaaaataaggtgagggtttggttcatgtgtaattttttcctattttttttctcccagactgatcatcataaacatgattgttgacagtcttttagacacagggtacttaaccaaagttacctaccccagatataatgagaaggggaaaaagcaacacttgctaaaaatataacatttctaagaaatcctagtaacactttttgagtactttctatatgccaggagcttttctaaacactttacgtatatttatttatttaatcccaacagcctagacaaggtgggcattattgttttttatctctgcatgtagctgtacaaatgtaatgggcatctatctggttctaggatggtggactttgaaaaatcatttgtttccttacggtcgttatttgggtttgaataaaatatttctgttaaatgtcctctatgaagtggcaaagcttttgagccttccccaaatccatcagttacagtagggtttccattccgtttcaggttgctgttgagcattatctttgtggcagttttaacacctcccttctttctgtaccacccactcaagctcattccaggtgcccttagcaaatgactcccaaggcattaagtggccaaagctcatttcgttgaccaatgaggagccctgtgccatgtataacagagttacacagctcctggtattgggagcgaaggttgcttaagcaaagctttcattacagttagcctgtcgcacccagatcaagattggaaaggtaggggaaaccttatttgttttaaatgaagagaagaagaggtaactgtgtttggttaaagcaatttagatcagaccagataaacaaatgatccatattgtttgttttttaattgaagacccccccaaaaaaatttggaagttggtaagaatttcaactgctgcacagtctgccttaccagcagtaaaaccaaaattcttaagttaaaaacattttctaaaaaatgagtttttctaacagcttttcactttatatgcttgaaaaatctagatcttcacagtattgttgttgttttatagtttcctgttatttaaactatggggtaagaagcaggaatttatcagcagtgttgcccatatttgatttttaaagccatttcagagtcagtgtttagagaaggaaattataattttaagatgtgataattaaaataaggaaaaattaatggaattagctttatgataattagcatataaaggttgacaatgatgacatttcctctcagagtaaagttcttgtataagaagacttttatcattgttttcaaaccaatagttaaatttatgaaatggaattatttaggtgtagattatatgctttaaagtattaacattagtttcactttcattataaataattgtttagttatattttatatgctattcaaaatttgttttaatattaactcaaatgaccagagaagtagaatctttagtcatttctgtctggcagtggagcaatttgaatagcatttgaagtagaagctaatcttttaaagaaaaatactcttctctcttaacccttctcccttctcattatgatgaatcaatgttgcaacaaaatgtatatgtgagaaatgcatattcttatactttttattagcctacatctgatatttagtgtcaaaagataagtttgggttcaaagaaaagtgtaactggttttccctgattgctttttgccaaaggtggcttaatatgggtttgtattttataacagagattaggtaatatgtttattttaaaatgtgacaaatgagagatggcaccatttgattaaaaatgtatttaaatatttcattttgaactctactttggtctaatttgtaaaggaaattttttaatgtacatatcacaaagtattaaatatccaagaatttcagttattgcagattccattttcttattttgacatattcatttaaaaagacttgcatcctgaaattgtatacttgtattagatttgttccaaatgcctttttgtaagacgtctgccattctcaagatcatcgttatttgtgtcttttactctggatgactctgtgggggaggtgggtgtggggggcgaccaacagtcacagtgttaactattcacgatggagaacgcttgctagccaccttgtcctgtataagtcagtgctgcttctcggttccaagctaaggttcaaaggtttagactaacttcacagatcagaggtcaggtacgaattgctgcaatttgtagttcaattctgccgatatgacagaatttcacagctatgatgattgcttttttccacttctgcacagaggccaggctgggcagttaacagcgtaatttgtacaagtcagccctcagcacccaagtttaatgagtaactaactggtgccttaggtttcactggtacaaggtgcatattataaaaagggtcaaatgtcagtgcacaaagacggagtggggaggggcatgataatctcatcaccaccatctgtgaatcatatgtaaagattcagtaatttgtgtttatttgtaaaattatatttccactgtaagaatgttagtatgttcattttctttgctatttgaaagaggtggataattttgttaggtgttagcaggaaacaactgtctgattagagattattaactaagcagtagaaagtgaaattgcagttttgtttactcattttgtggggtctctgagtcctcaaaaactttctaaagtgtgatagttttttaagaagctaggaaacaagtcagaacaccagatatttctgagcccatgatatttatgcctatctgatattctctattcgtcacccaaaaagttgaactcctatctatatttctaacctaggttgagaatatcatttactgtttaaagctgaatattggggttcttgaaaaaattcctacctggtaggccttaacaattcatgaatttgccattcaggtttaactcctcatgttgactctgaagctgtaatatataatgcatatagaatcatttgtcatttttgttatagcacagatttcagttttctactcttccagattggagtgcagcagcaattggattcttccatagaaggcctggggtttgaaccccagcttcttcacttccagctaagggaccttaacaaatgggcagcctcattatacctcagttctggcatctccagaatgagtagcatcatagatcttgcttcatgaggttgtagcaatgattaaataagacgatgtatgtggaatgcttagtgccatacctggtgcatgataaacattcaatgaatgttgatggtcattactattattaatattattatgttacttaggttgtgagttcacctagcctaccacatataccatctcaatttggtttagacttggtcttggctgtgttcatttcatgagggacatcgttggatgtggcataggataaggtgatttgggaatgtttcaggatgcatttcttttgaatgtcatggggaagcttataaaattcctccatttcaagtctagcactcttttagatgctatcttttttctttagctgatttgctgtcacatggcaaaaactataaaaggggataaatccaaattatctggtttcctttgagagctcctttattctgccaagcagtgaaaaacatttgagtttaaaaaaaaaatccataaatgataccttaccagtgggctaaattctatacttgtttatatatatattacacttactagaattcatgctttccagaaatgccagaaatgaaagtatgaaagtgattctttttcattccatttttttcattttagtcctatggaatgtatcaatagcatttgaagaaaaacatgatttttttttttttttttttgagatagagcatcactcttgttgcccaggctggggtgcaatggcgtgatctcagcttactgcaacctccacctcccaggtttaagtgattctcctgccttagctgagattacaggtatgcgccaccatgcctggctaattttttgtatttagcagagacggggtttcaccatgttggtcaggctggtctcaaactcctgacctcaggtgatccacccaccttggcctcctaaagtgctgaaattacaggcatgagccaccgcacccgacaaaaaactatttttaactattaatgacgatataaaatttatatgcttggcattaaaaaggtagtaacaacatctcagactaattaaaaaattaagtgcctactattggcttggattgggtgtggaactctaggattctagttatgagtcagatctagattcttccctggtagagtttaaaactgactcaagatgactagcattacagcaattactataaggctaaaccaaagaaaattgtcaacagtctactgtttttgtcctataaaatagcaatttcatatggttcaacctagtgctatatgaaggattatatgatgttgggggagcatatcacagggggctgcaggaatagctttgtagaaggaatgaagttcgggatgagtgcaagctggctagatgggaattggtgagggctgaaatattggaacagcatgtgtaagggggaagtaacacaagatgaggctggaggaggacgtggagcctctttataggccttacaagccttacaaaggatacaaacttagtctaagggcaatgggaggagagtgtaggggtttaagcagaagggtgataaaacgcttcctttttttttttttttgaggtggagttttgctcttgtcacccaggctggagtgcctggcacgatctcggcttactgcagcctccacctcccggattcaagcaattctgtctcagcttcctgagtagctaggattacaggtgtgtgccaccacacccggctaattttgtatttttagtagagatggggtttcaccaggttggccaggctggtctcgaactcctgacctcaggtgatctgtctaccttggcctcccaaagtgctgggattacaggcgtgagccactgcgcctgaccaaattgtatattttttaaacggtccctttgcctgtaaggagacctagattgattgcagcaggcctgagtggatagggagaagccagctgggagtctactgtagaagtccaggcaggagctaatggttagtttaggagatgctttcaaatgttgtgtcttgtgtaatccttataatggtgatctttcagtgtacgggtaacaacctgaggctcagaaagttgtgtagcatgccatggtcaaactgttcaggtggcaaagcgagaactagaacttagttatttgactctcaacctggtggtctcctggcagctttaggaccccatgtactagcatccttgggtgagggcaattggtttatcttaagaaaggttctggcgagacgcggtggctcacgcctgtaatcccagcactttgggaggccaaagtgggcagatcacttgaggtcaggcgttcaggaccagcctggccaacatgctgaaaccctgcctctactaaaaatacaaaaattagccaggtgtggtggtgtgcacctgtaatcccagctacgtgggaggctgaggcaggagaatcacttgaacccgggaagcagaggctgcagcgattcaagatcacgccactgcactccagcctaggcaacagagcgagactctgcctcttaaaaaaataaagaaaagaaaggatctgtttttaagaaatggaattatcattccttggtggagggttgtggtgagaaagttatttttagcttagctttatgactgagagaagtagaacaggacatgacttgatattagactggagcatctttttccgaaaaataaatgtattaatttcaagtgttttatgtatgctatgcttcattccaaaaatggacttgaaacagctttcaaaactacatacgacacgtcaagacacaaatagaagagggggcaaaaaaatcaagataggcaaactaagatgatgccagaagcatccaataaatgcttgccctcaagtccccccatgtgttgaagacggagtcatgagcggctgtgagattcacatgccccaaaacattaaaacaaaccagttgttctgtcagtatagctttcctcctactggaatctataaacttttccccatttggtctttataaagactccatgatggggtgagtgatgtctatgcaatttcagggtaccaggctggggggcggggggagctggaatgaattaacgccattaatgtctggaaaccaccccgtttctccagaaactgccccacaaatcttattactatgtttcctacctactgtgtgacctttggtaagacagtttcctccatagtaaaatcaaaggtttggactggaactaaccttctcaaactgggttctctggagtatccaatattgtgtcaggaggaatgtgaagccacaggacaaacataacatataggttttgcttgaagatttttatggcaaacataacaatattaaatattctggccgcacatggtggctcacgcctgtaaccccagcactttgggaggccgaggccagcagatcgcttgaggttaagagttagagaccagcctggccaacatggcaaaaccccatctctactaaaaatacaaaatgtctcatnnnnnnnnnnnnnnnnnnnnnnnnnnnnnnnnnnnnnnnnnnnnnnnnnnnnnnnnnnnnnnnnnnnnnnnnnnnnnnnnnnnnnnnnnnnnnnnnnnnnnnnnnnnnnnnnnnnnnnnnnnnnnnnnnnnnnnnnnnnnnnnnnnnnnnnnnnnnnnnnnnnnnnnnnnnnnnnnnnnnnnnnnnnnnnnnnnnnnnnnnnnnnnnnnnnnnnnnnnnnnnnnnnnnnnnnnnnnnnnnnnnnnnnnnnnnnnnnnnnnnnnnnnnnnnnnnnnnnnnnnnnnnnnnnnnnnnnnnnnnnnnnnnnnnnnnnnnnnnnnnnnnnnnnnnnnnctactgcactccagcctgggggatggagtgagacgccatctcaaaaaaaaaaaaaaaaattatggaatggattgtgtttggagttattctggaaagtcagatttttctggaaacaaacattgaccctaagtgtttcattttggggaaatgtcctgtgttacttgaatagccgtgaaaggcacatctgtgatccttctttccctttttatgatgtagcacaaaactacgtgaattctgtgtttcatttatatattaataatttgctttcaattcttagagtttacatgttcattaccttggtattacattttaaagggagacattttaccattacagaaagagtgaaaactcaaaattctgcacaaataatatatgtcgagaatggtgctttataaatattttctctgttctccacaacagtcctgccaggaatgatttctgctttatggaggtggaaactgaggctcaggaaagttgaatatacttgtctggatttacttagctagtagatgagagatgcaggagtctattgtccagacagtgtacaattaatttcaagacacaccttcttgtactttgtacattcgttttcgtagtttttatcaaccactatgatcttgattactaggtattatccaggatgcagcatttcaggaattatcttttcacagagttgggtaaagattatgtgtattaaaacgtaaatcattttaacagctattgctctgtaatttatttgagggtgtggctttttttctttcaggagatcattgttaacaagattaaaactagatcatggtaaagtattattgctgtgttcccataacgttatggatctcactgagcacccagtcattccaatataaagatagttatggcagaataattttgagctataagttatattaaaggccatttaatccagaaggtttccaactgtgctctatggagtcctaaaggtcttacggtgtctccacagggacacaatgaatgatggaagtgggggcacctcccgacaacatcccctacctatacttcaaccagcaactgttttattggtgttgtttctgcaactagttagatttttggtggaaaaaagtgtgctacaactaaaacacaaagaaaaaacaaacacaatttttttttaatgttgagaactattggtaatccaactcctttattcttatttttatttatttaacttttttgagacagtcttgctctgtcgcccaggctggagtgcagtggcacaatctcagctcactgcagcctccgcatcccaggttcaagtgattctcctgcctcagcctcctgagtagctgggattacaggcgcctaccactgcacccagctaattttttgtatttttagcggtaacagggtttcaccatgttggccaggctggtcttgaactcttgatctcaagtgatccactcatcttgacctcccaaagtgctaggattacaggcatgagccaccacacctggcctcctttattattttttttccatgggagtaaactttggctcagacaggtgaaatgaactgggcatgacagagatagccttaaaactagccttctggttcccagtctggtgttgaaaccactgtgccatattgaatcttgtataagttatttggagcttcagttggcttgatgggggctctctgtagtttggaaaatcaggcagattatatttccacacattgaaataaaaataaaagttttgtgcttaagatatattttaattcctcatctgaaatatctttatcttgaactttaaattcttttcatgtgaatatttcctatatcattacttattaaagattattctaaacccccaaatcatatttttcatgggcctctccatgcgatgaacatcctcaaaagagtcttgactctgccgagtacagtggctcaaacctgtaatcctggcactttgggaggctgagtcgggtggatcacttgaggtcaggagtttgagaccagcctggccaacatgatgaaaccccagctctactaaaaaatacaaaaattagccaggcgtggtggtgggcacctgtaatctcagctacttgggaggctgaggcaggagaatcgcatgaacctgggaggtggcgtttgcagtgagccgagactacgcaactgcactccagcctgggcgacagagcaaaactccatctcaaaaaaaaaaaagagtcttacctctacattttaggggcagaacagtaagtctctttcataccaactctggttggtagtggatagctggagtacttgcttcaatggttttgggaaccctctctggaccctgcaggaagagtttgaagatctattagtgatgtgtagcataagctcccaaattggctgggaagtccatgagctagatatgattatttctgtaaaggatactacctctttttgtgagtctataagtgtaaaatataggctacatctgtattccttcttaaacattatgtgcatcttgaagtcatgcacactctgaagaaggcatagagacaaacacaaatggaagaaattagtcattttcttattattactgttccttgtttctttaagaatcagataagcagttgcacttggtttatagagaacatgataattagagtaatggtatttcattttttgaagaaaatggccccccagtttctaattattatgcttaggaactacgcaagaggatctgcccccccccccccaatttctaatgcacatatgaaaatcatgttgaaatagaaaatatttctaaccatttcttttttaacccttaggatttgcctcaaagggcactgcaaaaattgaacagaggaatcccaaggaagctgcctgaatttgcctgtatactctcgttctgcgacttataaaggaccagacaaatcaaattagtggttttggtgagtatacttcctctggtccttttcccttccacttaagcaagaacataagttttcattcctttcaaccaagatacctgctacttagacaatgtgtacctgttgtgtgttcatgtggcaacgttagtggaatatagaacgtgataagtcatttggaaccctcaatataaacctttatgtctttgtacactttacatctttgtgacttaagagacaagatataactatgtgttgcttataaatctgacccttaacctcccaaaaaagaggtcaactgtatttctttctttctttttttttttttttttttgagacagtctcactctgttacccagggtggagtgcagtggcacgatctcagctcactgcagccttcacctcccaggttcaagcaattctcgtgactcagcctcccgagtagctgggattacaggtgtgtaccaccacatctggctgatttttatatttttattagagacaaggttttaccattttggccaggctagttctcaaactgctggcctcaagagattcacccacctcagcctcccaaagtcctgggattacggacatgagccacagcacccagccagtcaactatgtttcagtcagactgtattttgattgtgtgacacgaggctgggttcttggtacaaactagactaggattcagtgtgatagtatcttgtatttttgatcaatcctcataccttctctaagtttctgtttccttgcctgtcatatgaggtaaaaataactgtcatcccaattcatgatgatccaaagaaccacaacatatgtaaaagcactttgacaaccatttaatcttctccaagtaggactgagccaaggaggcagaggttgcagtgagccaagatctctctttttttttttttggagatggagtgtcgctctgtcgaccaggctagagtgcagtggcacgatctcggctcactgcagccgccgcctcccgggttcgagcaattctcctgcttcagcctcccgagtaggtgggattataggtgcacgctaccacacccggctaattttcatgcccagctaatttttttgtatttttagtagagacagggtttcactgtgttgcccaggctggtcttgaacctctgagctcaggcaatctgccctcctcggcctcccatgtgctaggattacaggcatgaggcacagtgccatgctgagctgagatctttctatggatctagtgagtgagattattctatggacgataatcttgtgtgtgctaggaagggaagataggagaaagattagcttcaccctgaccttggaccccagccctcacatagctccagaaggtggaggcagtagatattggtgtgtcagggaggggctgccagcgacactgatgtgcccaataatccctgcgagagaaaataggtactttgtcttcatgttccctaggctgggttttggatttagtccattgaattcagggactcagagagcaaaatttttttaattgtaatttttttcttcttataaaagtatactaatggaaggaaatctggaaattatagaaaaatgtaacaaaatctacccataagcccacaatccaaatataaccagaattaacatggtgtatttactctgattttgtttggttgtttaattttcttttccttttttttttttttttttttttttttgagacagagtcttgctctgtcgcccaggctggagtgcagtggcgcgatctcggctcactgcaagctctgcctcccgggttcacgccattctcctgcctcagcctcccgagtagctgggactacaggtgcctgccactgtacccggctaattttttttttgtatttttaatagagacggggtttcaccgtggtctcgatctcctgacctcgtgatcctcccgcctcggcctcccaaagtgctggtattacaggcgtgagccaccatgcctggctgattgtttaattttcatatacagtagtcagcccccatctgcagtttcacttttctcggtttcagttacccgttgtcaactgtattcccaaaatagaggcatacagtatgatattttgagacagagagagagaccacactcacataactttattattagagtattgctataattgttacattttattattgttgttgttaatctcttactgtgcctaatttataaattaaacttaatcataggtatgtattatatatgtaaatatgtataggaaaaaacagtatatatagggttcattactatcagaggtttcaggcatccactgggggtcttggaacaggtcctcctcagatgaagggggactaccgcatatctttaaatattatttagcaaagttaaaatagctgagaacattaaacaggtactctaagctgtggctatgccacgatttattgaccatttttataccattgaatatttgtgtttattacattacgtgtaaatatatactattatgttcattgcattgtattataaatagaacttcagtaaacagatttgaatgtaaatctttgcttgggtatttgattatacatgtctataaatggaatcattgggctaatgagaattgactaatgaacactgtaaagctcttgatattgtccaactctttcagaaacagcaaattttacccaccttcccacctatccccacgcatcatatatggcaatgtgcgtttcacagggcacatgtaaaaactgtattaccaatttaggaagattttaaaaccagaaatatttttatagatactcaaaaaaattttaggtctgttctcaagttctgtgtcgttggagtcttactgattcacgagcactcattggcctctcttcctcacctcttctcacccctccttaccagagagatgggaaaaacactgtcttagctggggaagcatttctcagcagcattcagggagttcagtccacttcctccttcatgcttgacttcccttcaattcagaccaggctatattcatcaaatgacgttctggactccattttttgaacagaataacannnnnnnnnnnnnnnnnnnnnnnnnnnnnnnnnnnnnnnnnnnnnnnnnnnnnnnnnnnnnnnnnnnnnnnnnnnnnnnnnnnnnnnnnnnnnnnnnnnnnnnnnnnnnnnnnnnnnnnnnnnnnnnnnnnnnnnnnnnnnnnnnnnnnnnnnnnnnnnnnnnnnnnnnnnnnnnnnnnnnnnnnnnnnnnnnnnnnnnnnnnnnnnnnnnnnnnnnnnnnnnnnnnnnnnnnnnnnnnnnnnnnnnnnnnnnnnnnnnnnnnnnnnnnnnnnnnnnnnnnnnnnnnnnnnnnnnnnnnnnnnnnnnnnnnnnnnnnnnnnnnnnnnnnnnnnnnnnnnnnnnnnnnnnnnnnnnnnnnnnnnnnnnnnnnnnnnnnnnnnnnnnnnnnnnnnnnnnnnnnnnnnnnnnnnnnnnnnnnnnnnnnnnnnnnnnnnnnnnnnnnnnnnnnnnnnnnnnnnnnnnnnnnnnnnnnnnnnnnnnnnnnnnnnnnnnnnnnnnnnnnnnnnnnnnnnnnnnnnnnnnnnnnnnnnnnnnnnnnnnnnnnnnnnnnnnnnnnnnnnnnnnnnnnnnnnnnnnnnnnnnnnnnnnnnnnnnnnnnnnnnnnnnnnnnnnnnnnnnnnnnnnnnnnnnnnnnnnnnnnnnnnnnnnnnnnnnnnnnnnnnnnnnnnnnnnnnnnnnnnnnnnnnnnnnnnnnnnnnnnnnnnnnnnnnnnnnnnnnnnnnnnnnnnnnnnnnnnnnnnnnnnnnnnnnnnnnnnnnnnnnnnnnnnnnnnnnnnnnnnnnnnnnnnnnnnnnnnnnnnnnnnnnnnnnnnnnnnnnnnnnnnnnnnnnnnnnnnnnnnnnnnnnnnnnnnnnnnnnnnnnnnnnnnnnnnnnnnnnnnnnnnnnnnnnnnnnnnnnnnnnnnnnnnnnnnnnnnnnnnnnnnnnnnnnnnnnnnnnnnnnnnnnnnnnnnnnnnnnnnnnnnnnnnnnnnnnnnnnnnnnnnnnnnnnnnnnnnnnnnnnnnnnnnnnnnnnnnnnnnnnnnnnnnnnnnnnnnnnnnnnnnnnnnnnnnnnnnnnnnnnnnnnnnnnnnnnnnnnnnnnnnnnnnnnnnnnnnnnnnnnnnnnnnnnnnnnnnnnnnnnnnnnnnnnnnnnnnnnnnnnnnnnnnnnnnnnnnnnnnnnnnnnnnnnnnnnnnnnnnnnnnnnnnnnnnnnnnnnnnnnnnnnnnnnnnnnnnnnnnnnnnnnnnnnnnnnnnnnnnnnnnnnnnnnnnnnnnnnnnnnnnnnnnnnnnnnnnnnnnnnnnnnnnnnnnnnnnnnnnnnnnnnnnnnnnnnnnnnnnnnnnnnnnnnnnnnnnnnnnnnnnnnnnnnnnnnnnnnnnnnnnnnnnnnnnnnnnnnnnnnnnnnnnnnnnnnnnnnnnnnnnnnnnnnnnnnnnnnnnnnnnnnnnnnnnnnnnnnnnnnnnnnnnnnnnnnnnnnnnnnnnnnnnnnnnnnnnnnnnnnnnnnnnnnnnnnnnnnnnnnnnnnnnnnnnnnnnnnnnnnnnnnnnnnnnnnnnnnnnnnnnnnnnnnnnnnnnnnnnnnnnnnnnnnnnnnnnnnnnnnnnnnnnnnnnnnnnnnnnnnnnnnnnnnnnnnnnnnnnnnnnnnnnnnnnnnnnnnnnnnnnnnnnnnnnnnnnnnnnnnnnnnnnnnnnnnnnnnnnnnnnnnnnnnnnnnnnnnnnnnnnnnnnnnnnnnnnnnnnnnnnnnnnnnnnnnnnnnnnnnnnnnnnnnnnnnnnnnnnnnnnnnnnnnnnnnnnnnnnnnnnnnnnnnnnnnnnnnnnnnnnnnnnnnnnnnnnnnnnnnnnnnnnnnnnnnnnnnnnnnnnnnnnnnnnnnnnnnnnnnnnnnnnnnnnnnnnnnnnnnnnnnnnnnnnnnnnnnnnnnnnnnnnnnnnnnnnnnnnnnnnnnnnnnnnnnnnnnnnnnnnnnnnnnnnnnnnnnnnnnnnnnnnnnnnnnnnnnnnnnnnnnnnnnnnnnnnnnnnnnnnnnnnnnnnnnnnnnnnnnnnnnnnnnnnnnnnnnnnnnnnnnnnnnnnnnnnnnnnnnnnnnnnnnnnnnnnnnnnnnnnnnnnnnnnnnnnnnnnnnnnnnnnnnnnnnnnnnnnnnnnnnnnnnnnnnnnnnnnnnnnnnnnnnnnnnnnnnnnnnnnnnnnnnnnnnnnnnnnnnnnnnnnnnnnnnnnnnnnnnnnnnnnnnnnnnnnnnnnnnnnnnnnnnnnnnnnnnnnnnnnnnnnnnnnnnnnnnnnnnnnnnnnnnnnnnnnnnnnnnnnnnnnnnnnnnnnnnnnnnnnnnnnnnnnnnnnnnnnnnnnnnnnnnnnnnnnnnnnnnnnnnnnnnnnnnnnnnnnnnnnnnnnnnnnnnnnnnnnnnnnnnnnnnnnnnnnnnnnnnnnnnnnnnnnnnnnnnnnnnnnnnnnnnnnnnnnnnnnnnnnnnnnnnnnnnnnnnnnnnnnnnnnnnnnnnnnnnnnnnnnnnnnnnnnnnnnnnnnnnnnnnnnnnnnnnnnnnnnnnnnnnnnnnnnnnnnnnnnnnnnnnnnnnnnnnnnnnnnnnnnnnnnnnnnnnnnnnnnnnnnnnnnnnnnnnnnnnnnnnnnnnnnnnnnnnnnnnnnnnnnnnnnnnnnnnnnnnnnnnnnnnnnnnnnnnnnnnnnnnnnnnnnnnnnnnnnnnnnnnnnnnnnnnnnnnnnnnnnnnnnnnnnnnnnnnnnnnnnnnnnnnnnnnnnnnnnnnnnnnnnnnnnnnnnnnnnnnnnnnnnnnnnnnnnnnnnnnnnnnnnnnnnnnnnnnnnnnnnnnnnnnnnnnnnnnnnnnnnnnnnnnnnnnnnnnnnnnnnnnnnnnnnnnnnnnnnnnnnnnnnnnnnnnnnnnnnnnnnnnnnnnnnnnnnnnnnnnnnnnnnnnnnnnnnnnnnnnnnnnnnnnnnnnnnnnnnnnnnnnnnnnnnnnnnnnnnnnnnnnnnnnnnnnnnnnnnnnnnnnnnnnnnnnnnnnnnnnnnnnnnnnnnnnnnnnnnnnnnnnnnnnnnnnnnnnnnnnnnnnnnnnnnnnnnnnnnnnnnnnnnnnnnnnnnnnnnnnnnnnnnnnnnnnnnnnnnnnnnnnnnnnnnnnnnnnnnnnnnnnnnnnnnnnnnnnnnnnnnnnnnnnnnnnnnnnnnnnnnnnnnnnnnnnnnnnnnnnnnnnnnnnnnnnnnnnnnnnnnnnnnnnnnnnnnnnnnnnnnnnnnnnnnnnnnnnnnnnnnnnnnnnnnnnnnnnnnnnnnnnnnnnnnnnnnnnnnnnnnnnnnnnnnnnnnnnnnnnnnnnnnnnnnnnnnnnnnnnnnnnnnnnnnnnnnnnnnnnnnnnnnnnnnnnnnnnnnnnnnnnnnnnnnnnnnnnnnnnnnnnnnnnnnnnnnnnnnnnnnnnnnnnnnnnnnnnnnnnnnnnnnnnnnnnnnnnnnnnnnnnnnnnnnnnnnnnnnnnnnnnnnnnnnnnnnnnnnnnnnnnnnnnnnnnnnnnnnnnnnnnnnnnnnnnnnnnnnnnnnnnnnnnnnnnnnnnnnnnnnnnnnnnnnnnnnnnnnnnnnnnnnnnnnnnnnnnnnnnnnnnnnnnnnnnnnnnnnnnnnnnnnnnnnnnnnnnnnnnnnnnnnnnnnnnnnnnnnnnnnnnnnnnnnnnnnnnnnnnnnnnnnnnnnnnnnnnnnnnnnnnnnnnnnnnnnnnnnnnnnnnnnnnnnnnnnnnnnnnnnnnnnnnnnnnnnnnnnnnnnnnnnnnnnnnnnnnnnnnnnnnnnnnnnnnnnnnnnnnnnnnnnnnnnnnnnnnnnnnnnnnnnnnnnnnnnnnnnnnnnnnnnnnnnnnnnnnnnnnnnnnnnnnnnnnnnnnnnnnnnnnnnnnnnnnnnnnnnnnnnnnnnnnnnnnnnnnnnnnnnnnnnnnnnnnnnnnnnnnnnnnnnnnnnnnnnnnnnnnnnnnnnnnnnnnnnnnnnnnnnnnnnnnnnnnnnnnnnnnnnnnnnnnnnnnnnnnnnnnnnnnnnnnnnnnnnnnnnnnnnnnnnnnnnnnnnnnnnnnnnnnnnnnnnnnnnnnnnnnnnnnnnnnnnnnnnnnnnnnnnnnnnnnnnnnnnnnnnnnnnnnnnnnnnnnnnnnnnnnnnnnnnnnnnnnnnnnnnnnnnnnnnnnnnnnnnnnnnnnnnnnnnnnnnnnnnnnnnnnnnnnnnnnnnnnnnnnnnnnnnnnnnnnnnnnnnnnnnnnnnnnnnnnnnnnnnnnnnnnnnnnnnnnnnnnnnnnnnnnnnnnnnnnnnnnnnnnnnnnnnnnnnnnnnnnnnnnnnnnnnnnnnnnnnnnnnnnnnnnnnnnnnnnnnnnnnnnnnnnnnnnnnnnnnnnnnnnnnnnnnnnnnnnnnnnnnnnnnnnnnnnnnnnnnnnnnnnnnnnnnnnnnnnnnnnnnnnnnnnnnnnnnnnnnnnnnnnnnnnnnnnnnnnnnnnnnnnnnnnnnnnnnnnnnnnnnnnnnnnnnnnnnnnnnnnnnnnnnnnnnnnnnnnnnnnnnnnnnnnnnnnnnnnnnnnnnnnnnnnnnnnnnnnnnnnnnnnnnnnnnnnnnnnnnnnnnnnnnnnnnnnnnnnnnnnnnnnnnnnnnnnnnnnnnnnnnnnnnnnnnnnnnnnnnnnnnnnnnnnnnnnnnnnnnnnnnnnnnnnnnnnnnnnnnnnnnnnnnnnnnnnnnnnnnnnnnnnnnnnnnnnnnnnnnnnnnnnnnnnnnnnnnnnnnnnnnnnnnnnnnnnnnnnnnnnnnnnnnnnnnnnnnnnnnnnnnnnnnnnnnnnnnnnnnnnnnnnnnnnnnnnnnnnnnnnnnnnnnnnnnnnnnnnnnnnnnnnnnnnnnnnnnnnnnnnnnnnnnnnnnnnnnnnnnnnnnnnnnnnnnnnnnnnnnnnnnnnnnnnnnnnnnnnnnnnnnnnnnnnnnnnnnnnnnnnnnnnnnnnnnnnnnnnnnnnnnnnnnnnnnnnnnnnnnnnnnnnnnnnnnnnnnnnnnnnnnnnnnnnnnnnnnnnnnnnnnnnnnnnnnnnnnnnnnnnnnnnnnnnnnnnnnnnnnnnnnnnnnnnnnnnnnnnnnnnnnnnnnnnnnnnnnnnnnnnnnnnnnnnnnnnnnnnnnnnnnnnnnnnnnnnnnnnnnnnnnnnnnnnnnnnnnnnnnnnnnnnnnnnnnnnnnnnnnnnnnnnnnnnnnnnnnnnnnnnnnnnnnnnnnnnnnnnnnnnnnnnnnnnnnnnnnnnnnnnnnnnnnnnnnnnnnnnnnnnnnnnnnnnnnnnnnnnnnnnnnnnnnnnnnnnnnnnnnnnnnnnnnnnnnnnnnnnnnnnnnnnnnnnnnnnnnnnnnnnnnnnnnnnnnnnnnnnnnnnnnnnnnnnnnnnnnnnnnnnnnnnnnnnnnnnnnnnnnnnnnnnnnnnnnnnnnnnnnnnnnnnnnnnnnnnnnnnnnnnnnnnnnnnnnnnnnnnnnnnnnnnnnnnnnnnnnnnnnnnnnnnnnnnnnnnnnnnnnnnnnnnnnnnnnnnnnnnnnnnnnnnnnnnnnnnnnnnnnnnnnnnnnnnnnnnnnnnnnnnnnnnnnnnnnnnnnnnnnnnnnnnnnnnnnnnnnnnnnnnnnnnnnnnnnnnnnnnnnnnnnnnnnnnnnnnnnnnnnnnnnnnnnnnnnnnnnnnnnnnnnnnnnnnnnnnnnnnnnnnnnnnnnnnnnnnnnnnnnnnnnnnnnnnnnnnnnnnnnnnnnnnnnnnnnnnnnnnnnnnnnnnnnnnnnnnnnnnnnnnnnnnnnnnnnnnnnnnnnnnnnnnnnnnnnnnnnnnnnnnnnnnnnnnnnnnnnnnnnnnnnnnnnnnnnnnnnnnnnnnnnnnnnnnnnnnnnnnnnnnnnnnnnnnnnnnnnnnnnnnnnnnnnnnnnnnnnnnnnnnnnnnnnnnnnnnnnnnnnnnnnnnnnnnnnnnnnnnnnnnnnnnnnnnnnnnnnnnnnnnnnnnnnnnnnnnnnnnnnnnnnnnnnnnnnnnnnnnnnnnnnnnnnnnnnnnnnnnnnnnnnnnnnnnnnnnnnnnnnnnnnnnnnnnnnnnnnnnnnnnnnnnnnnnnnnnnnnnnnnnnnnnnnnnnnnnnnnnnnnnnnnnnnnnnnnnnnnnnnnnnnnnnnnnnnnnnnnnnnnnnnnnnnnnnnnnnnnnnnnnnnnnnnnnnnnnnnnnnnnnnnnnnnnnnnnnnnnnnnnnnnnnnnnnnnnnnnnnnnnnnnnnnnnnnnnnnnnnnnnnnnnnnnnnnnnnnnnnnnnnnnnnnnnnnnnnnnnnnnnnnnnnnnnnnnnnnnnnnnnnnnnnnnnnnnnnnnnnnnnnnnnnnnnnnnnnnnnnnnnnnnnnnnnnnnnnnnnnnnnnnnnnnnnnnnnnnnnnnnnnnnnnnnnnnnnnnnnnnnnnnnnnnnnnnnnnnnnnnnnnnnnnnnnnnnnnnnnnnnnnnnnnnngaggccgaggcaggaggattgcttgagcccaggagtttgagaacaactttaggcaacgtggtgagacctcatctctacaaaaaaataaaaaattagccaggcgtggtggtgaggacctgtagtcccagcaacttgagaggctgaggtgagaggatcccttgagcctgagaggtcgaggtaggaggattgcttgagcctgagaagttgaggctgcagtgagccgtgatcatgccactgcaccccagcctgggtgacagagcccttgtctcaaaaaaaaaaaaaaaaagaaaaaagaaaagaaaaaaaaaaaagaaaatgggactaatacttttgtatagtattgttggtatatatagatatataggaatagtatgtacaggaaatatatatctataaattctcagtaacttgaatcatattcttaacaacacaggaaatttcctatctaaaagaacactattatgaattttttgcaattaaagatgacttttataattaaaaagtaatcatgcatcaaactaccagttcatatattcaacttctggcacataaagtttttctaagaatattatgcccgggtttctctcttaaacctgcttcagtaattgtaatattttaattttaacatggtatatgacaccataattagttaacaggcaatatttagggcctactacattcaatgggtaggcacaaagctcccgtgcaggaatacaaagtagtgataaaaagaacataatacttacataattagaaaatataaaagagaacatagtagtagccattataactacacatttcacatgtacagtgtcttaaagcactttctcacataaatgtagaaggtaatatctgtgtaaatgccctttcagtttgtccataaacatttgggagtgaatcccctcaggttctttacattttaattttaaaaagtatcttgccaggcagataatttacgactctaaactgtgactacacagttgtctacaaaaagaagatccttgaaaaacatttattcttgaccatctgaaataataacaaagggccttgagcatttactgtagccaggtacttttttcttttttgtttctttttgtttgtttgctatgaggcagggttaccctctgttgctcagaccggagtgcagtgatgcaatcacggctcattgcagccttaacctcctaggctgaagcaatcctcccacctccgcctcctgagtagctggagccaccacacctggctaatttttgtattttttgtagagacagggtctcactatgttgcccagactggtctggaactcctgagctcaagcaagcttctcacctcagcctcccaaagtgctgggattataggcttcagccaccacgcccaaccagccaggtactttttaatcctcccaacaatgttaatgataatattatcaccattttatagatggtgaagctgaggctcaaggagagaaagtgacttgtgtgatggcatttgtttttcaagtagtacagtcaagagataggaagcgaggcagtctggctccagagcctgggcgtggaatcactgcctcatcacagtcccatgttctcacttgaacattgcgattacgtgaattctagtccttcaacatttccatttaagaatttaattccataggtttttaagtctaaaaacatagtttgaatatgttaactcctttacaaagagccagaaataggctatgggacagtttgcagaactctttgaaagcttagaagagtggtggggagagtgcagaggggaagcgatggggatggtagaaagtaatgatttcccaacaactttaccatgtgtctgtactggaaattccttccactctatcagccaatgtccatttctcaccaatcgtggtcttatcctgttaacactggctattgctaaacctgctgtaagtaagtaagtagcaaagaatgagtatcatggtagaaagagctttggctttgtcatcagattgacctacatttcaattctgtaagttgggtcaagttatttgataccctcaatctcctgatctttaaaaaggggcagtatggccaggcgtgagccaccacataatttcagcactttgggaggctgaggtgggcggatcacctgaggtcaggaggtcgagaccagcctggccaacatggcaaaaccctgtctgtactaaagatacaaaaaaattacccgggcatggcggcacttgtctatagtcccagctactcgagaggctgaggcaggattcgcttgaacccaggaggcggagattgcagtgagctgagatggtgccactgcactccaacctgggtgacagagtgagactccatctcaaaaaataaatgaataaaagtaagtaaataaataaataataaaaaaattaaaagggggcactaatagctaacactgatcacacccttacttagcttcattctaagcccttggctatctcatttattcctcacagtgatgctttgagatagcgataattattactagtctcattttgcaggtgacgataatgaggaatcaggattttaaatagttagtttaccaatgtgtcacacagctacacagctgaagagctagggctcaaacccaggaaatctgactttagagcagaggttggcaaatgtttgcagtaaaggtccagacagtaaacactttagatttcataggccgtatcatctctgctgctacttaactcaactctgccaccgtccccataaatgcagccacagactatatgtaaacgaatggctgtggattatgtgccaacaaaactttattaaaacagccagggagtcaaatgtgcaggtctccagcaggcgtctaccccgtactctagagcccacatttaaaatttccactcatagaaatgtcatgagaaatcaaattacacatacgtgttcaaaaaaatagttaactatcattaacttgggagttttaaaaccatacattaaggaaactcttggagagattatttctttctttttttaaaaaaaaaaatttgacctctgagagcaaagaacaagagagattatttctaattcatctccttccctgtagggaggattgcatttaagctggctattctcttttagcgctgctctgttcttagcatgtaagtgaaatacactctccagccacttctccagaaatactagacatggggtgggacagtatcctcctctgaaattctctcatggtgctaactgctgacagtcagcagaaggtctcactcataaagatgttcaataaaatggagttcatcttcatcatcttaatcaattatttaacatcattgtgtattgcattggcaataacatggcatatgataacataattagttctaagtgtaagaggataagtagaacttctactgctgcataatttccatctgtctctaaatataattaaacaagaaatgtgcagattttcaatcctcggctacatgtgatagctggcttattccctgaagtctgtcttggcccacagtccatccttgcttgtgcactttactaagccactgtcttcattttggcactcaatcaatgtttgttgaaggaagttttgtgacctcctagggctgaacaatcttatatggttttttatgttccctcccacccatttctagcacagtgccttgtacaaaaataagtaatctttaagtatttatcgctattaattatgttattaagaaggaaatgggccgggtacagtggctcaagcctgtaatcccagaactttgggaggctgaggcgggcagatcacaaggtcaggagctcgagaccatcctggccaacatggtgaaaccccgtctctaaaaatacaaaaattagctgggtgcagtggtgggtgcctgtagttccagctactcgggaggctgaggcaggagaactgcttgaacctgggaagtggagtttgcagtgagccaagatcaagccactgcactccagtctgggtgacagagtcagactctgtcttaaaaaaaaaaaaaaaaaaaaagaaggaaatcacagtccatttaattatttgacaaatatttattgtcttttaagtgtcaagctttgaggagtttatgataaccaagaagagacataaattctgctctctcaaagtttacattctaattgtagaaaaaaggcttaaaaaaaaaactgcagtagtgttatgtattatgaaaaggcggatgtttataatagacggtagatttgacctggcggacgctagactaaggctgacaagatacagaacttcaggtttatctcgtgcttttaattcctgagttttcggtctcttgtccccttataaacactactcaggcctcctgcttgcttagcagaatacttcataaacaaatttataaaatcgtttctattcctctgaataaataaaactcctggtgcaagagctactcattctttcactgaggactcagcctgaacttcctagtcatggctaaagcttcgtggctctccactgtctaccacagaaagtgagagacttagacccttcacaatctggtttcattttctttttgagcctcatcttctgccccatatccacctcctacatttcagctatttgagaccattccagcatttttgcaaatgcccacctttgctcataatgttccctctgctctgtctcctccctttccttcttttttttttttttgagatggagtctcgctctgttgcccaggctggagtgcagtggcatgatctcggctcattgcagcctctacctcctgggttcaagcaattctcctgcctcaccctcccaagtagctgagactacaggcacatgccaccacacccggctaatttttgtatttttagtagagacagggttttgccatgttggccaggctggtctcgaactcctgacctcaggcaatctgcccgccttggcctcccaaagtgctgggattacaggcatgagccactgttcctggcctccccttccttcttcatctacccttgccagactgtgaactccaaggaacatgcagtagccaccactgtatccccaagcatctagcacagcctcatacgcagccagtgctcaattagtgtttgaatgagcgagggaatgaatcaattcatatgcaaatattgtttaatcatttattttaccacatcattgccttttgcctacagacctgtacagatgctgactttagtaccagtgaattgactgtatcccagaagcccattttcagtgattgttcatagtatgtctttaaaaaaaaactgtaaattttaagtaagggttattgcattattgaagaaaccagtaatgacatttgaaaacagcccaagtcttaaaaaccagattgtcagcagttctcatgtgtccatgtagcagcggggtcggaatttaaatgagacagttggatgctttagactgatttcggcagtgatgtttctatgacccaggcctgtcaagtttgctgtgatgacaagtcaattagacaacagaaccattcttaacaagcctttatggtagctgttgttttgtctgaaaattaaattgatagtgtttcaaccaaattaaatgagtattattgtatcacagagacacttacctcaaacccttgaaaaatgttgcacgtttctcagtcttgatagccttgacttttttttttttttttttttttggtagctactgcgccttgccatgctgcccaggctggtctcgaactcctgggctccagcgatcctcccacctcaacctcacaaagtgctgggattacaggcgtgagccactgtgcccggccagccttgactattcgtaagagccagatcaagacaccaggcccatgttgagggagggctgtagaaaataacaacttcttctctatttaaaaagtacctaccatgtgtgccagtatataatcatattacacagctccaagatagactccaccagtaattctcgacagaaagcaattttatgcgcaccccctgcccccagatttgcaatgtctggagacatttctggttgtcacaacattgtggaggtagggggcttttgcatctagtgggtagaggacagggatgttatgaaacatctgaaaacacacaagacagcccctcataacatagaattatcacaaatatcaatagggctgaggttcaaaaaccctgggttagagaacacctatattccctgagcagctcaaattctgggattttatgaaattagataatatatgtgaaataatttttttttttcttttttgagacagagtcttgtgtgtcacccaggctggagtgcattggtgcgatcttggctcactgcaacctccgcctcccaggttcaagcaattcttctgcctcagcctcccaaatagctgggactacaggtgcatgccaccacgcctggctaagttttatattttttttttttcagtagagacagagtttcactatgttggccaggctggtctcaaactcctcaactcaggtgatcaggccgcctcagcctcccaaagtgctggaattataggcgttagccaccttgcccagcctgaaagaattttataaattgcaaaacactgtatgaattcaagctagtgttaaatgatagaagccactgtggcttctccttccttttcctttctggtgtctgccagtcggcctttctgttccttgccagatccctcaaaggcttaggtcaaaggagccaaggtaaggagtgaaactagaagtccctcctactgtttgttcatggattggaaaaacgttggcccgggaggcatatgtgtgctgaatttgtgagtttcatttttgttggtttcagcattaccccatcaacctttagagacaaagtgtaagtaatgcttatttaaagggaacaaggccaggtgcggtggctcacacctataaaaccagcactttaggaggccaaggcaggcggatcatttgaggccaggagttcgagaccaggctggccaacatggtgaatcctcatctctactaaaaaaagtacaaaacttagctgggcgtggtggtgcatgcctgtagtcctaactactccggaggctgaggcaggagaatcacttgaacccgggcggtggaggcttcagtgagctgagatggcgccactgcactccagcctgggcgacagaatgagattccgtctaaataaataaagggaacaagataatagtttcctaactggtatttgtgtgctgccaaacccctgcagaaaatctccccactccacccctttcgggagggtggcttcagccgtcttgtagtacacagcaggcctccctgagaacccacagcaaaaggccgcattctcaggtgtgtgttgatagaaacgtctgggaaaattgagcctcttggctttgcatctgtttatcatacacaagcattcattgaatgatgtgctttgacataacaaaatctgtacaatcatcaacacaattaagacccattatgaatgaacgctttctcagatgagcgaggggtgggcagaaggcatggcccggaatgtcattattcccttgtatcttcaacctcccaggattttacctaaagaaaggagagtcaaggagagatgtttatgtgccccaagggccatgcttttcagtagcaagaggtccctgcctgtgatagaaaaaaagagcccgtgtttcaaagtcttcggcttattgtttgacctcccaagtaaattccatgttctgcctccattttgagtggaactccttttccactttcaaactctgaggtaatagaaacatcctggtgccaggggcctgcccgagagtgggcgtgtcctctccaatgtttattctactgggtggtggtaacttggaccaaggcagtaagataaatgctcagggtaaggccaaatcttggaaaccttttgcagaaactgtttttctctctgatttcctaccccaccccctccttcaccccaagtttggggcaacatcttcctttaccaaataatcaaataatttttctgtaaaccatgaggttattctgaacttttgtgagagactcctctctaaaacacaaactatggcttttaagtggcattctttaaagtaataataataattgccaaactttttaaacaaattgtgtgccacacattgccaaatgtcacttagtcctggtgctgttactagaaccatcttagagatgtggaaatggaactaaggtgatttgcctgaggagacacagctagtaagtggcacagtcatgacttgaacttagatctctgactccaaagcctttgctcttatgtgcattgtgtgtgttaggtcatgcttaagacgtgattattaggacaaaattttatggtatgaataaggaacatcaaaatagaaatctaaccacagagatagaattatctcttggatcaacacattttaaaaccctccactgaattaaattccaggtagtgattggaagacactgtaccccactgtatatagcttcaaattgcaatttgtcagttggtcagcaaataaagctctcccaagaattccaaattgcatactcatctcaaacacacacacacactcaaacacacacactcacactcacacacacacactctcacagtcacactccaagagctgtgaaccaaagttaacttgtagtcttatttatttatttatttattttgagatggagtctcactctgtcacccaggctggagtgcagtggcgcagtctcggctcactgcaacctctgcctcccgggttcaagcaattctctacctcagcctcccgagtagctgagattacaggcacccgccaccatgcctggctacttgttttgtttttttatttttttatttttatttttttgagacggagtctcgctttgtcacccgggctggagtgcagtggcacgatctcggctcactgcaagctccacctcccgggttcacgccattctcctgcctcggcctccagagtaactgggactacaggcgcctgccaccatgcccggctaatttttttgtatttttagtagagatggggtttcactgtgttagccaggatggtctcgatctcctgaccttgtgatccacccgcctcagcctcccaaagtgctgggattataggcgtgagccactgcgcctggcctgttttaaatttttagtagagatggggttttaccatcttggccaggttggtcttgaactcctgaccttgtgatccacccgcctcagccttccaaagtgctgggattacaggcctgagccagtgcagcggaccggtagtcttattaattctagagtaaactcatgcatgattttgatcctaggtaaacactggtatgtaaacattgataatatttcccagtagtacactggtatcctttgccctctaaaatgtcccagttcaaagttaaaatcctaatgaaagctactctgaacaaacgctaaaaagagaattcaaatccttgatgatgtctgctttacctgtttgccttgaaattttattttaacccaacaagttcaaactctccctaaaacataacaaaaatccctagttcagaataataatagcttgatttgaaggtatattttttctgcttgttttatatacaaaactgtgagtaaatgatttatttcaaatatattgccatgtttatttaatgctagcagccttcagtgaagactcatgcatttttagtgttgggaagaatagctgtgtgctgggagggtcctacctcaggggatttggcatctacatagatggttggatattttgcatccaatgtggcaagtctcttcatgttctttctgggagagcttctgcaaagtgctttagccaaggattaggtgagaaacaggcttacacatggatgcataagccacatcaccagtggagaatcacactgccagacagcttacctgctatgaaaggaatctgggagactctgatacactagtctccaccagaactcacaggctaggcttctctactgactggtttaaagttggctgggataacctcttgcctgttttcccataaacacagaatcctacatggggcaagattcttccctccagttcaattttttttttaagttttattgtcttttttcctttttttttttttttttttttttgagactgggtcttgctctgtcacctaggctggagtacagtggcacaatcatagctcactgcagccttgacctcccaggctcaagtgatcttcccacctcagcctcccaaatagctgggaccacaggtgttacgccacaacacccagctaattttttaaatttttgtagagatggggtctcactatgttgcccaggctagtctcaagctcctgagctcaagcaattctcctgcctcagcataccaaagtgttaggattaaaggtatgagtcaccacgcccagccttaagttcagttttcttgtgctaacattccttgatcacttagtgctaggttctgcactaagaactttacacaaatcattttacttaatcctcatcacagccctatgatgaaaatcagactcccagggttcacacaccagctctgatgctcattaactgagaatctacttagcctctctgtgcctcagtttccctatctgtagggtggagaccctagtagtataccatatagacactgtgaggattagaatgagttaatatgcacaagcatagcactctgcctgtcacataatagacattcagtaaacattggttaatacagtcatcattttagagatgagaatatagattcttaatgatgttaaatggcttttctcaaggttcacagctagaagtagaggaactaagatttggacttcagactgtctgactctagagacttgcatttattcaacatgctacgaagcctaaaccagaatgcccagtcccttttaaaactgtcacatggtgaatggatgaaactggggaactctgtgttatttatctagatattttgattggctcacagataagtttctacttctgaagtatacttattattcattctgtccacacttctgccccaagcaagaatctcaacattcaggatatggtatttcacactagtccccagacacccctgatatatttaaaagcaaaattctgatggtatatgggcttttaacttggggaactatggccttatcagaaacgaatgttaacaatgttgaggtgtatgacccttttgaagcaggctctggtcagtaaccatgagtacaaatacctcaattctcacctatttggcatttgaagcgtaattcagttaactgagttcacttaactcagaagtcagctccacaaggacgaggtccaccatagctagcacagtatctggcacatagcaggtggtcaataactatttgctgaatgaatgaatgaatgaatgaaaacaaaccctcttgtatctcttttggaattttaagaaattattaatatataagtgtcaggagctgagccaacaaccttcatcagatattttcttcttccatgtctcataaatttggccattggagttaaacggaaaacagcttggaagagggggaaaggcagctaaacaacactgtctttttttttttttttttnnnnnnnnnnnnnnnnnnnnnnnnnnnnnnnnnnnnnnnnnnnnnnnnnnnnnnnnnnnnnnnnnnnnnnnnnnnnnnnnnnnnnnnnnnnnnnnnnnnnnnnnnnnnnnnnnnnnnnnnnnnnnnnnnnnnnnnnnnnnnnnnnnnnnnnnnnnnnnnnnnnnnnnnnnnnnnnnnnnnnnnnnnnnnnnnnnnnnnnnnnnnnnnnnnnnnnnnnnnnnnnnnnnnnnnnnnnnnnnnnnnnnnnnnnnnnnnnnnnnnnnnnnnnnnnnnnnnnnnnnnnnnnnnnnnnnnnnnnnnnnnnnnnnnnnnnnnnnnnnnnnnnnnnnnnnnnnnnnnnnnnnnnnnnnnnnnnnnnnnnnnnnnnnnnnnnnnnnnnnnnnnnnnnnnnnnnnnnnnnnnnnnnnnnnnnnnnnnnnnnnnnnnnnnnnnnnnnnnnnnnnnnnnnnnnnnnnnnnnnnnnnnnnnnnnnnnnnnnnnnnnnnnnnnnnnnnnnnnnnnnnnnnnnnnnnnnnnnnnnnnnnnnnnnnnnnnnnnnnnnnnnnnnnnnnnnnnnnnnnnnnnnnnnnnnnnnnnnnnnnnnnnnnnnnnnnnnnnnnnnnnnnnnnnnnnnnnnnnnnnnnnnnnnnnnnnnnnnnnnnnnnnnnnnnnnnnnnnnnnnnnnnnnnnnnnnnnnnnnnnnnnnnnnnnnnnnnnnnnnnnnnnnnnnnnnnnnnnnnnnnnnnnnnnnnnnnnnnnnnnnnnnnnnnnnnnnnnnnnnnnnnnnnnnnnnnnnnnnnnnnnnnnnnnnnnnnnnnnnnnnnnnnnnnnnnnnnnnnnnnnnnnnnnnnnnnnnnnnnnnnnnnnnnnnnnnnnnnnnnnnnnnnnnnnnnnnnnnnnnnnnnnnnnnnnnnnnnnnnnnnnnnnnnnnnnnnnnnnnnnnnnnnnnnnnnnnnnnnnnnnnnnnnnnnnnnnnnnnnnnnnnnnnnnnnnnnnnnnnnnnnnnnnnnnnnnnnnnnnnnnnnnnnnnnnnnnnnnnnnnnnnnnnnnnnnnnnnnnnnnnnnnnnnnnnnnnnnnnnnnnnnnnnnnnnnnnnnnnnnnnnnnnnnnnnnnnnnnnnnnnnnnnnnnnnnnnnnnnnnnnnnnnnnnnnnnnnnnnnnnnnnnnnnnnnnnnnnnnnnnnnnnnnnnnnnnnnnnnnnnnnnnnnnnnnnnnnnnnnnnnnnnnnnnnnnnnnnnnnnnnnnnnnnnnnnnnnnnnnnnnnnnnnnnnnnnnnnnnnnnnnnnnnnnnnnnnnnnnnnnnnnnnnnnnnnnnnnnnnnnnnnnnnnnnnnnnnnnnnnnnnnnnnnnnnnnnnnnnnnnnnnnnnnnnnnnnnnnnnnnnnnnnnnnnnnnnnnnnnnnnnnnnnnnnnnnnnnnnnnnnnnnnnnnnnnnnnnnnnnnnnnnnnnnnnnnnnnnnnnnnnnnnnnnnnnnnnnnnnnnnnnnnnnnnnnnnnnnnnnnnnnnnnnnnnnnnnnnnnnnnnnttcaagggattctcctgccttagcatcctgagtagctgagattacaggcatgtgccaccacgcccagctaattttgtatttttattagagatggggtttctccatgttggtcaggctggtctcgaactcccaacctcaggtgatccgcccaccttagcctcccaaagtgctgggattacaggtgtaagccactgtgcccagcccagtgtatgattttttaatggcctctaatgaaatcctagttttatcaactctaatttttgtcttttttgcatctctgaaccttctcttttttttaaaggattttgtttttactgtggtatattatacataacattttaccatttttaagtgtatggttcattggcaggaagtatattcacactgttgtgctgccatcaccaccatccatctccagacctttattatccctaattaagacacccacacccatgaagcactaattccccactcctccctttctccagcccatggtaaccactagtctactttctgtctatgaatttgactactctaggtaccttatataagtggaatcatataatatttatccctttgtgtctggcttatttcactattagcataatgtcttcaaggttcttccatattgtagcacgtatcagaattttattcaaggctgaataagccgggcacggtggctcacacgtgtaatcccagtattttgggagaccgaggcgggcagagcacctgaggtcaggagttcaagaccagcctggccaacatggtgaaaccccacctgtactaaaaatacaaaaattagctgggcgtggtggtgtgcgcctgtagtcccagttacttgggaggctgaggtgaattgtttgaacctgagaggtggaggttgcagtgagcagagactgcaccactgcacgccagcctgggtgacagagtgagactctgtctaaaaaaaaagcaaaagaaaaaaggctgaataatactgcattgtatatgtataccacgttctgtttatcataatccattgatcaacatttgggttgcttccatcttttggcaactgtaaatactgttgctgtgaacatcattatacaagtatctatttgagtcttttgggtatatacctagaagtggaattgctggatcaaatggtaattctatgtttaattttttgaggaaccaccatactgttttttacagcggctgtaccattttatattcctaccagcactgcatgagggtttcaatttctccacgtccttgccaatgcttatttcctgttttttgttgtttttataataactatcctaatgagtgtgaagtagtatctcattgtggttctcacttgttggtatgcaatacttgtagttggtgtaagagacacagcaaatttggatattgcattaatcaatgtctggctgtaattagatatatatgcatgtatgtatgcattgattcgtctcctccaaaattacaacatggtttataagaacatgtgaacaataagataaataatacaaacagctcaattcatgtcactgggaaaactgaaaaaatagaagaaaactaaaaaatgaaactataacccaaattagatgaacatgaaagtgtgttgtaatgtcccctacagttactaaaattggagtgaaaaaaatcaatcgtgaacttcctagaggccaaagtaaaaataaaaaccgggtcgctaacatggtttgtttattacagaagatgatagcataggtgaagaaaggcttttcttggctcattgatgtaagaaataagctatcgctattttaaaatatgtagagataattgtgttactgacaccagcagatttcagactgaaagcaaacaggattttttcttatattattggggttggaattggcaatgactccgtagcctgactactgtaagactgtttttgtaggtagaatagtagtttcaaagcacagttagggtgacaggaaggcaactccacctatctcagcagagagataagttctattcccttggactttagtcagttaatgttgtatacagtacaacaggtaagatcttgaattgtctcctatgtatttatatatgtacctggcatttcctgcctaggtcacagattgtaactacatgggtgtttatgcaaatagtcctcttaaaaatatatccttatcttccatttggaagaagggaaaggtcttcatgttcagatttaatgttgaaatttcttggttgggtgtggtggctcatgcctgtaatcctagcactttgggaggctgaggcaggaggattacttgagcccaggagttcgagactagctggggtaacatagtgagactctatctctattttaattgggatctttttttttttggttcctttttttgtggagaacgaggtctttctatattgcccaggcaggtttcaaactcctgggctcaagtaatcctcccacctctgcctccctaagagctgggattacaggcacaagccactctgcctggccctccatctctatttttaaaaaaagaaaaaaaaatgtttttcaacttgaaactacagaaactaattttccaagtatactacaaaaaaatttcatgataactggagacgtcaaaccagcttccaagcacttgaagaggaaaaaaataataagaatagaagccacgtgtaacagatatttttaaagaactgaagatgtttatcttaagaattactctaaaattgaaagaattggtctaagattttactcaaaagtttggatgaaattaataactgacatttcttgagcatttataatattctaggcaccattcaaaatgctgtgtatgtattaactcactcctctaaacttaatgaggttaatactattattatcattctgattttataggtagggaaactgaggtgaggcatggagcagctaacactagcaagtattagagctgagattcacaaacaaacatatgcagtctggctccagaagccacatacttacctgctaaactgtactgccgcttgatattagagcaaattaaccacaaaaggactattttggccatctggcaaataaatagctcagatttattttgtttcattatagttttattttttccttcaatgatcaaattcatttttattatccttgaaatttcccttaatattcttgtatacatctcctagtcctaaattttaaaaaatgaatgatactccgggttctaattaattgatgaaaccttatatggccattaaaaatgatgtttttacaaagatttttaagaatacagaggaatgcttataacataaagtagcaccatgtaaattaggcggaagccaggcttccccctcccacctcctcaagaaaacatctagaaaacagatgagaaagtttcattgtgctatcattgggtaggaaaattaggaataatttcttatgtacttttcttaactttctataaatttaactgaatacttttatagtccaaaaaatgaaatagatttcattttttaaaaggcgaattggagcctttcattacagaagtatagtctgcagctcatcgtaataatcttattgcataatttagaatcacttccacagagcccttggccatataagtgaaggcggcacagttcagacctgcactgtgatacgtggctgtttaattaaaatttaaaatccagctcctcagtcacactagccccattccaagtgctcagtagccacatgtggcaagtgacagcttttctagcatcatagaaaattcgattgcccagcattggtttggaagaaaaaacagggaatctggagccagaaaacttggaatcaagtctgcctacaagctgacacttgctgtgtgaaatggggcagtttactcaacctaagcctatttccccatgaccaaattgggactgaggataataccatgtaccatatacagaggttaagaaaattaagagaatgcaggtgacagttctctgaaaacaatagtgtggtttaccaggtagatgctgcttcccagtcccccagcttgaagtcagtctagctcttcaaggactgattccaaatctttgaatgcttcacaccaagaattttacctgaatgccaccatcaaaatcagattagctcttattacagttcctggaccaagcccgtggcaatgtgcacatttcatttcttccttgtaaaaagctttaatacacagctctctctatacaatgacagctcctaaaagttttctttaataatttaaaatcttcactgtatttccattcctacaattaaaaagactcccttaaaaaagaaaagaagaaagctgtgttcaccaaagaaatacatggagtttgtcaaattccatataacaaggaaatcaggtggagttaacggtgcaggaatgaagcaaaagaacgtgaggtttttaccaaaaatgagagcagcttcgcaaaacttcaaagctgtcggggtactgatgaaatggaagtacttgctcattctgatttttttttttctctcctaactcacttctggtttttgctgcaagacaacttgactattttagacaaatgtagggctgctgcatttccagaacgcctccatcctatttctcatttaaaccacctccccttccccgtggcctattaatgcatacttgcaaggctgcgaaacacaacccaaaagaggcaagatccagcggttccccactcacgcttctttctgcttccccaggtttccgccagctgtggatgcctttgacattatgaccgcagaggattccaccgcagccatgagcagtgactcggccgccgggtcctcggccaaggtgcccgagggcgtggcgggcgcgcccaacgaggcagcactgctggcgctgatggagcgcacgggctacagcatggtgcaagagaacgggcagcgcaagtacggcggcccaccgcccggctgggagggcccgcacccgcagcgtggctgcgaggtcttcgtgggcaagatcccgcgcgacgtgtacgaggacgagctggtgcccgtgttcgaggccgtgggccgcatctacgagctgcgcctcatgatggactttgacggcaagaaccgcggctacgccttcgtcatgtactgccacaagcacgaggccaagcgcgcagtgcgtgagctcaacaactacgagatccgcccgggccgcctgctcggcgtgtgctgcagcgtggacaactgccgcctcttcatcggcgggatccccaagatgaagaagcgcgaggaaatcctggaggagattgccaaggtcaccgagggcgtgctggacgtgatcgtctacgccagcgcggccgacaagatgaagaaccgcggcttcgccttcgtggagtacgagagccaccgcgcggctgccatggctcgccgcaagctcatgcctggccgcatccagctgtggggccaccagatcgccgtggactgggccgagcctgagatcgacgtggacgaggacgtgatggagaccgtgaagatcctctacgtgcgcaacctcatgatcgagaccaccgaggacaccatcaagaagagcttcggccagttcaaccccggctgcgtggagcgcgtcaagaagatccgcgactacgccttcgtgcacttcaccagccgcgaggatgccgtgcatgccatgaacaacctcaacggcactgagctggagggctcgtgcctggaggtcacgctggccaagcccgtggacaaggagcagtactcgcgctaccagaaggcagccaggggcggcggcgcggctgaggcagcgcagcagcccagctacgtgtactcctgcgacccctacacactggcctactacggctacccctacaacgcgctcattgggcccaacagggactactttgtgaaaggttagtgggggctcttctcctgggtggggcccccaagaacgttgcctcctaggcagggggcaccagggataccgtggctggcatttgctgagctggtaggtgctgaaggccctcccacccccgttttgggtttgcattctgggtctaattctttcctggcaccgaaggccgtcacttatgcagcactgatagaaatacagatcgttctggggtgagcggtaaaatcacaggaatatgcaagtgctggaattcttccttgccgaggtccaccgggttaggggctagtccaccattctcttggtgcttacgttaaaacctgcttgtgatattaaatcttaagatgttggtggagtccgtgatttttaattttgttttttgttatcactgattaggatataatgacacccagcataacctggaaaataagatacataggttctgggtcctgttctctgattaactgggtctgtgactttagttagtcactttaatctcccctggcctgttttctcaagcatgaaatgaggaaggtggaccagcaaatccccttccaaatctaactttaaaaaaaattatttaatagtatatatatatgtatatatatatatatatgtatttatatatatatatatgtattttatatatatatatatgtattttatatatatatatatatatatatttttttttttttttttttgagacagggtctcaccatgctccccaggctggtcttgaacccctgggctcaagccatcctctcgcctcagcctcccaaagtgctgggattacaggcataagacaccacacctggccacagttttttttttggcgggggggagggggtggtgggtagtctatgaatgtttttctttactgaaattgcagatacaatcctagaaactcaccctgcaagtttgcctcttgtactaagaagacatgcttaggatgcaaatctaggctgaaatagaatgttggaagcatctttaccagcctattaaagagcaaaggtgtagccacctgcaattaagactggggcagttaaatgccgagaaccgagggctgaggtctgcctccagcaccgtcactgttggttgctgatcatcttttgtgttgttattacaagcaggcagcataagaggccgagggcgaggtgcagctggcaacagagccccagggcctaggggttcctacctcgggggatattctgctggccgtggtatatatagccgatatcatgaagggaaaggaaagcagcaagaaaaaggatatgaactggtgccgaatttggaaatccctaccgtcaacccagttgccattaaacctggtacaggtcagtatgaagcagattgagaatgctcccattcagcataaaccccagcccttctgtttgaagtgaatccaagcgtttttcaggctctcacatctgcacaggggttcctcttctcctaggcagctagagacaaggcaaaaataaagtgaccccctggacctccttatctagaacttcaggggatggtgtagctttgactatgttcaaatcaaacttgcctgagtaaggttttttttttgtttgtttgtttttttgttttttttttttttgagacagagtctcgctctgtcgcccaggctggagtgcagtggcatgatcttggctcactgcaagctctgcctcctgggtgcacaccattctcctatctcagcctccagaatagctgggactacaggtgcccaccaccatgcccggctaatttttttttttttttttttttgtatttttagtagagatggggtttcaccgtgttagccaggatggtctcgatctcctgaccttatgatccacccgtctcggcctcccaaagtgctgggattagaggagtgagccactgcgcctggccatgcagtaaggttttcaaagggctgtcacccattgttaggttttgtctcagtctgtggctaagtaaggagagttgtagggggaagaaaggaagaacatgaggctctctgtatcttctatcaggtaaaacctgtcttttccttactcaggcctatttctgccccgaccatctgaagtcggagggtagagcttattgccccattctgagagttgtttggaagggcagaaaattccccttcaggagtaagcagcaccttttgtcccttgtcatggtctgagcaaataagaatgcttgaggacaaggcagtggtgaaagttttgttgttgtttgagatggagtcttgctgtgtcacccgggctggagtgcagtggcatgatctcggcacactgcaacctccacctcccgggttaagcgattctcctgcctcaacctcccgagtagctggaactacaggcgcgcaccaccatgcctggctaatttttgtatatttagtagagatggggtttcaccacattgcccaggctgttctcgaactcctgacctcaagtgagccacccgcctgagcctcccaaagtgctgggattacaggcatgagccactgcacctggcctttgctgaaaatttttgcagctaattccctggtttctcatttccagcactcatttcctcctctagttggatcagtagattgggagtagggatgctcaagtatttcaagccagggaccctgaacttagccttcacctccaggccctacaaacctgtttattaatgtcattagtgcccatgaccatctaatgtgaggccggtcttctgatccgaacctgcaaaaaacattaactccattgtgtgagtctatcacaaactcacgtagcaccctgcagaagcatccaaacacatggaaagctcagtccgtgggtaattggcacgaccctcctccagacccctcctggcttcagcaggaggaagttgaagaactgtttggagcccagctactctgattttcttctggttgagattgtacacttctctccctagctaaaatagagtcaaggaatctgtgcatttgggacataggtacacattggcctcatagagttaaaaagcatttccccaattgaactttcttttgatgattctagtaatgattttttttttttttttttttttgcctgtgtaaaaattctgcaatttctgcagttaagtgactccttagactagattgccttttaaatgtcattggcactgtgggcaaagtaaaactgatcccacagctctgtaacttaataaaatagagcctggatatgggagtcgtcgcttctacttgttgagaagggaactccctttggcaagttacggtagcttaaggtttaacaagagaaaagaactgttaaataatctttaactatgtaaagttgtgtcctggagcctgaggtagaaattcctgtgggctgatagccagaacaattcatttacttcatacaaccccttgtagcttaaactcacaaccctctctgggccccatcgattggcgtctatttctgatcatccagaaaatgagaacattgtattttaggagaggcaccagggtggtggtgaagtatctgggcacaagaccagtggaagatatggttggaaaggcaggtaaaagatttgattaaggttttaggtatattttatcgaatggctgtaccattgtttagcttacaatcatttgtctctttacctttgattgagtctgtcctatttagaataaatgtacctacagttggagaaaaccagaaatagaaagattctttgtgtacacatttcatatttttgtttgtcctttcaacacacacacacacacacacacacacacacacccccgccccacacacacacactcacacaaaagggctgatatcttttccttttgatctcttcttactgtaccttgacattcaatagctgctgtttgaatctctggttgaaatcataattttggactttacttgcagaaattctttgaattgggaggtcccactaaaagccaatcactccacatcttcactactttgcgtgggcatgaggaaactggggaatgtgctatttttttttaccatgtgtttttccttgaatcggtaatgttgaaatctgaaatacagggtggggaggatgtacacaggtctgagttctcagaatgaaaccctcaacagcacctgtttcttaaatagtggtgaaagtgaaaaaaaggcagtgcggctggtaatgagtgaggtgagtaggaaggaacaggcaggcccaactctcacaggcagtaggcttcaagcctctgatctcacttcttcgtctaagcctgttttcccatagtcagaggccctttcttgctcagtaggacatcaagaataacattcaaactgtgatttttctgtagaaatagtagaaaatattggtgcaaaagccttactctaggggtctcttccacaacaggcagggggagttacctgccaccgcccatcccttcctctagggagcaggcatctgggtacatggcttgtactgagagaacaatagtgagcatggagaggcccaggacctctaaacgtggttttaaaaaatatcttaggctgggcgcggtggctcacacctgtaatcccagcactttgggaggccaaggcagttggatcgcttgagctcaggagttcaagaccagcctgggcaacgtggcgaaaccctgtctctacaacagcaaaaacaaaaagctgggcaaggtggcctgtacctgtagtcccagctactcaggaggctgaggtgggaggatctcttgaggccaagagattgaggctgcagtgagccttgatcgcaccactgcattccagcctgggccacagagtgagatcctgtctcaaaaaaaagaaaagtttttaaaaaaataaaaataaaaaatatcttagagcaagtgctggaccccactcagcgactgaaagtgattgacctgtttttccttcttgcttctcttgcagtagccatccctgccattggggctcagtattccatgtttccagcagctccagcccctaaaatgattgaagatggcaaaatccacacagtggagcacatgatcagccccattgctgtgcagccagacccagccagtgctgctgccgccgcagccgcggccgcagccgccgcagccgctgtcattcccactgtgtcgacgccaccacctttccaggtagagttcttattgcaggcattgtcatttgtgtgtgaagcctctctttaacatggattcatttagtattcagcactgagaatttactgtgtgcctggctctctgttacagctatggttgggtgacacaaagcattttgaatttgaagcatgacagaaaaaaaaatttttaattaattgtactaccctaataatatcattgtattaagggtggtaatcaatatgcaaaaattatgtgtaatttttcacagtgtcataatattgtgcatatatttttttaaaatagcactggataatttttagctcatattgttaaagagctgacacacaaagtccagggagtgatttcacattttcacatttcaaactgcagctcaatgaagattttttaaaaaaatgttaacccccgtgtgtgtgtgtgtgtgtgtgtgtgtgtaaagagagagagagagagaaagaacatctgtatagatacgtaaaattttgtgctgggtacagtggctcatgcctgtaatcccagcacatagggaggccaagatgggaggatcacttgaggccaggagttcaggaccagcctgggcaacatggtgagacactgtctctacaattttttttttttaattagcctggcatggtggcatatgcctgtagtcccagctactggggaggctgaggcaggaggaccacttgaccagccttgaggtcaaggctgcagtgatctgtgattgcactactgcactccagcctgggcaacagagtgaccccctgtctcaaaaataaatttacaaaatatgcccannnnnnnnnnnnnnnnnnnnttccacctatctcccactgttcccctatctcttcccaaactcatcttaccatgttggcctccttccccacctttgttcatagtgtatcctggtttctttattctcatctcttccatagaatctttcccatccacctcctagagaaattttctctctctctttttttttttttttagacggagtctcgctctgtcgcccaggctggagtgcagtggcgccatctcggctcactgcaagctccgcctcccaggttcacgccattctcctgcctcagcctcccgagtagctgggactacaggcgcacgccaccatgcccggctaattttttgtatttttagtagagacggggtttcaccgtgtcagccaggatggtctccatctcctgacctcgtgatccgcccaccttggcctcccaaagtgctgggattacaggtgtgagccactgcgcccggccatgaaattttctctcttgtactcctgattactacatcattacttggcctatggctgccagtgtgttctatctcccaaggaaaatgaagctcctacagaccaaagactgtgtcttgtttctttgtatcttcaccttataggacatagggaggacatccatttaacagaagaaaatcttgttaaagctgttttctgtgaggcagtgaatcatgaataccgatcacaagtactcaggcccaggatcccttatccaattgaaaaagaattatccaggccactttttttgatttttgatttttgatttttttgagacagtctcactctgtcacccaggctggagtgcatggctcactgcaacctcaacctccctggttcaagcaatcctcccacctcagcctcccaagtagttgggaccacaaacacgcaccaccatgcccggctaacttttttatttgtagggacaaagtcttgctatgttgcccaagctggtattgaactcctgggctcaagcgatcctcccacctcaagctccccaagtgctgggattacaggcatgagccgttgcctacattttttaaaaaacagagattcttagactctaatccctgaagattccaattcggtcaaactgggctggagtcctagaattgatattttgcacagctcctcaatgattctgaaacagagccaggcctgtgaccctccacagtaggatgctgtttacttgcttttgcccactctgaacactagtcttgactgcattattcagaaagggcagactaattgaagcttatttatctttcagtgtgtcattaagtattctttaacttgggatctctgaaagacaaaaagaggaattggttgtaaatgacactgtagaataacaactaagtatagttataatacttgtggactgacggtaaatatttactatagcgtagcagcagtacttagtggaattctgataataatttctaattctcctttactaagaaattcatgaacacttgtctttcatgtgcactgtgagttctggtcaggtccaaattccaggcaccataatcatgtcctgactatttctgtctcctatcagtccgcactggctgttgccatcagggtttttttttgtttgtttttgtctttttttgtttgtttgtttgtttgtttgtttgtttgttttttgcgacggtgtctcgctctgtcgcccaggctggagtgtagtggcgtgatctcggcttactgcaacctccgcctcccaggttcaggcgattctccggcctcagcctcctgagtagctaggactacaggcacgtgccaccatgcctggctaattttttgtatttttttagtggagacggggtttcacctgttagccaggatggtcttgatctcctgacttcatgatccgccctcctcagcctcccaaagtgctgggattacaggcgtgagccaccgcgcccggccaccatcagggttcttatttgcagtctttgcttatcctcccctaccttcgatcatcctcccctaccttgtaggcgctcaggggtgttcctatttagccaatttaacaacacctcttggtatagttagagcaaggataactgctcctccttgacaggagggaagactgcagggactcttcacctgaattagaggcactttttttttttttttttttttttttttttgagatggagtctcactttgtcacccaagctggagtgcagtggcgggatctcagctcactgcaacttccgcttccagggttcaagcgattctcctgctagaggcactttttagggatgggtaaatgtttctcccactaccatcattgcatttttctttattcctgctctttgatgatgctgtattaatgcaattgtatactggtccccccttatccttgggggatacattccaagacccccagtggatgcctgaaacacagatattaccaaactaataatatactatgaacgaatttttttttccttcttcacaatttcacagatagaaaatttctttcttactgtagttcttagcaacctcagcataggattttttttctttccttattaagtagagaactttccccttttcatttacaggaaggcctttagtgctcctcgttggcatatccaaattgccagcattactactcttgcactttggggctgatattaagtaaaataagggttccttgacggtcaatctgataacccagatggctattaagtgacatgggcatggagcacagacagtgtcgttttcctggacaaagggatgattggtgtcccgggcaggatggagagggatgacatgagatttcatggagctactcagaagggtgcacaatttaaaacttatgagttattcatttctgaaattttcagtttaatattttcagacttcagttgaccgcgggtaactgaaaccatggaaagcaaaaccaagtgcttccccatatattctcattttacagataagaaaattaaggcccagcaaggagacagaattgctggccgggagtagaattgggattgggagatcagatgcctgatctctgcatgctttgtccttatagtgtggtgaatgctatcataaaagggacatcacatgaatgaaaagagaagccatgggtttggggacctactcttgattccaggccgtaagccagtgcatgtctatgtgcaaaacttggtgttggagtgggcagcctgaacccaggtgttgggccgtcctgtagcacatggaaaggtctctctcacatgttgccttccctgccatttcctctccctttttgcactggttattaaacctacgtccacacatgtggaaaaggtgacttgtgtcttgctgtgaaccacagtctttccagttctggagctcctctccctggttgtaaaatgtcactgatgagacactcattgtttagggttgtaagaagcaagttaacgtaaggctaaaagtgcaggctccagagtcacacattgcattgcttaaaagctgtgtcactttgtgcaggtcatttaacacttccacacaactccatataatcatagtaccaactctactggtggctgtgatgattcaatactgtcatacaaataaggcacttagaatagtgcctgagtttgggggtttgttttgttttgttttgttttgttttgttttgttttgttttgtttgagacaaggtctcacttccattgcccaggctggagtgcagtggtatgatcccagctcactgcagctttgaattcccaggctcaggtgatccttgcacctcagcctcttgagtagctggaactacaggagtacgcaccgccatggctggctaagttttgtatcttttgcagagacaaggtttcgccatgttgcccaggctggtctcgaactcctggcctcaagccatcctcctacctcaacctcccaaagtgctaggattacaggcatgagccacctcacccagcctctgagttattaattgttataattatcattataattataaattaaaattattataaattataattactatttgattatagttttaaaaagtaatcttaggctagaagttcctaagttcctttgagcacaattttggaactctgatttgcaaattttgtaacagaaattagagctaattcctttataaaaatccaggaagaaataattattttaattcaccatttcacatatgctgaattgtttattttgaagatgtattaacatatagggagaccataccagcatttactaccaggcattctatggctcatgaggtgcaccaaatattttgttaaatgaatgttttattttattcagaatctcttttcaatgaagcatctcacagaactagttccatggcaaacactttgggaaatactgaaccacagtcttcccattcatactcctgtttgttctgaaaacatcttatgttgcactttcaagtagacagaaggaagtagcaggggcttttctagagccagtggtggccgtcaacagttcaggcagctttacttagcttgtccttgcccacttcttcctcatttggaaactgctctttatccttcaaaactcagctcgaatatccccgctgctgagacattttctccaacttccccattagttggttctttctctaagcttctacaacaatttgtatacattaatggtgtcatctcttaggtgggaggtgatggaaaccatcacattggctgaaaattgtgtatggtcacaattttttaaggtcacagcttaagaagctgtccctttggagatcagtatatttggtttctctaagttgacacagtctgttcctctctctgtctctgagacagatcatattccatcagttaagtatgagttgaggcagctggcatgtatctagaggccatgtttaaggaaaaacactgatttttaattactgtgaaatcaattgtgtggatggtagattctccgctgccttctctagctcactctggggcatagactgattgagtggaatggtaagtagaagattccggaatacagtacagagaaggtcctccttatccgcagtttctgcatctggattcaaccaaccgtggcttgaataaagacaataaaaaataacaatacaacaataaaaaaatacaaatgtcaaaatacgatataacaactatttacataacatttgcatcatattaggtattataagtgatctagagattatttttaaagtgtatgggtcccaagactttgggaggctgagacaggaggattgcttgaggccaggagttcaagaccagccctgggcaacatagtgagaccttgtctctatgaaaaaaaatttttttacagtatacaggaggatgtgcataggttaaatgcaaatacgccattttctctcagggactcgagcatctgaggattttggtatccacggaggtcctagagccaatcacctgtgaggatactgaggggcaactgtatttcacctttccctcagccttccaggcctctcactttcacaaggtggcatcactgagtttgaggatgcagctccaccttacctcttcagtggctcttctcccacttgcttacaataattgctgtttgcccgcccctctgcctttctctcccttgcttttgtgtctttgtattcccgtcttctgggagaggcttgttgaatgaatggatgataggtacatacacgtgttcaggaaggctcctttttgtctcttctcctcagggccgcccaataactccagtatacacggtggctccaaacgttcagagaattcctactgccgggatctacggggccagttacgtgccatttgctgctccagctacagccacgatcgccacactacagaagaacgcggcagccgcggccgccgtgtatggaggatacgcaggctacatacctcaggccttccctgctgctgccattcaggtccccatccccgacgtctaccagacatactgaggctggtgaccagcacgaagacagaccacacaaacaccactgaaggaacgcttgactatttatgaagaaggaacatgttggattcacacatgcaacctgaaagtgaagaatgttagcagatttatttctgaattattttatatacatgaagttttcactagttttttaagactattttcaacttagcatgcctacgttcatacatttccaaaagacttgcaatggttcgtgccttcattccatcttttaaaaatttgtatgctgtactacatttgtatagaggtttttgttgttgtttttttaaggatatattttcagtatgaaggttattttcttaacttctgcactccagagatttctattttgtagtaccttcaataatatatcaactatatattaaaaaagcacacttgaggagctagggaactattttgaaaaatatatacaatatttaaagatacaaacagtagtgcttaaaaatactacataaagcattattttaaaggttatactggaaagtgcaattttaaaatgagtaaaacctctgtatttctgctggcattaagggttgatggtgttaccatgtatcatcatggcggtactattttttaaaagaaattaaacactggatctctccttaagccaacattgaaaagacttgccgcacttctgagtccaaacactggaaagctctcctttgccaccgttagccggggctcattctccatgtgccttagccttaaacatgcccccactcccacatctctcaccctgtcccctcctccccagattcccaatcccaccgcaatgtttggcaagcctaggactgataagtagctctgatagaggagctggtggcttttatacttcttcctgggtttttgttggggtttgttgtttcgttgttttttgttttttttttgtttggttggggaagtattgtcttctacgtgtgctattttcagtagcagagtaagcacaaggttttaatcgagttgcataagacacctttgcatagctatttaattgcccaatgtaaaactttaatgccatttctaatgcttttattcatttttgaagtatgagtttgtagggacaaagaatgtatgttatcgtagacaagacccccagagactcttttcagcagaaagttatgcttctagttgccttaccatgtttcttgcaaaactgtccatggtcctcaagggtgttggaaacattatgtttattaaatgggcctcttttcctttgctgtgcacttgatgggtgaactggattggggtgtgcacatccaggaggaggaggagagacctgtagaagtttaaagatagtttgtaaatatcttctaatgcttgtttttagtccttttatgttggagaagttcatggtatgtagtttaatgcaaaatgaaaccattttatttcaatgttattaaaaaggtttgttttattaggaagttaatgtattgttgcagtgttttgtgcctgtttaaaggcttttgtttagcagagtgaatgtaaaatacagtaaaatgttaagattgtcatctactttttaaaaaaaaatatcaacttggaattgttttttaaaggctcaatcaaggaagtgaggtgtgcaataaggtagcaagtaaaacgcagttgcgtttttatgtcatgttagagatccatacaattttccactcacgggatttttgttgatggctgaattcttgtggattcataagaggatcatgcccttagcaagtacttttgttttgttttaaattaagagattcccaaatgcctttttccccctcatcttgaaatgagatgagtttttatgtgtaagcaatatttatttaactattctataaaattattgagtgcctactgaggcctttaagcaccgctaacattcctttccatcattcttttaaatgacataaaataattgtgcaatgttcctgatgatgtaccccacaagctgcattcaaactcaaatctgtgggaatgagtgactcgacaaaatgtaattcggatcagatcctcatcccctgactgtgtgaaaaaagtactctccttctagtgaaggattgtcacagagtttcactggatgaaactatgacccagtattcttactgtattttacatatgcctgtaaattatttgcaaaaaagaagaagaagaggaagaaagaaaagaaagaaaagaaagaaagaaagaaagaaagaaagaaagaaagaaagaaagaaagaaagaaagaaaaagaaagaaagaataaaaaaaaatgataacatggcaaccaccaaactcccttaaaaacaaacattggtgacatggccaattaagtatcagtgagcctcctatctgggacttatctgttcctattgtttcaaaaccatttcatgtacactactgaggtaagtttataacttgaaatgtgaactttttttttttttagtgttaagaacaaactatataaatgtaaaaaaaaagttttagagttctgttttcaaacattgctagtggtttagttaactttagctgctttatatttgaaaagcttttatttagatcttgctccatttacagtacattcttaggatgtatgtagtaaataaagctttctttaaagcaatcgcaagaccttattttaaattgtgttttctttatactgatttattttttctaaaaaaattaggaaaacccttacagcatagaaaggattggctaattcgatattttccgttggagaaatcagcaagttaacggtcatgtgtttgtcttgggactaccattgaagatgggttacatcggccaggtgcggtggctcactcctctaatcccagcgctttgggaggccaaggcggacagatcacctgaggtcaggagttcgagaccatctggccaacatggtgaaacctcatctctactaaaaatacaaacaaaattagccaggcatagtggtgggtgcctgtagtcccagctacgtgggaggctgaggtaggagaattccttgaacccaggaggcggaggttacagtgagtcgagatcatgcctttgcactccagcctgggcaacaacagcaaaactccatcttaaaaaaaaaaaagatgggttacatagctgaattgtgaattatgagtatcctcaaactttggctcaagtggtaggagattgaacactcaaataatactcaaatctggattggaataggatgtgacaaagcctgtcaccaccctcagtgccaaagtttatttataatcccaaaggctttacacgcagaattttaaatggagagagttgatgtacattgagttttctgatggtctcatgaaagtgctgggatgaccttgatgttggtcattgcatttgaaaccaaaaccttctcgtttctccttttcaccgtgcatagcaaggttaacaggacactttccttttctctagagatcatcactaacttcagacagtatctatcatcaaagccaatcagatgacaggagggaaggtggtggattgtcaatagaataaagttccacttggatttgccagtgattaagaattttaccttcttagatttgaacctggactgtggcctcccaacctgcatttcttggaattctaacttcctgcttcctcttaaatggataaaggcctttttagaggctgaacagactgggaaacttcccaagatgacagcttattaggcagtgtttttaggggcaacaagagctgctgatcttcttgttctagcaaataagtacaaaaggtcttcaagttgcaggatcacattcaggttagactgatctctttagaaaaagaattaacaatcaaaatgaggaggccaatagcgtgtcacatgaggagaatgactatgatcatgtgattcactgggctgttaggcttccataacctcagatggacctgtcaagaactcagcgaaacaggcaggacagataaagatatgtgactggtcaagatcacacagctggtaataggactcaaatctatactcaaggccaagcgcagtggctgccgcctgtaatcccagcattttaagaggccaaggcaggtggatcacttgaggtcaggagttcaagaccaacatggtgaaaccccatctctaccaaaaatataaaaattagctgggcatggtggtggcacctgtagtcccagctactcaggaggctgaggcaggagaatcagttgaacccaggagggcagtggttgcagtgagccaatatcatgccactgcactccagcctgggtgacagagtgagaccttgtcttaaaaaaaaaaaaaaaaaaaaaaaaagtctacactcaagactccttgtcccaggttctaaatgccccatttttttgattccaaaaatgtctgtcatgacaacatgcaaagaacttaattgaaagaagagttagaaaacataacctgatttttcttgtatattcaatttttatatgatttctttattataaagccttctgggcactgaggctttgtatttgagttttttgttttgttttgtttggatttgatttttattttatttttttttttgagacggagtcctggtactgtagcccaggctggagtgcagtggcgnnnnnnnnnnnnnnnnnnnnnnnnnnnnnnnnnnnnnnnnnnnnnnnnnnnnnnnnnnnnnnnnnnnnnnnnnnnnnnaactttttctatttttagtagggacggggtttctccatgttagcaaagatggtctcgatctcctgacctcgtgatctgcccacctcagcctcccaaagtgctgggattacaggcgtgagccaccgcgcccggccttggatttgattttttaagtcataggaagtgtgacattttggcatggctgtttagatgaaataacgttttgacaccatgaccctaaaaacaaaatccatcttcagctactgggtaggatgatacagatgttctgaccttatcctaccttttccttgacacattcaccatttctgaacccccaaggtcaaagggaggattaggtttaaatatagaaagagactcaggggacatccacaaaatgttttacatcaattccaaggtctaagctattggactgggtacagccttttctcctgtctcctcttttcacttactagtacccagcattcctgtttctaactcttcatgccaataaatttaggggacaaatgtgattacccaaatgctaacctgtatgagcaagtgccatggcctactaaaataggctgggtttgtggtcagaatgcctaggggtgaaaccccagctttgctacttgcaagtcatgagactttgaagaagatgccttacctctcagtaccagtttcttaactggtaaaatagggataataatcctgacctcataaggttattataaaaatgagatgagttggccaggcgtggtggctcacgcctgtaatcctagcactttgggaggctgaggctggtggatcatttgaggtcaggaattcaaaaccagcttggccatcatggtgaaaccccgtctctactaaaaatacaaaaaattagctgggcatggtggtgtgagcctgtaatcccagctactcaggaggctggggcaggagaatcacttgaacccaggaggcaggggttgctgtgagctgagatcgtgccaccgcactccagcctgggtgacagaaggagactccatctcaaaaaaaaaaaaaaaaaatgagacgagttatagacagttatttcctttcccatctcctttttaaactctagtgtgactgcattcctctttgttaattctatcaagcctttccattttaaatccttttatgatttttttaactctttcattcactgaaattttttattcttttattcacctgtttattccataaacattcattgctggagtaccaactatgcaggattcaccagagaaataaatcaacaaaattgaccctctgccttctggaaactcccaggcatgataagactgttttatggaaggggcacacacccaggctcgagccagagatctacaagatgaataggagttaggcagatgagtagggggaaaagggatcgggaaatgcctgggcccggaggaaagaacacggtatcatcaagtccatgaaatcagttcagggtggctgccttaaaggaggagaaagtgtgaagaaatccaacctttgcactgttcaacattaaatagggttcatggccctgtgttaactgtgggaggaagagatttggtccctatgacaaggaagctaggggagccagtaatcacagagaaagaaccctcaatcattcattccttcttaggactttcaggaaatggtggagccctgcatttatctacactgctgaagctagagctgcccctagtgaaaaactcccttcctgctgccttcctggccccagggggggatgcctcccaactctgagcttgtccaggagtttatagcagcaatcaaagcttttagggctgcccacctgtttcttgtgcaggtccaggttccagcctctgggaccttcaccctttcctcttgggtcatacagcagctgcatgtgggtgtccccactgttcctacgtaaaccccccatgggacaggaatgcaggcttctcagcaaaggtgatggaggcctatagtcctccagatgactgagggtggatgatatggtttggctgtgtccccacccaaatctcgtcttgaattgtagctcccataatccctatgtgtcatgggagggacctggtgggaggtaattgaatcatggaggcaggtttttcccgtgctgttctcacaatagtaagtctcatgagatctgatggttttataaaaggcagttcccctgcacatgctgccctgcctgctgccatgtaagacatgcctttgctcctccttcaccttctgccatgattgtgaggcctccctggccatatggagctgtgagtccattgaatctctttcctttataaattacccagtcacgcatatgtctctattagtagcatgagaatggactaatacagtggaggagaatcctaagtaaaatcttcagagacacattggcttccccaacaggatcatatttccttgaaactccattctgcacagttaccagaaacaaaagcaacactaatccctgcatatgcaagaaatacgacctttcctaggctaatttttagccacccttctttcttggcttgttctactttgtttgtcaaaaatcttcattaatgattaaccaaccatgaggtttaaataaccttagtcattctaaggcagctaagagatgtcactgaagcccagttttttctgagatgaccttgcttgggggtgtgctgggtcaaaacatttgcacttaatggtattgtgataacactgggccatgccagtttggttttgctgggatttttccgctcctttttcacgacctttattccaaactgacagcaccatgagatagttttacttccgtcgacctcaccaccctcacacctccacccccattcaaatttggccatttgaccctttctcaatcttatatagagtactatgcagactcagcttcccaataaacccctaatgtcccctttccaaataagacactcccctaaggagagaaattctggaaatgcaactgattctaaatgtgctctagcatttatagagggaatctcttgtgcataagagacaacagccaaaataatctacttagaaattacccaacgctttagtgcaaacagccgtgccactgagtgctcagtcaagcctgccttcggcgagcatgtctttttttggttcctcattttccttgtgtttgggaataatgttaaagtcttagatgatgatcattcagcaggagataagaataatggctgacagtaacttaccatatatgccaatggtcaagtactttacgtggatattttttaaactttttattaaaagagtaacatagatacagtagtgtacataccatagagagcttgatgaattttcacaaactgagcacatccatgtaaccaacatccagaggagtaacatgaccagcattccagaaggttttgcatggccctttccagtgaccacctcaacaagggaaacagtcaaatctacagcatagattagttttgcatgcatcatgttttcacacttgagcttgctactcttaatacccccattttacagataaaaagcaaggaggcagaaggaggtttcataacttctcccgagaccacgtcgctggtaagtgaaacagtgtagatctgaacctggaatatctaactctagagctggggctggggttggagggattatagatcacccattttgtaaggatgtagagtcatttgtttgttctagaagtcacaccgatctcctaatagagtcactttatcttaaaggacattggagcaagtggaaaggaaagtttaaaaattacacacattgcagaatatagatgcaaaactttctggagtctgaaggtcttatagggttacctttctacatttttttttcctggtggcctccaagcctcttacattctagcatgtcttttatcaaatgttgctctcagaaagggaagaaataaacaaattcattcccaaggaggtgagttatgtggggctttttgtcttttgtttgtttgttttgagacagggtcttgctctgtcacccgggctggagtgcagtggcgcaatccctgctcactgcagcctcgatttcccaggctcaggtgatctttccacctcagcctcctgagtagctggcactacaggcatgtgccaccacatccagctaattttttgtattttttgtagagatggggtttcgccatgttgctcaagatggtctcgaattcctgtgctcaagcgatcctcccatctcatcctaccaaagtgctgggattacaggcatgagacactgtgcctggcctcctgagttatgtggttttcattgaacaaatcccttgtcaacgaagctaaggaagaaagccctaactttggaagttaaggccatagccagtcaaataaagagaataacttcaagagtcaggaggttctccaccagctccaggacactgtaccacaaaagcagcccaatctagggaggctagcccaagccttctgagttgccgaggggccaaataattagaccctctggacagttcaatgaataattttaacaactagtgtctcaaataaaagatatacgatataaaatgctggaaagacatgccaatcaaggataatcagctaatccttgaatagcatttcactggccacagaagcctttctaaaactctatctccctgatcttcatgacaatcctgtaagatagttacagatgacattctccccttcccattcatttaacaaatgttttgtttttcgagcatttatgtgccaggctttgtgatggggcctaaagacaaaatggtgaacatgatctccattttatcaagggagaaattgaggcctaaaaaggataagttacttgctcaagatacaatgatactcaaaattcaattttttttttttttttttgagacagtcttgctttgtctcccaggctggagtgcagtacactctccgctcactgcaacatctgcctcccgggttccagcaattctcctgcctcagcctcacaagcagctgggactataagcctgcgccaccacggccggctaattttttgcatttttagtagagacagagtttcactgtgttggccaggctggtctcggactcctgacctcgtgatctacccacctcagcctcccaaagtgctgggattacaggcgcgagccactgcgcccggcctcttgcttctctttcatttgccttccacactggggccacagtgatcttcctaaaaccaaatctgagtgtcacttatgtcacatatctttagaagtatcccactgctgactgtaccaagtccagcttaaaacacacaaggccctttataaactggcctctgtgcacgtcttcagaattatatcctgccagttgcatatgggcagaacggatatccactatgcactggtatgtccattttggtcacttactgcccatgttcctctgactgaccagtgcctgtcctggttactgaaaactttgattttgtctttcacctgcttaccattctctcccattattccgaaatattaatatttgcagttcctttaaaaagctcccttcccggccgagcgcggtggctcacgcctataatcccagcactttgggaggccaaggcgggcagatcatgaggtcaggagatcgagaccatcctggctaacactgtgaaaccccgtctctactaaaaatacaaaaaattagccaggcgtggtggcgggcacctacagtcccaactactctggaagctgaggcaggagaatggcatgaacctgggaggcagaacttgcagtaagctgagatctggccactgcactccagcctgggcgacagagtgagactccatctcgaaaaaaaaaaaaaaaaagctcccttccctctaggagtgtccacccaacaaactcccacttattcatcaagtatttattgagcacctactatatatacacttgggctaggcattgaagatagagaactaaaagtcctgtcctcaagaaggtactggtctagtgagaacacagacaagttaaaagatcgtgataaactagtgggagaagtgttaggacagagataaatcctgatgcttgggtagcacagagaagcgatacttaaccccagacttggggttcagggagctgctcctggatcggggacatctcagttgagttctgaaggctcagacagggcagaaggaatcttgataaagggagcaatggatctgtaaagaacataaaataagcaaagcctagaatgggaggtgaggctagtgatatgaggctgaagagagttgctggacggtgtgtggggagggagctggtgcacgctgtgcccagttggcaactcagtgtaacattctatcctgaccacagtgaggagtcaatgattgatttttttttttttaagacaacatttctctcctgtcacccaggctggagtgcagtggcatgatcttccctcactgcaacctccgcctcctgggttcaagctattctcctgcctcagcctcccaagtagctggtattagaggtgcatgccaccatgcctggctaatttttgtatttttagtagagactaggtttcaccatgttggccaggctggtctcaaactcctgacctcaggtccggagtttgcctctgcctcccaaagtgctgagattacaggtatgagccactgtgcccagcaaataattgattttcaacagaagagtggcttgatcagaattgcactttagagagagtgttctggccagagcatgagactagactggaggggaaaaatgctgaagggagggggaccagttaggaggctgttgcagaaagcaggtgagaaatgatggtgggctgggctaaggtgatagcaaacggacaggaaatggactcaagaggtgctaagttaaagtcgatcagtgccggtgactagtaagtgatagcgcaaagggaggtggatgaagaatgactcctgagtttctcacctgggtaattgggtggatatggtgcagttttatggagctgacagtccataactctgcgctgggcagtttacgtgaattgatccatttaatcctcttaacaactccatgagttgacaatattcttaactccattttacagactaggaacctgaggcacagagagtttcagtaggttacgcaaggttacacagctagtttaagtggaagaatcaggatttagactcatacagtctgactacagaattcgtctttttcttttctttcttttttttttcttttttttttttttttttttttgagactgagtcagtctcgctctgtcgcccacactggagtacagtggcgtgatctcggctcactgcaacctccatctcctgggttcaagtgattctcctgcctcagcctcccaagtagctgggattacaggcacgtgccaccatgcctggctaatttttgtatttttagtagagatggagtttcaccatattggccaaggtggtcttgaattcctgactttaagtgatccacctgccttggcctcccaaagtgctaggattacaggtgtgagcaaccgcgcctgacccagaattcatctcttaaaccccaccactggattg

SEQ ID NO: 657 - DNA, 3124 bp, Homo sapiens
ccaggactaaccggaagcttctgcaacaggaggacattgaaaataagatggaacccatccacataaggatttgcctcaaagggcactgcaaaaattgaacagaggaatcccaaggaagctgcctgaatttgcctgtatactctcgttctgcgacttataaaggaccagacaaatcaaattagtggttttggtttccgccagctgtggatgcctttgacattatgaccgcagaggattccaccgcagccatgagcagtgactcggccgccgggtcctcggccaaggtgcccgagggcgtggcgggcgcgcccaacgaggcagcactgctggcgctgatggagcgcacgggctacagcatggtgcaagagaacgggcagcgcaagtacggcggcccaccgcccggctgggagggcccgcacccgcagcgtggctgcgaggtcttcgtgggcaagatcccgcgcgacgtgtacgaggacgagctggtgcccgtgttcgaggccgtgggccgcatctacgagctgcgcctcatgatggactttgacggcaagaaccgcggctacgccttcgtcatgtactgccacaagcacgaggccaagcgcgcagtgcgtgagctcaacaactacgagatccgcccggccgctgtcattcccactgtgtcgacgccaccacctttccagggccgcccaataactccagtatacacggtggctccaaacgttcagagaattcctactgccgggatctacggggccagttacgtgccatttgctgctccagctacagccacgatcgccacactacagaagaacgcggcagccgcggccgccgtgtatggaggatacgcaggctacatacctcaggccttccctgctgctgccattcaggtccccatccccgacgtctaccagacatactgaggctggtgaccagcacgaagacagaccacacaaacaccactgaaggaacgcttgactatttatgaagaaggaacatgttggattcacacatgcaacctgaaagtgaagaatgttagcagatttatttctgaattattttatatacatgaagttttcactagttttttaagactattttcaacttagcatgcctacgttcatacatttccaaaagacttgcaatggttcgtgccttcattccatcttttaaaaatttgtatgctgtactacatttgtatagaggtttttgttgttgtttttttaaggatatattttcagtatgaaggttattttcttaacttctgcactccagagatttctattttgtagtaccttcaataatatatcaactatatattaaaaaagcacacttgaggagctagggaactattttgaaaaatatatacaatatttaaagatacaaacagtagtgcttaaaaatactacataaagcattattttaaaggttatactggaaagtgcaattttaaaatgagtaaaacctctgtatttctgctggcattaagggttgatggtgttaccatgtatcatcatggcggtactattttttaaaagaaattaaacactggatctctccttaagccaacattgaaaagacttgccgcacttctgagtccaaacactggaaagctctcctttgccaccgttagccggggctcattctccatgtgccttagccttaaacatgcccccactcccacatctctcaccctgtcccctcctccccagattcccaatcccaccgcaatgtttggcaagcctaggactgataagtagctctgatagaggagctggtggcttttatacttcttcctgggtttttgttggggtttgttgtttcgttgttttttgttttttttttgtttggttggggaagtattgtcttctacgtgtgctattttcagtagcagagtaagcacaaggttttaatcgagttgcataagacacctttgcatagctatttaattgcccaatgtaaaactttaatgccatttctaatgcttttattcatttttgaagtatgagtttgtagggacaaagaatgtatgttatcgtagacaagacccccagagactcttttcagcagaaagttatgcttctagttgccttaccatgtttcttgcaaaactgtccatggtcctcaagggtgttggaaacattatgtttattaaatgggcctcttttcctttgctgtgcacttgatgggtgaactggattggggtgtgcacatccaggaggaggaggagagacctgtagaagtttaaagatagtttgtaaatatcttctaatgcttgtttttagtccttttatgttggagaagttcatggtatgtagtttaatgcaaaatgaaaccattttatttcaatgttattaaaaaggtttgttttattaggaagttaatgtattgttgcagtgttttgtgcctgtttaaaggcttttgtttagcagagtgaatgtaaaatacagtaaaatgttaagattgtcatctactttttaaaaaaaaatatcaacttggaattgttttttaaaggctcaatcaaggaagtgaggtgtgcaataaggtagcaagtaaaacgcagttgcgtttttatgtcatgttagagatccatacaattttccactcacgggatttttgttgatggctgaattcttgtggattcataagaggatcatgcccttagcaagtacttttgttttgttttaaattaagagattcccaaatgcctttttccccctcatcttgaaatgagatgagtttttatgtgtaagcaatatttatttaactattctataaaattattgagtgcctactgaggcctttaagcaccgctaacattcctttccatcattcttttaaatgacataaaataattgtgcaatgttcctgatgatgtaccccacaagctgcattcaaactcaaatctgtgggaatgagtgactcgacaaaatgtaattcggatcagatcctcatcccctgactgtgtgaaaaaagtactctccttctagtgaaggattgtcacagagtttcactggatgaaactatgacccagtattcttactgtattttacatatgcctgtaaattatttgcaaaaaagaagaagaagaggaagaaagaaaagaaagaaaagaaagaaagaaagaaag

SEQ ID NO: 658 - protein, 231 aa, Homo sapiens
MTAEDSTAAMSSDSAAGSSAKVPEGVAGAPNEAALLALMERTGYSMVQENGQRKYGGPPPGWEGPHPQRGCEVFVGKIPRDVYEDELVPVFEAVGRIYELRLMMDFDGKNRGYAFVMYCHKHEAKRAVRELNNYEIRPAAVIPTVSTPPPFQGRPITPVYTVAPNVQRIPTAGIYGASYVPFAAPATATIATLQKNAAAAAAVYGGYAGYIPQAFPAAAIQVPIPDVYQTY

SEQ ID NO: 659 - DNA, 3996 bp, Homo sapiens
gtcaattgccctttagtcccaggactaaccggaagcttctgcaacaggaggacattgaaaataagatggaacccatccacataaggatttgcctcaaagggcactgcaaaaattgaacagaggaatcccaaggaagctgcctgaatttgcctgtatactctcgttctgcgacttataaaggaccagacaaatcaaattagtggttttggtttccgccagctgtggatgcctttgacattatgaccgcagaggattccaccgcagccatgagcagtgactcggccgccgggtcctcggccaaggtgcccgagggcgtggcgggcgcgcccaacgaggcagcactgctggcgctgatggagcgcacgggctacagcatggtgcaagagaacgggcagcgcaagtacggcggcccaccgcccggctgggagggcccgcacccgcagcgtggctgcgaggtcttcgtgggcaagatcccgcgcgacgtgtacgaggacgagctggtgcccgtgttcgaggccgtgggccgcatctacgagctgcgcctcatgatggactttgacggcaagaaccgcggctacgccttcgtcatgtactgccacaagcacgaggccaagcgcgcagtgcgtgagctcaacaactacgagatccgcccgggccgcctgctcggcgtgtgctgcagcgtggacaactgccgcctcttcatcggcgggatccccaagatgaagaagcgcgaggaaatcctggaggagattgccaaggtcaccgagggcgtgctggacgtgatcgtctacgccagcgcggccgacaagatgaagaaccgcggcttcgccttcgtggagtacgagagccaccgcgcggctgccatggctcgccgcaagctcatgcctggccgcatccagctgtggggccaccagatcgccgtggactgggccgagcctgagatcgacgtggacgaggacgtgatggagaccgtgaagatcctctacgtgcgcaacctcatgatcgagaccaccgaggacaccatcaagaagagcttcggccagttcaaccccggctgcgtggagcgcgtcaagaagatccgcgactacgccttcgtgcacttcaccagccgcgaggatgccgtgcatgccatgaacaacctcaacggcactgagctggagggctcgtgcctggaggtcacgctggccaagcccgtggacaaggagcagtactcgcgctaccagaaggcagccaggggcggcggcgcggctgaggcagcgcagcagcccagctacgtgtactcctgcgacccctacacactggcctactacggctacccctacaacgcgctcattgggcccaacagggactactttgtgaaagtagccatccctgccattggggctcagtattccatgtttccagcagctccagcccctaaaatgattgaagatggcaaaatccacacagtggagcacatgatcagccccattgctgtgcagccagacccagccagtgctgctgccgccgcagccgcggccgcagccgccgcagccgctgtcattcccactgtgtcgacgccaccacctttccagggccgcccaataactccagtatacacggtggctccaaacgttcagagaattcctactgccgggatctacggggccagttacgtgccatttgctgctccagctacagccacgatcgccacactacagaagaacgcggcagccgcggccgccgtgtatggaggatacgcaggctacatacctcaggccttccctgctgctgccattcaggtccccatccccgacgtctaccagacatactgaggctggtgaccagcacgaagacagaccacacaaacaccactgaaggaacgcttgactatttatgaagaaggaacatgttggattcacacatgcaacctgaaagtgaagaatgttagcagatttatttctgaattattttatatacatgaagttttcactagttttttaagactattttcaacttagcatgcctacgttcatacatttccaaaagacttgcaatggttcgtgccttcattccatcttttaaaaatttgtatgctgtactacatttgtatagaggtttttgttgttgtttttttaaggatatattttcagtatgaaggttattttcttaacttctgcactccagagatttctattttgtagtaccttcaataatatatcaactatatattaaaaaagcacacttgaggagctagggaactattttgaaaaatatatacaatatttaaagatacaaacagtagtgcttaaaaatactacataaagcattattttaaaggttatactggaaagtgcaattttaaaatgagtaaaacctctgtatttctgctggcattaagggttgatggtgttaccatgtatcatcatggcggtactattttttaaaagaaattaaacactggatctctccttaagccaacattgaaaagacttgccgcacttctgagtccaaacactggaaagctctcctttgccaccgttagccggggctcattctccatgtgccttagccttaaacatgcccccactcccacatctctcaccctgtcccctcctccccagattcccaatcccaccgcaatgtttggcaagcctaggactgataagtagctctgatagaggagctggtggcttttatacttcttcctgggtttttgttggggtttgttgtttcgttgttttttgttttttttttgtttggttggggaagtattgtcttctacgtgtgctattttcagtagcagagtaagcacaaggttttaatcgagttgcataagacacctttgcatagctatttaattgcccaatgtaaaactttaatgccatttctaatgcttttattcatttttgaagtatgagtttgtagggacaaagaatgtatgttatcgtagacaagacccccagagactcttttcagcagaaagttatgcttctagttgccttaccatgtttcttgcaaaactgtccatggtcctcaagggtgttggaaacattatgtttattaaatgggcctcttttcctttgctgtgcacttgatgggtgaactggattggggtgtgcacatccaggaggaggaggagagacctgtagaagtttaaagatagtttgtaaatatcttctaatgcttgtttttagtccttttatgttggagaagttcatggtatgtagtttaatgcaaaatgaaaccattttatttcaatgttattaaaaaggtttgttttattaggaagttaatgtattgttgcagtgttttgtgcctgtttaaaggcttttgtttagcagagtgaatgtaaaatacagtaaaatgttaagattgtcatctactttttaaaaaaaaatatcaacttggaattgttttttaaaggctcaatcaaggaagtgaggtgtgcaataaggtagcaagtaaaacgcagttgcgtttttatgtcatgttagagatccatacaattttccactcacgggatttttgttgatggctgaattcttgtggattcataagaggatcatgcccttagcaagtacttttgttttgttttaaattaagagattcccaaatgcctttttccccctcatcttgaaatgagatgagtttttatgtgtaagcaatatttatttaactattctataaaattattgagtgcctactgaggcctttaagcaccgctaacattcctttccatcattcttttaaatgacataaaataattgtgcaatgttcctgatgatgtaccccacaagctgcattcaaactcaaatctgtgggaatgagtgactcgacaaaatgtaattcggatcagatcctcatcccctgactgtgtgaaaaaagtactctccttctagtgaaggattgtcacagagtttcactggatgaaactatgacccagtattcttactgtattttacatatgcctgtaaattatttgcaaaaaagaagaagaagaggaagaaagaaaag

SEQ ID NO: 660 - protein, 518 aa, Homo sapiens
MTAEDSTAAMSSDSAAGSSAKVPEGVAGAPNEAALLALMERTGYSMVQENGQRKYGGPPPGWEGPHPQRGCEVFVGKIPRDVYEDELVPVFEAVGRIYELRLMMDFDGKNRGYAFVMYCHKHEAKRAVRELNNYEIRPGRLLGVCCSVDNCRLFIGGIPKMKKREEIEIAKVTEGVLDVIVYASAADKMKNRGFAFVEYESHRAAAMARRKLMPGRIQLWGHQIAVDWAEPEIDVDEDVMVKILYVRNLMIETTEDTIKKSFGQFNPGCVERVKKIRDYAFVHFTSREDAVHAMNNLNGTELEGSCLEVTLAKPVDKEQYSRYQKARGGAAEAAQQPSYVYSCDPYTLAYYGYPYNALIGPNRDYFVKVAIPAIGAQYSMFPAAPAPKMIEDGKIHTVEHMISPIAVQPDPASAAAAAAAAAAAAAAVIPTVSTPPPFQGRPITPVYTVAPNVQRIPTAGIYGASYVPFAAPATATIATLQKNAAAAAAVYGGYAGYIPQAFPAAAIQVPIPDVYQTY

SEQ ID NO: 661 - DNA, 52920 bp, Mus musculus
  misc_feature (1)...(52920): n = A,T,C or G
ctaatgttagccatacacttaactctgcaagtcccaagatgacttctgttcccattgcagtgtttgccccagcagcccaacctctgtttggagacagagagtggtaggaaacaccaggcttcttttcttacttagccctcatttccctcgtgattgggccactgaccacccctgggtcctttacactggtctcgagccaagaaaggcagcgcatcgtgtcagaagctgcagacttcattccagggcccccctctcctggtttggggcctgctttccaatctcaagcctgacctgggtcagacctgggcaggagccatggggaaggcagctgctcttctgcataacaaagggtggccctgctggagagccagggaacacaccagggacgagtcttacaatccactatggtttcttcatctatcccccgactaagattgtctgaatctgcaaataaaacctctagatactggtgtaatgcaaatcccaggtaaacagtgactgatatattgtgtaaccaagtcccagattcagtacgggttttatttggcagccctacccctggcagcttgctcaattttatttctccagcgcacaaagccacaaattcacactcgggtatcccagctgtgtcttggagaaggcttagcatattactggtgtatagccacacacccttgtccccaccccagccacatgcccctgtccccaacccagccacacaccctgtccccaccccagacacacacccctgggcaggacttagcagaaaataattggagctgtggaaagcccttcgtgggcaccgatcttaactatgttgcccctcgtctgagccgatgtactctggctcagagattgggatggggtagattttcaattctcctacagcaagaaagggaaaggataggttgctcattggcgagtcccaggctttgcaaccaaggaaggtcccccagcccccaaagtggagaagcctcactcttatcagccctagaaaagtcttttgcacacctgggaagcaagtcagttggagagcccaggtgttgattgacatctggttctctccagggtttagaagcagtgatggacaagactacaggtgcacattccagacactgggagcaggcatccagcagagaacgtgagacctccgcgtcgtctccaggacccaccttccatcccatgctgggattgaatttagggcttcacgtgtgcagggccggtgctgctctaccactgagctattaccacccctgtcctgaatgtcctaattggtcagacacccttaagtcaatggtgaagtatatggctaacagacagcggtgaccagatgttctcagtccagacaggcttttgtgtcctttctagacagcccctcctcaggactcaggggcttgtttcatgctgagctcccaggaggtcccaggggtgtgacctctcttcttcctccctgccccccaccccaggaccagctataaagctgttccgtaccgtaccattcctccgcagactcaagaccctttcaggacacctcagggacacacacatccaaggctcctcttcccggacagcaccatgccattcctgtggctctgctgggcactctgggcactgtcgctggttagcctcagggaagccctgaccggagagcagatcctgggcagcctgctgcaacagctgcagctcgatcaaccgccagtcctggacaaggctgatgtggaagggatggtcatcccctcgcacgtgaggactcagtatgtggccctgctacaacacagccatgccagccgctcccgaggcaagaggttcagccagaaccttcgaggtgagccctcccctgttgtccttggtctctaggaaaggccggctgatcatgccttccttccacctgtggtgtgtatggacccttgccttgtggtgctcagagtcagtcatgggggtggggggcacagggtgaggcggatgttagaggggagaagatctgggagggtgggcactggggatctggctgtgcactgaaggagtctcaggatgggaaaagcggggctgtgcttgctggtaaattaaggagcagagaagagggaggagagtggaagaaaacagaacccctggagcagtcagggccaggtagaacttcctggggtcactgcctggacgagtggctgactatgtcttgccatggacagagaacagtggctgggtagaggcagccctgggtgacagaatttggaagagagagagagaaagagagagagagagagagagagagagagagagagagagagagagagagagagagagagagagagagaacaggtatccagctgtcaagtagcaaaggcctgtgtggtggtgcagcattttccagctggaagcagccctcatgggcacagccacatccataaacttactgtcctgtgggtacctaggcctggagatagaaggatgctggttctgaacaggcaggcaagggagatgtctgctgaggataggtgtggctggcctctcaggtaaccaaccattctgctatcccagagagtgagcacactggctggagccatttaggaaggtgacaactccctgaacacttgccccagggttcagcagtcctgacaaggatgttcacagactcctgttccactgaacggaacccctcacaaatgcatctgtctcttaagaaaggcacctcgggctgggcttcttttctctagtctctgcagcctgattctgtattcctcccccaatcctctcctaaaaccttccagaaagaagccagcattgccacgctctggaacccctccagctcctttcttgcacagggttccaaagtcaccactaagtgtggaagagttagcattcagggcctcattgcaaactttataattcctgagtagaaagaaagacttctttttcatgttgttcatgggcttcctgcttacaactctccctgaggatttttaaggaatcttggccattggtcttgggtcttgccaccctggaagttatctggtacttgtagaggcccggctgactctgtccttgtnnnnnnnnnnnnnnnnnnnntggggggcacagggtgaggcggatgttagaggggagaagatctgggagggtgggcactggggatctggctgtgcactgaaggagtctcaggatgggaaaagcggggctgtgcttgctggtaaattaaggagcagagaagagggaggagagtggaagaaaacagaacccctggagaagtcagggccaggtagaactccctggggtcactgcctggacgagtggctgactatgtcttgccatggacagagaacagtggctgggtagaggcagccctgggtgacagaatttgggagagagagagagagagagagagagtgagagagaggaccaggtatccaactttcaagtaaccagaggcctgtgtggtggtgtagcattttccagctgggagcagccctcatgggcacagccacatccatgaacttgctgtcctgtggtaccctaggcctggagatagaaggatcctgcttctggacaggcaggcaagggagatgtctgctgaggataggtgtggctggcctctcaggtaaccagccactctgctatcccagagagtggacacactggctggagccatttaggaaggtgacaactccctgaacacttgccccagggttcagcggtcctgacgaggatattcgcagactcctgttcctctgaacggaacccctcacaaatgcatctgtctcttaagaaaggcacctcgggctgggcttcttttctctagtctctacagcctgattctgtattcctcccccaatcctctcctaaaacctccagagaggaaccagcatttccaccctctgggacccctccagctcctttctttcacagggttcccaagtcacccctaagtgtgccagagttagcaatcagggcctcatttccaactttataattcctgagtaggaagggaggcttctttttcatgttgttcatgggcttcctccttaccattttccctggggatttttaaggaattttggccattggttttgggttttgccaccctggaagttatttgggaattgtagaggcccggctgaactttgtccttgtccacagaggtggcaggcaggttcctggtgtcagagacctccactcacctgctagtgttcggaatggagcagcggctgccgcctaacagcgagctggtgcaggctgtgctgcggctgttccaggagcctgtgcccagaacagctctccggaggcaaaagaggctgtccccacacagtgcccgggctcgggtcaccattgaatggctgcgcttccgcgacgacggctccaaccgcactgcccttatcgattctaggtatagtctctctctctctctctctctctctctctctctctctctctctctctctctctctctctctcgagagttgggaagtgagggactcgcccatgcagggggaggggagcagcagatgataggggtgtgtaccagacgggacagactcctcctccagggcctccctaacagcctgccagtcccctcgcctgacgcgcactgctgtgtctcaggctcgtgtccatccacgagagcggctggaaggccttcgacgtgaccgaggccgtgaacttctggcagcagctgagccggccgaggcagccgctgctgctccaggtgtcggtgcagagggagcatctggggccgggaacctggagctcacacaagttggttcgtttcgcggcgcaggggacgccggatggcaaggggcagggcgagccacagctggagctgcacacgctggacctcaaggactatgggtaagcattgtgggctaagttgataagcgaaattgagagacaaatggggactttgacttaactgtgaaatgacaaaatttcagaatgtgagaatatttagaaaaggcttcctctgactgttatgaaactctcaataaatagtatttatttagttcttaggtgtccatccccataaatatccaatattcagttgtttcctttgctacggcagtgggtttgaaatctaggccagaaaattcctaataagctacacacccagcccagttcttcaatactcgaagaactagatcttacatctctcccagatgctcctgacccctgccctgtcaggtgacctttgctctctcacccctacagagctcaaggcaattgtgaccccgaggcaccagtgactgaaggcacccgatgctgtcgccaggagatgtacctggacctgcaggggatgaagtgggccgagaactggatcctagaaccgccagggttcctgacatatgaatgtgtgggcagctgcctgcagctaccggagtccctgaccagcaggtggccatttctggggcctcggcagtgtgtcgcctcagagatgacctccctgcccatgattgtcagcgtgaaggagggaggcaggaccaggcctcaagtggtcagcctgcccaacatgagggtgcagacctgtagctgcgcctcagatggggcgctcatacccaggaggctgcagccataggcgcggggtgtggcttccccaaggatgtgcctttcatgcaaatctgaagtgctcattatactgggagagctggggattctaactccctaatgggcaatccctgtgtgtgctctttgcttcctctgaagtagcctcatccctaaatttttaccttcgaggaatgtgactcgctggcccctggaggcgctctgacccagtggtctctgtccttcatattgttcactgcactgtatgcgaagcacttacatgtatagatactgcaaaccaaggacagaatccccaattgccattgttcccttaatttgtcgctgaatctgggctgagtcccagtcttgactctggacctaagccacaagttgggcaaacatgtccaacctaggcaatactggctttgctagatgtgaataaaatatgctttgttttgtagcttttttgtttccttattttctctctctctctctcaagacagggttttgtgtgtgtgtgtgtgtgtgtgtgtgtgtgtgtgtgtgtgtgtagcctctgtcttgtttccccatttaaactacatctgtgtaaactgaggcagaaaaaagaaaggcctggtgttagatcaacttaactgagaactaaagagcttgattttgctaagacttgatcgaagtttcagcgataaaagaagccaacttggtggtgtctgcttttcagaactgagatagaaatgtttggctgttgagattttggctttttgggtccaacaattagggttttatttcgattctcgttgcattaaggaaaaaaaatcttattatgtcaggtgtggaggtgtgcacctttaatcccagcagaggcaagcagatgtctgtgagtttgaggccatcctgtgacatagggagtttcaagtcacccagcactacactgtcagaccttgtttcaaacaaacaaacaaacaaataaataaataaataatcaaaaatcaaagtcataattctagaaggatagaactcagtcttcttgggctgatatagggggcgctattcacagcattgnnnnnnnnnnnnnnnnnnnnnnnnnnnnnnnnnnnnnnnnnnnnnnnnnnnnnnncagatggttgtgagccaccatgtggttgctgggatttgaactcccggaccttcagaagaacagtcgggtgctcttatccactgagccatctctccagccccccagaagctttttagaagcaagcatgaccagagtctcagcccaaggaatgggtctcttagtctccctacaggtctgcacagcggttggcttcaaattccatctcctctagtctaatctgaatcctaatctttcttgtcttgatcccctaaatagcagcagcaacccccaacttctgtagttttagtttaagaaaccaataatttttttaaaagaaaacctctattattttattttacgaagaaacccctgtacaaaaaaagctttatttccccttataaagtcaagagaccgataatttgtttattgtatttatatgagtacactgtcgctgtcttcagacacaccagaagagggcatcagatcccatcacagacagctgtgagccaccatgtggtttcagggaattgaactcaggacctctggaagagcagtcagtgctcttaaccactgagccatctctccaaccctagatttatttatttattgtatttagaaaccaataatttaataattactttacacactgactagtacaaccaggtctatggcttgttcaactcacaccctagatttattttcttagacagtgtctcatgtagcttcctgcttttatttaatttattattattattattattaaacaaggtgttaaatagcttaggatagcctccaactccatatgcagtcaaagatgactttaactttcttttttcaagacagggcttctttgtgtagtcctggctgtcctagaactcactctgaagaccaggctggccttgaactcagagatctgcctgtctctgcctcgaaagtgctggggctaaaggtaatgtcccaccttgcctggctttgagttttttgtttcgttttgttttgcttgttttttccagctagggtttctctgtgtagcctcagctgccctagaactcactctgtagacaaggcaggcctcaaacgcacagaaatttacctgcctttgcctccctagtgctgggattaaaggcatgcacaccactgctcagctgacgttaaatatttttaaaaatcaaattgtgtgtgtgtgtgtgtgtgtgtgtgtgtgaatgtgagtgtgtttgtgtgtgtgtgcatgtgagtgtgtatgtgagtgtgtttgtgtgagtgtatgtgagtgtgtgtgagtatgtgagtgtgtttgtgtgagtgtatgtgagtgtgtgtgtgtttgtgtgtgtgtttgtgtgagtgtgtgtgtgagtatgtgagtgtgtttgtgtgagtgtatgtgagtgtgtgtgagtatgtgagtgtgtttgtgtgagtgtgtgtttctgtgagtgtgtgtgtgaatgtgagtgtgtgtatgtgagtgtgtttgtgtgagtgtgtgtgtatgtgagtgtgtgtgtatgcgtatgtgagtgtgtgtgagtatgtgagtgtgtttgtgtgagtgtatgtgagtgtgtgtttctgtgaatgtgtgtgtgtgtgtgtgtgtgtgtgagtgccagccagcaagtgctttggaagtcaaatggaaactttagggagttggttctctctttcaacagtgggttctgtgggtcagactcagagacgcagctggttaggctttcgtggtaagcgcctttatcctgagcaccttgaacttctcatcctgtgtaaccacctttatcctgagcttgaaccttgaacttctcatcctgtgtccacatccatccacatccggagtgcggtgagtacagacctgtatcaccatgactggcttgtgtgtcactaggtatcgtgcacactacccaaacactctgccaacttgagctacatctctagcccaggtcttgtcaactcaaacactctgatccatcccagccttctctggaccttgagacaactgtaacctgcagaagaccagacatgggaagcctttccttcccttaccaagggccctaaccttttctttggtagctgggccattatcctaatgactggggctagatcccaggccacaggccaggtaggtgtcagcatgatcaacaaaggcagaaatgaggatgtgtgggatgggagcctggagaagatcaggcagagccaatctgaggagccaagtgcataaatgactgggggcctacaaccagggacctagagaagccagttgtggggtccctaacaaagaaaagacaaggacagaggatggctctgggaaattaactgttagctgggtgcttaaggggttggaggatgggagtgggaagggacagagaaccagagaggaaagagacaccctgtttcagatagttgcaggctgggctagaatcaggaccagggaggctgcgagagtatttttatctttacagtagaagatgaaagctaaaacatggaagtgaggtcagagaagcagcaaaactgtgtcttggggaatgaggatttgccgggcatgccggtgtcagtgtggcaagaactcagcagcaagctttggtcccactcctttccttgtgtaaaccgagacctgcaagtgggtggtttgaggcagtggcccctccaggatccttactccatttccctaaagatccagcgtcggtcctgtcctgggagagggcgcagagcaggtccagaggccgctgttatctggaaacctccaagtcgcagccagaacacaccagacgctcagcgtgtttggtcccagttggcaacgctggtgacccggggcagagcagtaacgcgtggtcctagggaacgctggaaatgttgttctttatttggggcaggacagagctttgtaactttcaaggtcccggctctcttatgcggcgggactgggaacagggtaggtccactgcgccctggtgttcccccgccctgaaatccaactgggccagcttagaatttcctggggacattcaatcacgaacatttgcagatgctctccaacgccgcaactatcctaggcacggcccagtgccctctcagtggggatgtgctagggcacaaaggaaaggcagttcggagacgtcctctcccagccttgtgggcgttagctggtctggtcccgcccctagacctccgtgaggacggccacgcgtggaccagcgttagagaaccacattggggttcactgcccggcgcacagagctcgaggtcctgctggggccggcgcgagcgaagagtccaaattaggtaacgcgtggacacagttctgcgcatgtgcaagaggagccggagtttcactttgtaacttttaagtggtgcggacgccgccccgccccgccaggtacggactgaccactcccccgggcgcgcgcgccgcgccgccgccgcaggtaaagtgggaaggggagcagagatggggaggttgcggccagcccctcccaggacgcgccggcccgggtcctcgcggggcggggcgcctcgggtcgctttccccggggactgtctggtgacagtagcggggtaggtggctggagagtgccaatcaagccccgcgccgctgggacttcctgacagctcttggctgcgtggcggatccttccctccacctcctcggcgggctttggagtttgtttgtggagtcggatctccccgcctaacccgaagggcagcgtcggagccctcttttctttaattccttacgaggctagacccggcttgggcgggcttcgtactgtccgggtgaccactccctcctgcccgggtagcaccgggtggaggaaaactggggacttgggaaagggcgggagggggagggaagagctgagacggcaaagaaaccacatccgacaacaacttacccagacctgataagcctggctacctgacacctcgggtgaggtggagttgctgtctttctgtcccaaacaggagccaacagcttgtagggacttttgcaaaaggcctgggaacatattttctctcctgaagctttggctgggtcccagagcctgccctgttgagagtttggggtgccaatgatatggtggagtgctgagcgtttgcgtgtacgaatattcactggatgtgggatggtggctattgctaagtgtgtacctaggcagggatcctgagaccacagtgtctaattgctgtttttaaggccccctcgctcctcgtagtgatgcggttggaatacagccttttgccttgcacattctaggcgtgcacttggctttgagcagcatttccatcccttagggacttgtttgatttcttccctacacacacccagagccttctctctctggcttggctgccccttggtgggtgtgctcccatctgccctctcagagcgtgttcctttgggaaggcaagaacggactggctcattgaaagcctagagaatgtttctgtagcagcctctgactctgctgctgctgggtgggcacaggttgctccgactggaggagagggtctcggactgtggcttctgatccctctcacttgtcaagcctttcttgtttgctctgcggtatttgatttccctgattctagcccacaggggatattgaggcagagaagcagcccttatgtctgcatgaggcagaataggctacctggttgaggaggcccttaggccttctgttttgcttttgaggcagggtcttactatgtagccacggatggcctagaactcacagagatccacctgcctctgcctcctgaatgttggggtaaatgggtgggtaccacaacactctcccttccttagttcttaccaaactttgtagattctcttgggaaacctgtttggcaagagaaaaatgacttaggagtgtggcttggccactaggggaaggcagccacagttaccctcctggggtcaaggcttctctgttcctccaggcctctgaaagagcaacattggtgagtcacctttcctacccacccagcactacccgtaccccccttccttgggacagcactccctctgtgagcatttatgaggatatttttccttttcttttccaagccttctttctttgctctagggtggcccatttcccccagttctagctttaggggatctttgggtgctgcagcagccctctggatgttcataggaaaccttggcttggtatgccacctcaagcccagagccactgtgcttctgagggagagaggccctcctgaccttggcaggacctgggttccattggacaagagacgagccatcctgctgggtgaagagaaaggaacagggtggcgcagacgaacccggggaggtggcggagagcttgttctaggagtttagatgcaaagccaggtagcaagaaactcagtgggcaagaccagaaaatgggcgcatgggataagaggcatgggcaggtctcagagtaacatcagagtgtagcgggtttctgttctgaaaccctaaactggaaggtggctcccctgtcacttatgtgacactggtggcatcaggacagtgtgtaaatgttggtgctgcagggacaggacaaagtggacagcctagcaggaaatgagaagcaggccagaggcctgactcactaagacttggagctgtcaggggtggggagtgggagggctgatccaactgaagacatctccagcagatgcccacagtccttcctccctacgtgtggcaacagtacagccttgcatcaccaggcagggatgtttcgaagtactggcgtcctggtgatttttttccccctttgaaacagccttatgtgatttccattagtgcccagggtgcctgaaacctcaggaggtgtcagcactgagcctggagccatgtctgttaatctcaagctttctgtgtagccaaggctggccttaaaatcctgatcctcctatccttgagtgctggggtggcaggtcttccgggaccctttgctcctctgggtttggtttaaaggagagaagcagggacatcactccaggtggaagtgccattcgtgattgttcacagtcactaaccggatggcaccagacacgtctacctacagccactgcaagttccttatagaaggggaaaaaatgatccattctcttaagccaagtcccctcccccatccttccctcactttccctcaggtgcggtgcatgtgtgaatctgggctagggcttgtgtgtgttgcatctgcgagtctgcgtagggtgtgtgtgtgtgtgtgtgtgtgtgcgcgcacgagcatgtgcatgcgcacagcagtgtcaggagtcagaattgggaccctaccccaacccagcacacctcactagcactttttgtagttcagacatctacttccggttctctacacccccttttctcgtccctaaaacttctgcctctctagcagaaggaaggaagtcctctgagaattacaatttaaatagacttggggaggtgggagcctgaggtgggaggggcttccttagacttcccactcataaataatgtgaagcaggccagaacctgggcaccaagttttcaggcttccgtgccaggggacagactgtagatttccattaaatttgccaggggttctgggagccttcaggagtcagcgcgcagcctgcagctgtgcctgtttgaaacactgaaccttctgttagaggggaggcgggaatggaagagggtggagctgagcacagctttgccagagcctcgcccaggagagggcttaggcctctccgctctggctgtccctcccacttttgcctctctctggaaagccctaagtgatggcagctacagagtgaagaccaaggctctgggagtcagagttggaggttcaatcctgcggtacccaactgttctgggggtggctttaagtttcttggaacttggatttcaagaacaaatcaaccagccttggagttcctggctctgactttctgaggatagttggagtgggcttctgtccttttctctgatgggccaactgtgaccctggattttcctcagatgacagctgaggcttcctcctcttcccagcctttgtggccctttcttctcgctcctgtctgtttctctgaggactcttgggggagttattttcccagcagcacttgaagctagaggaacttcagcagtggctacccctgaccaccctgacccctttatatcttatttcctcctttttggggcatctgctctttgcatccctgaagcggtcgtctagtctgaccatctgggctgttcctgtaaatggagctagtctttgtgaactcgaccaggcacagaggtgtgctgtccagattctgtgctccacctgcatgggggtgggtagatggggagcactaacctgtggcagcactggctgggggaaacttcaagtccacactctgatcatatacttcttgttccctagggagagaaggcacaatgaccagctccccgttcctggatccctggccgtccaaggctgtgtttgtccgtgagcgcctgggtcttggcgaacgtcccaatgactcctattgctacaactcagccaaaaacagcactgtgctccaaggggtcacctttggaggcatccccactgtcctgctcttagatgtcagttgctttctggtaagatcccctctcagtgatgtgtttaatcctttgttttctaggaccttctaggaaactcacatgaggtaggtacttacacctgtgcctgctctgtgaccctggacatggggtagatggaccttgagttctggaaccattgtaatggttccttcctcagagggtttggggattgagtagggccctgtgtgtcagtgtgatccagattacatagccactagtgagtcctgtcacgtctcactggccctcggggtgggtggcatgagagctgggaatgggggttatggaccagggttagagcaggtgcaacttctggtgtgtgagtggtggttccttttgccccgggatgcctggggcttttaaaagggaaccagaatagatcctttgagctgaccttagaggacatgtgtctctttccttaatattaactttctgttcacaaagattcttcccatttgaaacgggtgttattatctttgcagggtgactcaacaacatttgagatgtgtgtgtgtgtgtgtgtgtgtgtgtgtgtgtgtgtgtgttagggatagaacccagggccttgtgcatactccacactagtttaggtttattggggttaacatgtactgtttttttttcacaaacacccccagaacagttgctcccttgaccctggcttctaagaacagagaccatggggtagatgggagggtgaagtccacatcctaggtctgcctggagcagggtggctagtttgggtagggaagctaggatggaaggggaccccagtccctgctaggcaggagcacaaagcaagcaggtgaaggagagagcaaatcttccttcttccaatgtccttatataggtctccagcagaaggtgtggcccagattacaggcgtgtgcctctacacctggatctggggcttgctttgtcccagatgtccttgaacgcagagatttccttgtcttagtcttctgggattcatagccactatgcctcaatatctccatgtcaagatccaggtcagaaacttgtatctcccagccaccagattaggatcactggtgagccttctaattctggaccttaggtcattccagatagagtcaagttgacaaccaggaacagccactacaacttcctgattcaccttaagaaaatccccacagaaattcagagcttatggatctcccttaaggaaataacttctgccttcaaaacctattacatctaaggtgtcaggttccaccccagcactaaataaacataggaccaaagcaggcaagcctgtgctatttgagatgtctttccccctttctgtctttcaaaggagcccatgtaagttggggagagaggttaagacccactagagagctggccaaggtggaggtaaagggtccgagggggcaggcgagcgtctcagacatcaggaccctttaataggcagaaatgggtctcactccgcacatgaggttgttgctatcacacaagcctgtttttccatcccagctctctggggttgggctggcctagagcaccagggcggaatggggttcactggatggatgcactctctgtgtggggccctcaaacttgccgttagggggaggttagtgtgaagagttggacacaaaacaaatgaaatgtaatttaaaaaaaaaatcaagccaggtgcacacctgtagtctcagctcccaagagctaaggctggaggatcaccggagctcaggagttggaagcaagcctgggcgacctagtgagggcttgtctctcagaataaggttctggaatgaggcaaagagggaagtggcttttccactctggtgaggtcagacctcaccttttctgacttggagtctgctgatgtgcttgactagaaagactccatccaagcctgaggcagtgtgacaccgttggtgacgtgggcacagtggaggaaggtgccaggctgctgagccgtgtgctctttctgggctggatggagtcctctgccctctgagtctggctacccccagagcccagacaggctactctgacttagtttcctttttcctttcagtttctaatcctggtgttttccatcataaggagaagattctgggattatggccgcatagccctggtatcagaagcaggcaggtaaataaaacatcaggaacattttaccgagaatgtgagcatatctgtgcatccttctgagtgtgaatattgtgcatgggtgtgtgtgcattgtgaatatatgtgtgtgtgtatgtgtgtatgtatgtatgtttatgtatgtgtgtttctgggatggactggagccgggcctatgctaggagctgtaccttcctttctgtttctcaccaaagacccctgtgaggcctcgctgcttagagctgtattcacaggaaaccaacggctggagactctctgcttcctggggctctagtttcaggttgtggaaggtcaacattgcatttagggttttgtcaccagggaaggaagatgccattttcttgttccccttgcacacatctcccttggaacatcatatctgaagttaattaacatgcgccagggccgattaggaaggaaggcaggtgtggggaagctgcccactttctttcctggtcagggctccagtcggacaagcccgttaacaaaacataggctctctggccagacctcaggcccttccggttcctgtctgggtagggactactgtgccctttactaaaggtgaagatgagccggagaaccagactttcctgttctgtccagttgctgtgaacctctggaacgtgtgtcagatgaggcagaatggtgtgagtgggagacgtcaggggccccctccaggtctgtccccggggcccatggccatgcttgagcttctgaaatgtcccagtggtaggatgaggaaggaaggtccatttagggaggtgcttctttgccgccacttcgggggagggggtatcccttcaacagttcctagtcagcgtggacctgagcaccagtcttgcctcaggacgcaggagaggatgtgggaagacgcttcagtggggatggcttacttcctcactgttactgatacaaccattcacacttggggctacggtgctcgcctcttccctctgtgtcacagagctccctgacaaggggtctgggaggacactttgagtcagatctgtctggttctgagatgcggtgagggctgggatgagggagctcaaactacacctgacagtttactaacgtagtattttacacacactggccacagcaccgtgctccaggttcagtgctctctcaaaacataagatgaagagacactcaggaggatgccaagtgttggcccctggccaccacatgtgtgtgcatgtacatctgcacttgagtgctcacacacaaagacgacacacacacacacacacacacacacacacacacacacacacacactactgtatttaacatgtcagttcattcactttgagatgtacactttaaaattttctcaccattagaattggaatgtctctttctagtctatctgtccatccatccatccatccatctccatccatccatctatccatccatgcaaccattggaatgtctcctatgtcctggcctcccgggtggaccttctttgaacttatgatcctcctgcctcagccttcagttgagttctgggatgataaccggtgtgtaccaccatgcaaaacatgggagtattatcaactgtagcttaattggcaacattgtgtctttcttaatgatttattaaaaattgtgcatttgactaccactggtatcttctttttttttttttttttttttttggtttttcgagacagggtttctctgtatagccctggctgtcctggagctcactctgtagaccaggctggcctcgaactcagaaatccgcctgcctctgcctcccgagtgctgggattaaaggcgtgcgccaccacgcccggtgctaccactggtatcttaaatgagataaaatgcagtgtgtatgcatgtacatgtggagtttttttttttttacatttttttcttatgtagaatgcaaattttatttttccaagaagatactttttcacttgtcataggattttttttttgttaaaaccattttatttattttatgaatgtgagtacactttcaatcttctcagacacattagaagagggcatcagatcccattacagatgattgtgagccaccatgtggttgctgggaattgaactcaggacctctggaagagtagtcagtgctcttaaccactgagccatctctccagtcccttatttttatctttttaagacaatatctcacccaccttccttccttccttccttccttccttccttccttccttccttccttccttccctctttnnnnnnnnnnnnnnnnnnnnnnnnnnnnnnnnnnnnnnnnnnnnnnnnnnnnnnnnnnnnnnnnnnnnnnnnnnnnnnnnnnnnnnnnnnnnnnnnnnnnnnnnnnnnnnnnnnnnnnnnnnnnnnnnnnnnnnnnnnnnnnnnnnnnnnnnnnnnnnnnnnnnnnnnnnnnnnnnnnnnnnnnnnnnnnnnnnnnnnnnnnnnnnnnnnnnnnnnnnnnnnccttccctctttccctccttccctccttccctccctccctcccttctttctctctctctctttctctatttctttctttcttcattccacatcccaatatcagcctcctctcctcccagacccctctgcagctcctccccccatttctcctcctcctcccctccgagaagggggtgtccccccattacaattttttatgttatatgtatgggtgttttgcatgcatgcatgtctgtgtaccacatgtgtgcttggtgctggcagaggccacaagagggtgtcgggtcctctggaactgaagttacggatggttgtgagtcaccatgtgggtgctgggaattgaacccaggtcctttggaaaagcagccagtgctcttaactgcagagccttctctccagccccatatgtaagtgttttgaagggggtccattccaataatgaggcttgcaagtatttttccttcacaacttcctgggggggcatgggtgacttgtccccctgctccctcgtgtccctgtgtccactatttctcaggctgtttctctggaatgaagcccctataacctttcattccagtcactgtggtaggataaaatgcagcattacgcattgatttggatgtactaggaaatgtactataaacaggtgtaaacactctgaagttcctgtaggtggaccagtttagtgctgaggttggaaggtgtgcacatagctatggtcccttgataccctggccctggggtgtgcacatagctatggtccctctgtgcatagcccatacaacacagagttttatgccatatgggcttatgggcagtgccccatacaacacagagttttatgccatatgggcttatgggcagtgcttccatatgttttttgaagtagtgtatatttgctgccacaactgagagtcaatagctttgatcaaatactggacatgtatattcaaccctttttaatttcagaattatttatcttttttttttttttttccttttgtgcctacagtgaggccaggttccagagactgtcctcttcctcctcagggcaacaagactttgaaaacgagctggttggtatccaatggatggtggttttgtgacgcgaagggccgagggtgcagcttggtagcaatgattgattgaggtctaggcggttgcactcctggtttagtgactaacagcactgtgatctgtgagaggtcagctctggggaaagctcccctccatatgaatggaaacatgaggacttggaagtgtctagaaggagacagtggttaaatgatccctccctgcaaggctccattgactttccaggcagaacaggctgtggatctcctgggctttggcagcaacttgtctcttactgttatggttcttgtacaagagttaattattgacgtgtctgctagattttgagccaaatgtgggcagggatcctgcctcatatagccttgtccccagcactagatatctggtaggtacttagtcagctgttgactgagtgatgagcaaatatttgtctttcccaactggtaacaggctagctttatggagcagtaggacctgagaggtcatggaacctacacacatttctttccctccctaaggcctatgctgggtgctttctaatgcattagactggttcctgttgtgtcttttttttaaaaccccacctgccacggggttgtgccttgcaaagaataagagttagggggggtcaactcaccaaatgtgtgaaggaaaatcctgttctacacagatccaagaggaatggtgatttgatctcaaagatgtgattgtatctgcctcccaaagacatgggtgctggatgctaatacctgttctctgtctccagggatgctgtccttggctgacggccatcttccgcctgcagtgagtaagatgggggtgtctgttggagcatgtggcttcgtgtgagggctttgccattcaggaggaagtagctgagatgttagattctgaagtggtatctctcatacttttccggttgaggacctaaacggtgtataaggtctagaacaaagatgactgggaagtctctgtagtcagggcccagggaaagaaggaggccttctgcgtatacagtcctacgggggctcagacatccccaaactgcagttggatttcaaaggttcttgaatctagtgataaacatttgaatccaatcaaggtggctgtccgagtatgggattgaacccagggcttcctgcataggaggtacagtaggctagatccccaggccttagttaaacgaatttaatttccccacttactcgttctgatgcatataaacccgtctagcagagttcctatccctatctaaccaatgtgacatatcaaatagaacaattcctgtctaaagcaaaacaaaacaaacgcccctccaaaacaaaacaacaaaactctaattagattatataatattataaaagaaaaggccattgtagagttagtgaaatgggcttggggattctcagttcctctctcagggcctcagtttctccacctgatttgtgtgggagtttggtgggagttgtccccgagattgctggtgggaggcagggtcacacggagaagccagggaacttcctgaagccgaggaagcaggtgggcgtgagcctggcttgcttggaagtggaaagatgttagcctcacagtgcatcctgaaatgaatcactgagcaagcatgatgctcgctgccttgtccgtgagcacccttgggagtcggatgtgctttaactcattgcatcccggagctctgctggctgtttgaggtgggaagtggacagtcagttctgaacctattggggtactgtgtgacacaccagtgctgggcacaccagggctgggctgtgcaaattcacttttgttttcatgcttctctgcttgcttttctgcctttaccacatagggcttccctggtcactggctttactacacaaggcttacctggtctctggagcaggagccttggaacccctctgtgtgcacaataggagtaggtggaacccctcaccctcctccctctgtgaaaaggaaatctggttgttgtggcccaggaattctttgtgggtaggaaggcggatcaagttactccttcatttctggggccaaggcagggacagagggaaggagttgtacaattggatggaatgagacagagaatgttcaaaacatggctcacctctgtctccaagcccatcctggggttggggaaagggagatacagggtaaaggagggccaaggcgagctgcatggtattcccaaaggggctttcagtatccatcttgctgtggaagcaagtagggattgtgggaaagttgtatgcatacgcctcatccatccatcataggacgggagcacagacgtttctagcaacagaacacaggagatggtagttcattcactgagagcacggtgctgtgtctggagatggcctggaactcatgccaatagctttgcctttacaagttgtgtggtccttaaagctacacaggttttctgtgccttggtatccgcatatatctaagtaaaagatgtggcataaaatactatcacctccaattctcacgagaactggacagatgctccgtgcagggcctcgtaggcctgccttccactgctacctgttaagagtgtctctgcgtgtgtctcggccagtgacgaccagatcctggagtggtgcggagaggacgccatccactacctgtcttttcagaggcacatcatcttcctgctggtggtgatcagcttcttgtccctgtgtgtcatcttgcctgtcaacctctcgggagacttgctgggtgagaccctttcttggccagtgcctgtgttggggtggagcagggctctagggaagggactcagtatggtagggtagaccctgggggatgggagacagtctgagggtgactttaggaaaattaccatccaaataaatatctagaagagaatccctccgaatctggaatatcaatttttggttctaagtagggaagaactggctaaccaaccaaccacaggcctaagaattgggcaggtttcaacaagtgtgtttttttgagacaagatcctaccatgttgtccaggctagccttcccttaccctcctgagtgttggaattataagtagagccactgcccccagctttagaatatatctttctcttctcttctcttctcttctcttctcttctcttctcttctcttctcttcttttcttttttgagacagggtttctccgtatagctctggctgtcctggaactcactctgtagaccaggctggccttgaactcagaaatccacctgcctctgcctcccaagtgctgggattgaaaatgtgtgccaccaccgcccagctagaatacatctttcaatttcttacctttatccaagcctggaggccaccattcatggacccagatgcccgtgatgcacagtcaaagtcattgtggagttatatctccttagcttccaaaatgctatcacagatccacttgtgacatccaggctctcaaccttcttgctggtaacaaccaaggctgatactagttctcaacaaagcatctttaagacaaacctctgtgccaggtgaacttaaattctgactttgctggtacagcgagctgtagcagaggctctgagcgacggaggtttaaacaggtggatgggtgtcgttgtcttccatcttggtctagtcatcttgtattgtgcctcccctgagctacagacctctataacccaaggtcagttaggccccttcctggtttctcacagtaactctggcactaagtgtctccttctctgcaggtaaagacccttacagctttgggaggacaacgatagctaacctgcagactgagtgagtatggatggaacctgctgaccgcaaaggtggccggtttgggagtggagggcaggctggaaacacctcaaagctgctgtgctgctgggctgtggtatgaacatgcccgggcagctttggtattacaggaggcttagagctccgtgtcaggacagagaagctgtggtgtgagcatatctcaggtcttcagttttgtaggaggcttagagcccgtgtatgaatagggatctctccgaagtactgtggcctctgttgggggcaaagccactggctcttagcaaagtgctcaccgagggcgattcagccccagccttgcaccccatcccttctgttgggatgcccagccttggtaacaggcgatatcttccttagcaatgacctcctctggctgcacactgtcttcagcgtcatctacctcttcctcacggtgggcttcatgtggcatcacacacggtccatcagatacaaagaggagagtctggtgagtaaagctagggcctgggggatgttctgccgggggcgggggggactctcacgtgagagatggaggggacagtccccatggcctccacagaaccacatcagtagtgaactcaaggactgctggaacctgatttccgtctttatgcactcagctggcatcaccaccaccaccatcactaccaccaccaccaccaccaccaccatcatcaccatatcatctatcactgtttttttaaagacattgtcatttgaggtagctaggtagccaaagacgaccttgaacacattttgcccccaccccccaagggttaggataacaggcactcatcaacatatccatcttagtagtagggtcgttattatttaatctactggtaaatggcaatttggaaattttccttcctttgtcagttgctactcaatctgtggggtcagggcttgtagctacggctgtgaaataagggagtctatggaggactgtgagccagcgctagagtgctcgcctgaaaagtgccaggctctggctgataacttcccctgcaaaaacaacacaaaacacaccccccattctagtttgctttccggtactgtgagaaacaccatgacccaaagcaacttaggggagggagagtttatttcagcttacacaccagaaactgaaggaagtctgggcaggaacggaaatagaaaggaagagtgctccttcctggcccacccctaggctcacagccttctggctttcctatactgtccagggaggcttgcctagggatggtgccacccacaatgggcggggccctctgacatcaatcatctatcatgacagtctctcacagatacggccacagaccaatgggatctgagtgattcctcaattgaggttccttcttcccgggtgactctaggtcgtgttaaattaacaaaacaaaacaaaagccagggctggagagatggctcagtggttaagagcactgaccactgttcttccagaggtcctgagttcaaatccctgcaaccctatggtggctcacagccatctgtaatggaatctgatgccctctttgggtgtgtctgaaggcagtgacagtactcacatacataaaataaataagtaagtcaataaataaatttttaaaagacaaacaaacaaaacaccaaccagcatctccttctccaaaccaaagcagcctgggctaaggacaggtgcccctctgtgattcgttgggcttctccttagagccacgtcccgttctggactcgcagttccctgctctgcaaaggaggcgtatgatttgctttggaaaaggatgcagtgtgtgtaacacccctgggcctcttcaaggccaagaatgagaaaatgtggacttcctctctaccatctctctcgtgatgacaccccacgtccccaatcaccccttgactttctcctgctatgttccctggcaggtgagacaaaccttgttcatcacaggactccccagagaagccagaaaggagactgtggagagccacttccggtaagagagagaccctgtgagccactcatggtgaacagggctgtggagggccccggggcccctgaggcctgtgtcttctgtctgagtgtgcagggctgatccttccctgccatgggtatcacgtggcttccaggtgtggccctgctgagctgtgccagcagcctgactgggctggtgtgtacttggcagcagttgtggttaaggctctgggaccaggatccacatacacacacacacacatacacacacacacatacacacacatacacacacatacacacacacatacacacacatacacacatacacacatacacacacacacatacacacacacagtgcaggctgaagttcatgctgaatgagagctgagttttcatgccgagctggtctcctaggcccatggatgttggctgtctacagggaaagcctctggctgtcaagggctgtcaacctctgcagccacaggccctgcaggtagagcaggcaatgcttacagccacaagcacagaaaaaggctcagcattgattcccagcaaaaagagcagctccaaggctccccccggcccccaccaggacactccccagctgaggtgtcagcctctcttcatccctggtcagttctgatgccacagcaaataccaggcaggagctagctacagatgaactctgtgcagcttatgaagaaaacactaggtgaatcattagcataaagagaactgtaagagaatgcttaaagttactgacaagtctctccagccactacaacaatttaggagatatttgcatatgtatatgagtatatttgcatatccacttgatactggaatgattctttttttttttttccagcccttgaaagaaagttcctctaagttgcctgctaggcaacgtttgagtgtgcccacttcatgtatggacttaagtaggaaaacatgtgtctgcatagccatgcaaacactgtgacttagacactctctgtttaggaaggcttcctggaggaggctgtgggagtgcacagcagtggacttgtggctttgcttcgcagcagggtcacactcactgtgaatctccttctcaaagtcttttccccctcatctttttgtgattctgatgattgaatcttacatgacagaggctctaccactgaaccacatcccaagccttcttctgaactctcggggtcagaactggtcctaacaaccagcaagctagttggctcatccatgggcttgccttctcacacacttactaaaattcaagcttaagcaggttatacttccaggacccagaagagcagcaggtggtgcctgatgtgggcctgcagtcgtcaggagtcatgtggacagtgttttgtgtatggtaccagggcagtttgtggtagctcttggctgaccttggagctaggctgcccggattcagtttccggctcaaacatttaccggctgtgtgaccctaagcacaagaaccccttacccttggtgaggcaggtatttgattgactgttatgtgtgtatgtgtgtgtatgtgtgtgtgtgtatgtgtgtgtatgtgtgtgtgtgtgtatgtgtgtgtatgtgtgtgtgtgtgtgtgtatgtgtgtannnnnnnnnnnnnnnnnnnnnnnnnnnnnnnnnnnnnnnnnnnnnnnnnnnnnnnnnnnnnnnnnnnnnnnnnnnnnnnnnnnnnnnnnnnnnnnnnnnnnnnnnnnnnnnnnnnnnnnnnnnnnnnnnnnnnnnnnnnnnnnnnnnnnnnnnnnnnnnnnnnnnnnnnnnnnnnnnnnnnnnnnnnnnnnnnnnnnnnnnnnnnnnnnnnnnnnnnnnnnnnnnnnnnnnnnnnnnnnnnnnnnnnnnnnnnnnnnnnnnnnnnnnnnnnnnnnnnnnnnnnnnnnnnnnnnnnnnnnnnnnnnnnnnnnnnnnnnnnnnnnnnnnnnnnnnnnnnnnnnnnnnnnnnnnnnnnnnnnnnnnnnnnnnnnnnnnnnnnnnnnnnnnnnnnnnnnnnnnnnnnnnnnnnnnnnnnnnnnnnnnnnnnnnnnnnnnnnnnnnnnnnnnnnnnnnnnnnnnnnnnnnnnnnnnnnnnnnnnnnnnnnnnnnnnnnnnnnnnnnnnnnnnnnnnnnnnnncgttttctagatcctctagagattcattggcatcaggaaagttgtgggttgagtaggatttcggtgatagcctaaggtagaccgatccctaggacagatgaccaatctcttcctttcagtggctggggaggataatgttgcagtctttctttttggtactggggatagtatcagtggctaagcactcgaccagtgagccataccctcagtcctggtatgttcctatttcccatgagaaatttccaccagcccaaaaccgaaagagtattaatttgttagcttaaggcaattactttcatgttgctgaaaaaaaaatgcctctggggctaggggtgtgactgtaacaggcgatagagcatatgtttagtattcatatggtcatgggttcagtccctacacctcacccccacttctttgtatttaatttcccctctgtggaaacttaggggcaattatcagacagaggcgtcatgactcccatggaagggtgggtgggggtggtcattcctgcaggaatgatctctttcaatggctttttttgcccccaccttgctggccacagagatgcgtatcccacgtgtgaggtggtggatgtccagctgtgctacagcgtggctaagctgatctacctgtgcaaagagaggtaagggaggtgggtgccagaggtcagctggcctgcagctttcccaccccttgccccgagatgcccactggcttccttgctggctgctgccaaggggatggtggtgggtggtcctgcctctttctggatctcaaagctaacctcttaaccctgccggtgactgattgttggctgtggtgtagtgccaggatggagggtctgagtttgtgcctctctttcgccttacagaaagaagaccgagaagagccttacctattacacaaacctgcaggcgaagacaggccgacggaccctcatcaaccccaagccttgcggccagttctgctgctgcgaagttcagggttgtgagcgggtgagacattgccatctatctgcctggagcaggggataggcaggggtctggggctagggatgtaacaagtgatagagtatgtgtttagcatttacacacacacacacacacacacacacacacacacacacacacacacacacacagagccatggtcacatcatctaggggctgtgtcttctggcaggaagatgctatttcttactacactcgaatgaatgacagcctgctggagaggatcacagccgaagagagccgggtccaggaccagcccctgggaatggcctttgtcaccttccgtgagaagtccatggctacctagtaagtgtgactggtcccctgatcccaccggctgactgactcttgtttcttgtgttgaggcacactgctctccgcttttgggggaagtccagtttatgtctaagtgacagctggaagggcggggcggggctcggttcttgctgacctctaccaggtactctccccagctgccccagtccaccctccggcttctgcgtgtaacattctgtcgggtggattgacactcaggacccaaggccctcctttcctcaggacaactactgggaaaccctggagcatctgggtgttaccatagctacaggatcctggagctgcaagcttatgtgatgctcacaggcctaggctcttgtgtcctctcaccttagagtgtgtgtagggcacagaggggaaaccgagcctcttgtgctttctctgtggctctgggaatggcctctaggatgttaccaagggctcttgcctcagactgtagcagtaggaagaggagacaccctggggtagcagtgaagagtctgtgggtttctttatgggcagccaaagcagacagaagcctttgatggaggaggtgggccaggagtcctaggagggaatttcaagaacaggcagtgtgtaatgtgacctggcctggggacaaaaggagggctgggaaggtggagccacttggttggaacagagtcagctttaaggtccagtgtcacaaggaccttagaggccttgagggtggccacttggagcatgctgtagtagggcagtacaaacaacacagaagccaggccaggtatctgggacactaaacctgatgtcctgggcctcggctttcttgtctgtaaaatggggtagcaaccttttgcctgttgagtcatgatgaggacaaatcgcagcctgaagtgtggcacgtgtggtgtttctttttgatcgtttgagacagggtcttaaatagctacgactgacttgaaccatactatgtggcccaggctggccttgtctacccatgatgctcctgcctcagcctctccagggctgggattgcaggccagtctttcctagcactaattataataagatagtgactctggggtggcgtcctgtgctcttttctgtctgcagttgctgtggatgttggtggctcacaggtgacatgcagtaacagctttgtgtttcttgacagcatactgaaagacttcaatgcctgcaagtgccagggccttcggtgcaaaggggagccccagccatcctcctatagcagagagctctgtgtctccaagtggacggtcacttttgcctcctatcctgaggacatctgctggtaagtttccagacttgggacgagtgggagagagacccggcttcctgccggggatgcctgcttacctggggcgtagatgtggcctgcctttttattttttttaacttttaaaaacaaatatttatttattattttatcatttttttgattgttttaagatagggtctcagtatgtagccctggctgtcctggaacttactatgtagaccaggctgtctttgaactcagtgatctgcctgcctgcctgcctgcctctgcttcctgagtgctggtaacaaaggcacgtgccaccactatacccagctttttaacaaatatttaaacatctacgatatgccaggtagtattctattttcgttggttttattattttaattttcctcttggggcccagaggagtctcagccagagccctagtctggcttccctaaagttcacccgacgtgcctcagccacagcggatgtccatgtctgagagactaagcctctctctcggctggtgttgtctctgcaggaagaacctctccatccagggcgttcgctggtggctccagtggctgggtatcaacttctctctgtttgtggtgctgtttttcctgaccacgccctccatcattatgtctaccatggacaagttcaatgttaccaaacccatccacgcactgaatgtgagtgaccagcctgcaggaaaggggtggtggggagccgtgagacctgggcgtggagggtttgaagcagggggccaggccgttgtggaagctagagaaggacattggttgtcttgctctattactttgagacagtctctcagacctggcaataggctggtggctagaaccacccccatctcccccgccccgccccgccccgcctcacaccgccccgtgatcttcctgcctccacttcttgccctgctgtgggcataggcatgcgccaagcctggctttctacatggactgctggggatttcatacttgcacagcaagcagtcttatagaatggagcactcctagcctacatttggccttttaagctgaaagcaggcatggcaatgtttattgtagtgcctttatggtaatgcagttatagtcacttaatggaaccagtctattgctcacaggaaagagcatttcagttgaatgaagtgtatctagtctggaaaaatgtgcaaagtttatgaaaaattgcatagtcattctggtaaggttataatgaaagcagaacacgtaggggtgtgatggctcacacctgcaagccctgcacttgcgaagtagaggcaggaggattaatgcaagttcaaggccagcctgggccacagtcagatcctctttcaaaaacaggccagccaggtccagagacatgtctcatggttaagagcacttactgcgtttatagaggacatgggctctgttcccagcaccatgttagacagcttatagttgcaagtcactctgctctccacacctgactgaacgtgtacgcatttacccatccacagaggcaagcacacatacacattaaaaaattaaaaaccaaaaccaaccaaccaattaaacaaaacccccaatacacagtgtagaagtccttttaagctgtgcttccaatgatacatacatacatacatacatacatacatacatacatacatacatacacacacacacacacacacacacacacacgtagacagagaagggacgtaaggcacaagacacatgaaaagagctttgttagttggggtggtgggataccttagattagaggttctcaacctgtgggtcagtgcccttttgggggtcaaacaacattttcacagaggtagcatatcagatgtcggcatgtcagatagttacattacaattcataacagtagcaaagttacagttatgaagaagcaatgaaaataattttatgattggagttaccacaactgtattaaagggtctcagcattaggaaggttgagaaccacagccttagatggccaggcatgatagacattgtcatactgcacatctgtaatccagagcttgggaggggccctggcactgtggtcctgacgctgtggtcctggcttttccatccgttgccggtgaattctgagcctatgtttttcattcatgttacacctgtgatatatagagggagctgactagaaatcgttacaacgccctaagcatacacagcatagttttctgtagactcacagccggtcaagctcatccttttgccagttgatgcgggacaaggcctggtctttggaagagagatctgctgggtagagttccctttggctgtcttgcataaattatatatatttttaagatttctttattttatgtatacgagtacaattgtagctctcctcagacacaccagaagagggcatcagatcccattacagttggttgtgagccagcaggtggttgctgggaattgaactcaggacctctggaagagcagccagtgcttttaacaactaagccatctttccagcccccagtttactcttatgtgataaaacaacatattttcaggaattttttcttttcagaaaaaacttcctttcagaaatttcttttcaaaacgtttaactttatcttttaaatacatttatttctgaggtacgggcgatggaattcaggagctcacacacactcagcaagcactcgatatggaaccatacccctaggtggcctagattctgtaacatttgtaactggtaccaactagtgtgaacaggattggaatcagacacggtggagctgactggtgggccatgtggagaggagccctggcctccagatagcagctgtcagctttgccctagggatggagacgcctccttcatctaggccaccagtgaccacagccccagcgccatcttgactctctgtgatggttcgtgtcttgcagaaccccgtcatcagccagttcttccccacactcctgctgtggtccttctccgcgctgcttccgtccattgtctactactccacgctgctggagtcccactggacaaggtgagcacagcctgggcttctcaccccacccggggctgcaggcacgctgcccgatcttactttgactgacttaaactcacctctgttccctcgcaggtcaggggaaaaccggatcatggtgtcgaaggtctacatatttttgatcttcatggtgctgatcctgccctccctcggtctcaccaggtaccttccacctcttgcctggccccagtcagactcaggatgggttcttgctgtctattctggaagtcccatagtccttaaagacaagaagcttgtgaacaaaacttacagcggacttccctggtagggtggggctagtcctagctgtgtttatcttgtggagggaagtgccagctaaagcctgtgtgacctcaggggacaaatgtctcaaggttggggctgcttttagagtggaagaaagggtctcacactgcatgagtgtgagaaagaaaaccggagggtagaactctagattggtgtgagcaagaccttgggtttcatcttcagtactggaaatcaatcaattaaacaaacaaacaaacaaacaaacaagccgggcagtgtggcccacgcctttaatcccagcacttgggaggcagaggcaggtggatttctgagttcgagggcagcctggtctacagagtgagttctaggacagacaaagctatacagagaaaccctgtcttgaaaaaccaatcaaccaaccaaccaaacaaacaaacaaaaaccaaaccaaaccaagccaaatcaaaacacaaaatgaaacaaacaaatgaataagaaacatatggaattcatctgcttttctgcttttcagcttggatttcttcttccggtggctctttgacaaaacttcctcggaaacctcaatcaggctagagtaagtattgactcggctgccatccagtgcatgggactgaagagctctgggtgtggggtgtggggtgggggatgggggttgtgggtggggagtaaggggagtgagggaggctgtggcagcagctagctagcgctgcagtgtggttattccccattccccttcaggacaggcatcctcccctgggaataccaggccttgcactcacaccagcccctcccacattcctggagcatgttgtgggagctgacctactttgtgtctacttgcagaaatgtggttgtcttttagcccaagactctattagtggcccccacttttcttgtttaagacttacttacagaccacagagccgttggggaaggtacttctgggaggtagtggtgccccagtcacagagggataataattaaatgtagtgtcagtgtagcccgtgggtggtttttgtcaggagaatggagttcagtttagggctggtgtgtgtccttgttagtactcaaagcctatgacacttccctcatagtgacagctgtgatttaaaatggctccatgcgaaatgtttatgcgtcctttaccctatgaagctatgagggtgtgtgggtaaggagatggatctgtgtcaagtgcttgctatgtggtctagacaagagaagagagacagagacagacagagagagctgtgggacagatgttattcctgtctccattttacagataatggggtgtagaaatattgaggttgtcacccaaggttctccaactagttattcagcccatttcactatactcgagggctttcaacagccccaaaggccccagattggctgggaatgatcacggaggaggctggcctataaagatggagcagttgcttcttgctgacttggctggtgaattaggaacaagtagctacaggtagacatacacctacctaactcaccctttcctgggtagacacggcttctggctgccacatccaatggcctgctcctctctgtgactcctcagccacacctgacataccggccgaggctcttcccagacacagtgttttcatttggcaccgaactctgcccttgccatccctgcctacagcatctcctttgcaaccttcttgggacttcctgcaaagctacctgagggagggctctatccttgcccctcctcctttggactcatggcttcattgctatttggctactgaattaaaatacgtacacaaaggggcgaggggtatgcagtgctgggcttcatctccagtgccaaggagttaaagaaaacaacccacagtatccatattaccactttagagtcttctgtctcctgcctcagcttcaggtggagcccctgctgtgcactgtggactttactggccccaacccagatctgatatgccccagttctccttatagctctcttaagttggccccccaaaagccttggagcgcaccctgtctttttccttcccctctcctccctccatccagtctatcagcacactcccccagttctatctccgagaaaaatagagaatcagaccctgcctcctcatctccaccagtaccaccctcatcccgcacaccctacagttgcgaccgtgtccgctgtatctttcagcctcctgttctgcctcccctttgcccgctgctttccagggccccctgccctcctactgttgcttggcactgccaggctcacagctcttcatcaatgtcattatctgtagtcccttggtgtccaggtgatctgcttgctcagtgaccttttgatacaccttctaagctcagtgacattgtcctccccccctccccaccccagctggacagctcctggaacactgcctgccatactgtgtatgccatatctgattgtgtccccagagagtgtgcaaatgcaaagagcaaagagaacagagtctgaggcctggttttctattttattttattattttgagaaacgattctgctatgtagcctagaagggcctagaatcatgattttcctgcctctgttgcctcaatgctgggatcacacgtattatggctttcagcacagtaactgacactcggacggtctccacagatgtgtgctgaatgagggatatggcaagagccctcccagaggtgccctcccagaggtgccctcccccactccagttatttttccagctggaaggaagctctggggctcccagctaacagccctgtatctcgtcctaggtgtgtcttcctgccagaccagggtgccttctttgtgaactacgtcatcgcctcagccttcatcggcagtggcatggagctgttgcgcctgcccggcctcatcctctataccttccgcatgatcatggccaagacggccgctgaccgcaggaatgttaagcaggtactatataaccttgggtcctgtccatgctccctgcctgtgggcctctcagttctctggaataaatcctaggcacaataagagctttgcaaacctgggctcaagggctgcctctgcctggatcctctctggatcatgacaagtctttccctagctttcatgctgaccattgggccagagaaaagaccttggggtttttgtggtctaatgcatctggtcacacactgtatctatcagtcttctcaccgcctgtgcagggaacctgacagaagcaacctaagaaaggggggatttggccttcctgtcttggccttcagtttgagggtacagcccattgtggtgggggaggtgttggggtgagagcgtttctagctgcggggtgggagaccgccggttacgttggatccgatgaggaagcagggaaacatgaatgctagtgttcatctctttctctcttctttctttcattcagctcgggactgtggtccacagagtggtggtgccacatacactggaggggtggtggccttctttctcagttaaacctctctagaaacacagagaactgtgtctctgaggtgactgtgactccagccaagttgaaaatcaaggtcaatcatcacacaggaaatgcatagctaaaagctacacattcaatgtgttaagcccctgcttagtaagagagagattatatacaacccgtagacccctttcctggggacctctgtttggacctattcttaggagtacctccaatgtccaagctatttcaggctggcacgcattccagacctcctaagttgggtggtgtggggtcgctatgccttggtgagttctgtgagaggacgcaggaagccagctgtcttctggattttgtgatggatgccactaatcttgttttacagaggcacaaactgagctggcccaggttacccgaactagggttgagctgatggtggtggtggtggtggggatgcccagtctgtgtggaatctctctggtgtatcctccagctctatctgccccaggagctcatagctctggtgggagggtacagttagaggaggggagccctgtgagagcacacaccatccaccatgctttggaagatctgggcgtggctggagaggagaaagccaagcctttcagaagcattcctaactacctagtcctccctgaccccgttggacacccgtacccgccatgcttggagtgcacagaagggtgtctggggacagagccagcttatgagatccttaaccctttccttcccagaaccaggcttttgaatacgagtttggagccatgtatgcgtggatgctgtgtgtcttcaccgtcatcatggcttacagcatcacctgccccattatcgtgccctttggtaagtggccctggtgtccgtctgtcttagggctcatggccagctgactctgtcacacctgccggtgacagctaccaccaggtcacatggattcccagaagagtgccctcttgtagttacctaagtacaaaatttcctttcctttctaaatgattgtttctgctggcctctactgtggcctctctcaacatgtctggtgtgagtttctgtgttggctcattatggtatcttgtttggtttgtgaatgcttgtgtatgtatgtgtgcatgggtgagtatgggtgcccatgtacttggtgtatagaacagatagatatttctgttctttctcttcccttcctttcccccttctcttcttttcccttcccttccctcttttcccctccccttcccttcccccttcctttctctttcctcccctcccttcccccttcttcttcctttctctcccctcccctcccctcctcttcctttccccttccctgctctcccctcttttcttttttgagaccgagtctcaccttgtagccttggctggcctggaattcactgatatgtatactagattggcctcaaactcccgaagatcttctggcctgagcctctgcctcccaagttctggggctaaaggcgtgtgctgctacgtccagcttgtctgctgtatttttttagagatggtctctggataaagccagagatctctgactgggtagactggctagctctggggctctgcctgcctccatttcctcctctcagtgcctcaggtacagaagtgtcccaccatgctcagcatttacgtgggcttgggatctgatcccaggttctcacgcttgcggcaggcgcctcatgagctgagctgtcacctcagtcctaattatcatcatcgttgtcatcatcaccaccaccaccatcatcaccaccacatcaccaccaccattaccatcatcattatgatcagcatcatgtagatcctatatagtttacaaagcctccctatgttgtagcacaggtcagcttcaaacacaggaccttctaccttagcctcccaaacattggagctatagctgtgtgtgtactcaatgactggctctttttaatgtaatttaatttttttaatgaactgaaggctagagaaatggctcagtggctaagaaagagcatacactgttccttgctcaggacctgagttcggtgcccagcacccacagcaggcagcctgcctccaattccagcttcagagaaccggcgccttccttaccaccttggtcacatgcacgtaaacattcacaaaaaccagataataaaaacattaattagttagctaattaatttttttttgagacagtgtctcactattcagcctcaaactcatgaagatccacctacctctgccccccgagtgctgggatcatggccctgcagggctccagctcacagcactcttttattttttttttaaagatttatttacttgtttattttatgcttatgaatacactgttgctgtctttagacacaccagaagagggcatcagacctcattacagatggttttgggatttgaactcatgacctctggacgagtagtcaatgctcttaaccgctgagccagctctccagccctaaccacagccactattttgcaggcctcatctacatcctgcttaagcacatggtggaccggcataacctctacttcgcttacctcccggctaaactggagaagaggatccacttcgccgccgtgaaccaggccctggccgcccccatcctctgcctcttctggctcttctttttctccttcctccgtctgggtgagggacattctgctctgtgcccagtgccaggcctcatatccatccattcccccccccccccccccccagccagtcagctcactagctgatgtcccagtgtcagtgtggtagaacaaggtgagggctgcttggtgtggtgttgacaaccgggctactgagctaggtcaggtgtgacagagccccggaaatccccatggaggagagggctgctgggtcagttctgagccagaggatatgaaactgtacagtcagccccagagaactcccatcccgactagccttatgctctggaggctggcaggaactgtcctagctagctcactgtcaagggctccttacgtggtatcccagtgtctcaaacccagtcagggatgggtctagccatcatgtgggccatataccctgtgttgtgtgctctgagctgtgaggatactattctggcagttggaatgaggagcaggactgggggctgtggggaagtcacccacagtctggacaccaggcctggccccttcctcaccagagcaagcataacaggaagcgccagcctccctcaagactgcgcgtatgttcccaggtctgacggccccggccacgctcttcaccttcctggttgttctgctcaccatcctggcctgcctgctgtacacctgctttggatgcttcaagcacctcagcccatggaactacaaggtaccggatggtccgacacgcctcaggctggacagcgcagctctctttttccccatccccgtgtgtgtgaatggagtaccagttgcccccagctttgggagtggggtgtgttgtggcttcctccctgccttccctccctcccctattccagcccccccccccccccgccccgtgtctcagttgggctgcattgggagcctggtgccggctgctcctattattctgctgggttactggtctgtttgtttgggggaccttagttcggagagactggctctgttcgtcattgtatctgctgttgtccacagacagaagaatcagctagtgacaaaggaagcgaagctgaggcccacgtgcccccgccattcacagtaagctgctatctgtgtttccgtccccatggtggttactgtttgtcatgctggttgcatgattcccacccagagaagccataagaatgtgctggaacagttctgccaggctggaaaggcccgtcttcttcctggctttccctgactctatcctccaggatgctccctcagggtagggtgtggctcttgagccccagatggtagagtggtaacttctgctcatcctaacagaagtgagggtaggactctgactggcctcctcagcctcaggccttccagccgctacctccctagggaaaagactcttcaaagctggggagtgccggagcacgcctttaatgccagtacttatgaggtagaggcaagtggatctctgagtttgaggccagcctggtctaaggatcaagtttcaggacagtcagggttacattttaaaaacaaacaaacaaacaacaacaacaaaaagactcaagccccccataagtaggtgttcaggagtgtagttacccagaggcagccatggcccaggccctgccagccagcaaggagagcaagcaatgaggaagcttagaaccttcatttccaccctgggcccgggagggatgcatagctgacagacacatactatagacagacaggcagacagacagttcccaaataaacagacagtcacccagaatacagtaccaggaaggagtgcttcctctgagaactggaggaagccactcttcatttcttcatatggtcatgagagctgggctgtagacggcttcccattttgctctggcttctgagaagtgtactaataaagaagttgacttgttttgggtccagatgtcccatgagaatgctatttcttgatatgtgtcctcccgttgggagaaagaggggtagtggggcatgaccaggatgtgagatgtcaggcttgccaccatccaagatctaactctttgcctttgccgacagccctatgtgcctcggattctgaacggtttggcctcagagaggacagcgttatccccacagcagcagcagacctacggtgccatccgtaacatcagtgggactcttcctgggcagcccgtggctcaagatcctagtggcactgcggcttatgcctaccaggaatcctgagagtggacaagctggtctggcaggctgggagcatctaggaataccgagggacacaaggggctagagccccagacaggctcttgagggttttgctgcttaaaacccccgtattgtgagaagaggaaaccagcgggtcgtggggctctgggtaaccgggctgagggtatccatccggtggggctgctgtccctgggagccatctgtaaggtttcttttctggtcccagtgtggggaacatttacagctccctcttgtggtcatctgaggatatgcacttttattcccccatacactgctcaggatgctctctgtagtgagcatggtgtatgtccctagtggtttgtggccaagatcatgtgttgggcttttgcctttagggagatcatatttggggacttctggttgatggggagatgcgtccaggaaagacttagtccctctgagccctggaacactgcttagccttctgcaagctgatgaatagcgcatcagttgggtctgagatggaggccatgtggggccctacagtactgtcctgcctgcagtcccttttcagggatccatggattagctgtagggaccggggaataccttgttcttgttgatggcagcagggcagcaggctcatgcccactggtttgtagctgcctcctgctgtgtttccgggtttttgtatcatgttgcctgaatctgggctgtgactgggtaaccccacagcaggtggggacatgagaaccattaataaagtacccactgggctggtggtgagaccctgcctctcatgcttcttccgggtttatgtacagattttccacgtctgtgcaggattcttccagcctctacctgataagtctgctctgtccaagatagcaggggcagtgtcaagggcaacttggaattatgagaggtcagagtggcaggcacggagagaacagggtgcccctccatttcttcggttttgggcagctcactctttttccaaagtgggacctggggttgggccctagggggcaggctgagatgagaaggaaggtagcaagaaggaaggtgggacttagcagtccacggttgggtaaaggtgtgggccatagcaggcttgtggcagaccaactatttgggcctgcctccattccagcccccttacaacaatggaccaggcagggtctcccgattcctcttttcaagggtctggtggcccttggctacttgagccagccagccagccagtcacactgccttttctcccacaggtctgaactttgtgggtgtctggatggtgccatcactactctgggggctgcttggcacagggtggccctggccagtgactgtttgccagtctggattgattcagagggcccaatgggcaccaaagcacaagggcagaagtgtgagctgacctctggggggagagccaggtggcttgtcagagtagaggatagtgcttggtccagctgtgcttagaggtaaaatcatttgtcaccaaggccacactgcttaacacaggtgtatagtgtgttaggtaaattttagaaaggacgctgtaggtttcatagacaggtgttgagatgagctgtgccctgggatagctttattagtagcgtaatgacctacagggtggtcttaaagaagggagcaagccagagattcttcgtgggtatgaggcgagtggggagatgtagcctaagtggagtcgggtgaggcggaaggcactaggtaagagtaaaatcataattcaaagttgccttgggtcttggcagcccaggattgcttgcctacacctggaaggaagaggaccctctccctgctcagccaggcttccccctcatgcctgtggaccatgatgctctgacccatgttctctgggaggcgctgggaggagacaatggttcctgtcgtccagtagatcatgatgttagtcagcagatcttccagagagaacttcctgggaaaacacacaggatgcccgggctctgtgccaaggatcctgcccatcctgctttcctcaggtgaccggtgccattttcttctataggctgcctaggtcagggtcctctggatacaggcagatagctaatataagtcctgactgcagaaggcaacaattcctaaactcaccatctcagcaacctgcctccatgggaagtgacatcacccctgtttcaccaccaggtggcaccctttgcatctgggtgctttgagcccagaggtgcgcacaactgcctccaccttcctcctgggctctccaggtctctgctaacacttccttcctgtgacccattcttccacccccagttcaagattccaggttgcaatgagtctcccactcttaggatcccaagcaacttgaaactcctggcagcaggaagactggtatcctggctagaggcaatgtgctaagagtcaagggacccagatgtagacttggccgtagtaataaagagccctggaactctgacagttgtttgctgtgtctgggtcccagtttgtcctctggtacaaacagaatggatgactcttggaagacatgtggcggcatccaaagcacagggtacgtaggtctcttattttgacagcatgtcaatcaacttgatgaggacaaggtctcagaaactgattggagcagaatttggggtggggctttggggaagtgattgaatggatcctgagcgctccgacctcattattagtcaaatccatagatggctgtctaatacgatagtgtttgggaggtggtagaagtcagggggaggcagcctggctgaagcagggtactgtgaacctgtttttcgggctgtattctgttgtctgtcaatctacttgaggcttcacatatctgccttgatgttgtgccccactgcagacccacaacagctagatatcacagctaggatctttgaaaccatgagccaggataaactttcctttcaaattcactgtcctgtggtagaggtggggaaaggcaagacttggggacagggttagggacaatcatggaagacatctcttatatatgactgactgagtcttgaaaggagtgcaaaatggcggtggtagtgggtttgcagagagaaggttagcttggcaaacaccacagggctgcaggggtgaggtagcctcaaagcccaaaccttaccttcttggggaccggatcttgtgctgggtcctgagaagcccacatttccaggggctgggagctcatcaaggggctgatgaatcccgttgtccaggaagggtgtggccttttgcagggttacaaccgcagagatgccccggagctttgagagcccatgctcttgtctcaagctgcccctggggagtactgccatggctcctgtgatgtcccctgaccttaaagacttagccccatggctgtctgatgtccagatctccaatggtccagagcccccatgtggcttcctatcaatccaaaacatccaatcctagctctggattctggaaccctctggggttcccaaactggttctctctaatgggctagcatccacgattgaccgacgtttcttgctgccctctttgaggacatcttaaccccccagatagcagtgtcagccatctgtctttatccccaggtccttttgttcgggaggaggtgtcacttccttcacacacagatgatgggatcctgatagctccaggggcctcctactcccaacctggccacactccacgtccctgccacctgctcccaacctcctctgcaacctttctcagtattgtgctcagaaagtgtccctgctgcttgggcccatagaagggtacctgttactgggttttgcctctcctgtcttcctgtctgtctgtctgtctgtccatccttttgtctctctccctgctttgtattcaccaaggcttcccagctcccctgggtgctacccttctacctttccctattagcacaaacttggctctaaaagacccctcacctgagctctccatctgtgggcccaggctctcagtgggcatctttacctggatgctctgcagaccctgtccctcaacacagccatgccaaaaatgatcttagtgtcaatgctgggacagaccatttgacattcatgccagtgtgcatgagtgcacacatcgatgtgcaaacacacgtctacttagtcaccgtgttcagtggcctgcacatttacatccatgcacacacacccatgcacacacatatatgcagtggtcaagagcttgtaagtacacttacacacatgtgattaccaatacacacacactcagttgtgcacacttaactgtgtacacacatgcatatacatggtgttcaagagcttgtgcattcccacctgtgctggctcttaggcgtacatcctcacagccacacacgagtccatgaacactctcatatgcaagcatgcatgcttaaacacacaaggttcaggggtcctcacactcacacctccaggctcctcccttccatcctccatttccaggcattgacatctgggccagaagtcctggtcctgtgtcctccctgttgcctcaatctcagcttccctggctctcctctctgtctgtccctgcccctggtacctagacgacattacacaggctgcgttccctacctggccatcaacttagctctaggccaaaacgtagctgaagtatcagcagccatgggctgagaccagtcattggaggagtttgctgctcgcctcaactaacgatatccttttatcaatgacctttttattctctgaagcgtgctttaaggaacattgatttcctctgctctgctttccctaatggagcagaggcagggagatcctggagtgttgagggctaagggggcgtgacagaaatattcctatgaaatggaaaataggaagaactttaggtgttgacgctttcttggaaggaagaatataccctgactaaatcaaacatgaattccatggactgggagctgtgtcaagagccccattacctttcacctgattatacttcccacttcccacatccaccacttccagcctggggtatgagtcttctttctggacccaaaactacctgtctgttgaaagaacctagtggggaaacccccactcaatttccgttcggcgcgcacccaagaatcacgaacagacgaccatcttgatgtaaaagcatgaggtagtttaatgacggagctccgggctgacactgctaggacatccatgcttctcatgccggggcagagactgaaggtgctgcaggcattggtgccaggagcgtgccaagtccttgccaggcacccagtggggttcatggatcctgctgagtaagcagactcagggcgaggacttgtccaggctcttggtgacctccccaaaggaatggttttgccacctgtccttgatctgtgatcctgtgacctgctcaggcctctgcacaagtcaaactcgacttgcatttaaatggctttttgtcgtgtccggccagcagatcacaggtctgggttcgagcctggaaaggcattttggaaacctggaagagaagagggactaggcgacgagagaaagaaatgtagctaagtcaaagcagattctgatcaaagctcaattttttatttccgacactcagttatgaaggagggggagggacccgattcccgccaaagaatcttggagtaaggttgcaagtgaacacgtgatggcttcggaacagcaaagcgggctccagcagtgggtgtggcagaacgattgagcggctagctccatccaggtgtaaatagtggaaccattaaggctgggggaggggaggctacagcttttctctatgcctcggtcccttcgcccacccggtagacgcttgctcactagctcttcagggcccaaggtgcacattccgggtcattttccctctagacaaagcagatgctttctctggcacaggcctctgtacacatcgttagggcttgttcatctcacacccgtttcttcaaagctatccagctgttgtgggtgctgagctgagagcagtgacagaacagtgttcctgtcctgtttcactctctcttcctgcccacagctctgagattggtgctttctatgtcaccaaacagggaaagaaggcacagccctgggactgggggtcagagcaaaagcctgcgccaggcttaggaacaggactcaaactctgtgcgtggtgcagcttctagaaccacagagaagggatggctcccagcctttccctcatctctctccaactggccctgcaatcctaacctacaagtctgtacagggcctgggggagaggctctgctcttctgcaatgaaggttgctcactgtcctggagattccttgactgtagggggagctgctgagttttgaatcctctgtgtcactaacctgaaccagacacttgtcctgtaggtatctccacctctctgttctccacacagggtgcccctggtgacaggtagggtggcagcctcaagtgtggtcctgagtagagaggtacggaggcacccacatggcaagatagtttaagttacatgagctagctgggagactgccccagccaaaggcctaagctttaaactgtaagagaagtctcatgtaattcttaatatcagaggctgggtttgtgtaggggccgtgggaacttggggagcaagcaccctggctgcagggcaggttcatgcagttcactcagcctgaagctcaacacatagcagaacctgtttccagaaggtgagactatgtcccctcagctcctgtcacggtccccagtgcctgcactacagccagcacagacagccactgtcatttcagacccagctctcaggtcctggaagcaaccaagaacagctctgcatgacatcatcaggagagtagcaagtaggagcatcaggaaagatggccaacctgcccagggaactagaaaatcagcccctacctggctgctgcagggagagaccgaaacactgctgttgtttttcttggggacacaaaccaggcctttcccctttcctgggcataattatcccagcatgctctgctgtgcaccatggctcagtgctggcaccttgagccttcttgaagcagcaggcccatggggctctgtacacaatagcatccagagcccttgggagagtcaggacagactgagcacgagtccccacccctctctctttgtacactgcacagtcccaatgactcagctaatctgctgtatgcacatggcagtcacactctggacttcagacagcaaactgaaccgcagtgacccagagaccagatacagagatcattgctgaagccccatctaaagaaagggcatccaggatgtgaggatggcccgtgccagctttgcccagtggtctccttttgtgtggagctttggttatgtgtgggaaaactgcaacctgaaacttcagaaatcatttatcatttaaaactgtgtgccattcagaatgtcacgatagcatgtcctgccctcccccgccccccacatcataagctactccttagtccactgcgtcaaactgtatatactaggtgcctgttagtcacctagcagtgctcagctgtgaggcaattatcacagtacctcagagctgtgtctaagcctgactccatttaataatagacccaaagctcaggtccagcgctgccagcaacactgtacagaagagagcgctaacactcaacggaatcattagttgttactaatgtctccctaagtctcatcatgagtagcttcatcgtgagtgtgcatacatggttcaacatagcatattctaatactctcctcagtttgaggctgccatggggtgatgtttcttggaaagtaccatcttcaataagccccagtgaagctagagtggagggcaaggtaacagatctagtgtgaaaactcaatttcttctctatgttctaattaagatgagaatattagtacttcactcaaggacgggcccttgagactcatgatctcagactacagagcaggtttgactatagtgtgttagttcagcaacctccactccttattttacagcaggtagtaagcggtattctagattatcttggaagaggagccagtgttgacctgctggaggctgggtctcaaaggtgtgatagtcagcaatgcatgcagattcatgaagaagctgtaatttatggaactgaatattctttaacagcccaggaaacaacagtcaaaactgacaagggatctttatacactgtggactgaaatgtgaactaatgcagccaccatggaagtcagtatgaagaaaatttcctcaaaaaaaactaaaatatgacttagccaaatcattggatataagcatagagaaacattagttttttttggctgtcacagagacagccaaggctacacagagaaagcctgtctaaacaaagagcaggggggaggaagaagaggaagagaagaagagggagaagaagatgaggaggaggaagaggaggaggaggagctattagtggaaggcaccagaaggggaaagaagtgtgggagtggccacctttaagcccagtctggatcctacagcaacagcagaaaaggtcgttccagatgataaaaattcacaaaggcctgagaaattagaatggcagcccatagagatgcaatattctgagttaagaatctggattctgcttaaagatgctttagaacaatgtcatataatagattatatgtttcattttatagactttggagaattaagacatatgtcttggttaataaatcatactgcaagtgtgctttggctgtgaaggcttgaatggttctttgtgtcctgctttgagtgctgctgttgggtgctatgaaatgaccttaagcaagctctgaagttgagacacgcactgttgggtgctgtgaagtgaccttaagcaagcatgatcacatgttaaaaagttcatcaaaagttcacatgtgatcctttcagtttccatctgcgcctggagcttaccctgtgccacagctctccatacccaaatcccacagggagagagctggtctttcaagagtgctgacacacaggcttgcaaggagggacaagccacagtcagagacagcaagacaagctaacagcagagacaaccagatggtgagaagcaagggcaagaacataaacaagagaaaccaagtctacttggcatcatcagaacccagttctcccaccacagcaagccctggatactccaacacaccagaaaagcaagactctgatttaaaaatcatacctcatgatgatgatagaggactttaagaaggacataaataacccctttaaagaaatacaagagaacacaggtaaacaggtagaaaacaaaacaaaacaaaacaaaaaatcccttaaagaattagaggaaaacacaaccaaacaggtgaaggaattgaacaaaaccatccaggacctaaaaatggaaatagaaacaataaagataaaaaattatattacagtttggttatccagtccaaactaaattataaaagaaagacagatgttttacctgcttgaacagaaagcagagaatcatttttagttaaattgtgcacattgcacattccatacattggctaaatgtatatttccagtgaaagtttatatgtttacagatgccaatgatggtaagaggccctgtcaagatttacccttttggatgctgagacattgagacgtatttattctagcatcctgctttatccaacctcagactgcctcattaactgtttcatcacagcttgcttgtaggacagcttcaaagctgctgaccccagttggtccagcctctcagactgttccaatcaggacttcattcaagccctgaacttttatagcacacagagactgggcaacaaagattacagctaactttcttgagattggccaatatcccaattttctttgggcttccaaaaggaaacgacactcacagacagtgggaagtaggtttaagagaatggtaacccattcccataaagtagagtgggtaggttttggtcgttcagtgagtgaagtgtgtttgttgttgttttaggggagttggttacaagttgctaatggtcttggtcagggaggaaacaaagcaagagtggttatattctgggattttttcccctctcttttacttttctctttcctttctctcttatctaatgttaagggaaaagtgagggaaaggggtgaaaggaaaaggggggggtacaggaatgagaaataaaagggtagagtatcaaatctacttttagaccaaagaacatcaacaagcccaatattttacatttggcatggactttgtatattgatacagatttaagtttatattatgttacaacataatataaggtatttaaagtattgaacctgtttgtaactcatttaaacaggcagtttaaaattctagttcttttgaaagctgctattacaagctgtttaggataaataagaaatgcaaattagtagtcaatcaaacaaacacattgctcatgttagatactattttagttaattacaaaaataagctccatttagcccctttcatagatgtttttaaaagttaagcaaacagtagatagctagaagcaagcgcagatatactatagataggtacatattcctcaaaaacctcagagctctctagaatatggcatttagagatattttgttaataaaaggtgttttgtgacagtgacatgtctgttcctggcaacgcctccattttacttcaaagtggatgatgaacatcaaagtgtctccatatggagtttgcttcaa

SEQ ID NO: 662 - DNA, 3161 bp, Mus musculus
tgaccactcccccgggcgcgcgcgccgcgccgccgccgcagggagagaaggcacaatgaccagctccccgttcctggatccctggccgtccaaggctgtgtttgtccgtgagcgcctgggtcttggcgaacgtcccaatgactcctattgctacaactcagccaaaaacagcactgtgctccaaggggtcacctttggaggcatccccactgtcctgctcttagatgtcagttgctttctggaccttctaggaaactcacatgagtttctaatcctggtgttttccatcataaggagaagattctgggattatggccgcatagccctggtatcagaagcaggcagtgacgaccagatcctggagtggtgcggagaggacgccatccactacctgtcttttcagaggcacatcatcttcctgctggtggtgatcagcttcttgtccctgtgtgtcatcttgcctgtcaacctctcgggagacttgctgggtaaagacccttacagctttgggaggacaacgatagctaacctgcagactgacaatgacctcctctggctgcacactgtcttcagcgtcatctacctcttcctcacggtgggcttcatgtggcatcacacacggtccatcagatacaaagaggagagtctggtgagacaaaccttgttcatcacaggactccccagagaagccagaaaggagactgtggagagccacttccgagatgcgtatcccacgtgtgaggtggtggatgtccagctgtgctacagcgtggctaagctgatctacctgtgcaaagagagaaagaagaccgagaagagccttacctattacacaaacctgcaggcgaagacaggccgacggaccctcatcaaccccaagccttgcggccagttctgctgctgcgaagttcagggttgtgagcgggaagatgctatttcttactacactcgaatgaatgacagcctgctggagaggatcacagccgaagagagccgggtccaggaccagcccctgggaatggcctttgtcaccttccgtgagaagtccatggctacctacatactgaaagacttcaatgcctgcaagtgccagggccttcggtgcaaaggggagccccagccatcctcctatagcagagagctctgtgtctccaagtggacggtcacttttgcctcctatcctgaggacatctgctggaagaacctctccatccagggcgttcgctggtggctccagtggctgggtatcaacttctctctgtttgtggtgctgtttttcctgaccacgccctccatcattatgtctaccatggacaagttcaatgttaccaaacccatccacgcactgaataaccccgtcatcagccagttcttccccacactcctgctgtggtccttctccgcgctgcttccgtccattgtctactactccacgctgctggagtcccactggacaaggtcaggggaaaaccggatcatggtgtcgaaggtctacatatttttgatcttcatggtgctgatcctgccctccctcggtctcaccagcttggatttcttcttccggtggctctttgacaaaacttcctcggaaacctcaatcaggctagagtgtgtcttcctgccagaccagggtgccttctttgtgaactacgtcatcgcctcagccttcatcggcagtggcatggagctgttgcgcctgcccggcctcatcctctataccttccgcatgatcatggccaagacggccgctgaccgcaggaatgttaagcagaaccaggcttttgaatacgagtttggagccatgtatgcgtggatgctgtgtgtcttcaccgtcatcatggcttacagcatcacctgccccattatcgtgccctttggcctcatctacatcctgcttaagcacatggtggaccggcataacctctacttcgcttacctcccggctaaactggagaagaggatccacttcgccgccgtgaaccaggccctggccgcccccatcctctgcctcttctggctcttctttttctccttcctccgtctgggtctgacggccccggccacgctcttcaccttcctggttgttctgctcaccatcctggcctgcctgctgtacacctgctttggatgcttcaagcacctcagcccatggaactacaagacagaagaatcagctagtgacaaaggaagcgaagctgaggcccacgtgcccccgccattcacaccctatgtgcctcggattctgaacggtttggcctcagagaggacagcgttatccccacagcagcagcagacctacggtgccatccgtaacatcagtgggactcttcctgggcagcccgtggctcaagatcctagtggcactgcggcttatgcctaccaggaatcctgagagtggacaagctggtctggcaggctgggagcatctaggaataccgagggacacaaggggctagagccccagacaggctcttgagggttttgctgcttaaaacccccgtattgtgagaagaggaaaccagcgggtcgtggggctctgggtaaccgggctgagggtatccatccggtggggctgctgtccctgggagccatctgtaaggtttcttttctggtcccagtgtggggaacatttacagctccctcttgtggtcatctgaggatatgcacttttattcccccatacactgctcaggatgctctctgtagtgagcatggtgtatgtccctagtggtttgtggccaagatcatgtgttgggcttttgcctttagggagatcatatttggggacttctggttgatggggagatgcgtccaggaaagacttagtccctctgagccctggaacactgcttagccttctgcaagctgatgaatagcgcatcagttgggtctgagatggaggccatgtggggccctacagtactgtcctgcctgcagtcccttttcagggatccatggattagctgtagggaccggggaataccttgttcttgttgatggcagcagggcagcaggctcatgcccactggtttgtagctgcctcctgctgtgtttccgggtttttgtatcatgttgcctgaatctgggctgtgactgggtaaccccacagcaggtggggacatgagaaccattaataaagtacccactgggctggtggtgag

SEQ ID NO: 663 - protein, 788 aa, Mus musculus
DHSPGRARRAAAAGREGTMTSSPFLDPWPSKAVFVRERLGLGERPNDSYCYNSAKNSTVLQGVTFGGIPTVLLLDVSCFLDLLGNSHEFLILVFSIIRRRFWDYGRIALVSEAGSDDQIWCGEDAIHYLSFQRHIIFLLVVISFLSLCVILPVNLSGDLLGKDPYSFGRTTIANLQTDNDLLWLHTVFSVIYLFLTVGFMWHHTRSIRYKEESLVRQTLFITGLPREARKETVESHFRDAYPTCEVVDVQLCVAKLIYLCKERKKTEKSLTYYTNLQAKTGRRTLINPKPCGQFCCCEVQGCEREDAISYYTRMNDSLLERITAEESRVQDQPLGMAFVTFREKSMATYILKDFNACKCQGLRCKGEPQPSSYSRELCVSKWTVTFASYPEDICWKNLSIQGVRWWLQWLGINFSLFVVLFFLTTPSIIMSTMDKFNVTKPIHALNNPVISQFFPTLLLWSFSALLPSIVYYSTLLESHWTRSGENRIMVSKVYIFLIFMVLILPSLGLTSLDFFFRWLFDKTSSETSIRLECVFLPDQGAFFVNYVIASAFIGSGMELLRLPGLILYTFRMIMAKTAADRRNVKQNQAFEYEFGAMYAWMLCVFTVIMAYSITCPIIVPFGLIYILLKHMVDRHNLYFAYLPAKLEKRIHFAAVNQAAPILCLFWLFFFSFLRLGLTAPATLFTFLVVLLTILACLLYTCFGCFKHLSPWNYKTEESASDKGSEAEAHVPPPFTPYVPRILNGLASTALSPQQQQTYGAIRNISGTLPGQPVAQDPSGTAAYAYQES

SEQ ID NO: 664 - DNA, 56826 bp, Homo sapiens
cgaggtgggcagatcacctgaggtcaggagtttgggaccagactggccaacatggtgaaacccccgtctctactaaaaatacaaaaaaattagccaggcatggtggcgggtgcctgtaatcccagctactcgggaggctgaggcaggagaatctcttgaacccaggaggcggaggttgcagtaagccaagatcacaccattgcactccaggctgggcaacaagagcgaaactccatctcaaaaaataaataaataaataaataagaataatattaaaaaattaatttgaaaaagtaaaagaaaacctgccagaggccacacagctagtaaatgtgagtggcatagcaaggtttgaactcactcttgccaagaagggtgtcatgttggacccccaagcaggcaagctgggagggcaccaccttggagagaccaaagaaaagacccagagacagcaggcaagacatgagctttattcaagggacttacgcacagggggaagtccaggagcggcaggctggacaggagcaaccgctgccatttgtgaaaagtgtgcaggtcatgtagaaaccttcacattgcaacatttgtttgtttggttggctttttttgagacagggtctcactctgtcgcccaggctggagcgcagtggtgcaatctcggctcactgcaacctctgcctcacaggttcaagcgcatctcctgtctcagcctcctgactagctgggactacaggcgtctgccaccaagcccaggtaatttttgtatttttagtagagtcgaggttttgccatgttggccaggctaggctccaattcctgacctcaagtgatccgcccaccttggcctcccagagtgctgggattataggcgtgagccaccacgcccagcccaaaaccacattgcaacttccatctagcaacctctacttagcagcctccacctacctcaaaacaatggacctctgttccttgtacagcctgtgttccaagtaacaggccaggggcctgacattcttcatagttaaacataattaaacatccaggttggccgttcccacggtccatagcctggaacactgaacaaacatcaccaagggacaaagggtccttcccaggccatgcttgagttgttgctgtctggcaagatgtgcccaccacacaaaggtgctggatgaactgaaacgggtccctattcctggtttgtttcccaccctcctcagcccagacagagccccagggaaggacccctgatgatgccagagtctgagctactttgggagaacaggaagtgcccacacagggggtgcctggaaccaccaaggagccacatgggcccccaggcctggggtcagggaggttgatggtgtgggttggggcagcccaggacacctggactggccttggggcatttcctgagcactctcagaagtatctgcccctgcccaggaagggggcaaaagccaccctggagaccctagatgctgggctctgacttagaagccactccactcctggactcttagctttgctgacgtcagagcccaggcctgagtccagctcatccccatccatggaggccccaggatgacctctgacccccatgttttcccatggctctcacttggcaacctggcctctggttggggtcacatcctggcccaccaggggcaggagggtgttcgagggcaaagggccccactcctcatccaccctcctacctgggccccctccccctctccccagcatggccagaccactgccctccagtgcccttagctctgggccgagggccaggtccaaatgtgctctgagtcagggtagggatcactcattcccttgccccgctctcctcccttagatagaagatctggttctggggccactttaccatctcaagcccaatctgggcagacccaggtggggatggttggggaagccaggctccgtcttctgcatgacaaagggtggggctgccctccctcctggcaacacttcagaccattgtaaacagtctcccaatccacatttgttttatttttcgttgtcagatctagcaaataaaaatataggactctggtgaaatttgaatgtcaggtagacaatgaataatttttttggtataattatgtcccaaatagtgccttgtattttatctggtagccctacccctggctgatcacccaaatgttttatttccccagcaaaactcttcaaccagcttacaaatccacattcaggataggggtcctctgtcttgggggattgtccccctgccccagcctagacctgatcacctggattgagaccacctggctccctttagggcatagatcaaaactaggctgtaaataatttgagtgtgccaagaactttgtgaattgcaagacctgactttatatggacattgatcattaactttgtgagcttcgggaagttgacacctctgagcctcggttttttttcagctcaaaaattgggagaggttgccgtgagccgagactgcgccattgtactccagcctgggcaacaagaatgaaactctgtctcaaaagaaaaaaaaattgggggagaaggtagcctggatattcctttcaactctaaactctaattctgtgaacagcagggatgagggagaggatgaggctccttccttattggacaaaaccccgttggaactaaatgctcctaggctcccttgcctaggaaggtccccccagaacagtgggaaatctggtttcacaactggggaccaccagctcaggatctcatgaggccccgggaccctctgagcacgggcccggatgctcatccctgcagactggattggcccttagagccctggcgttgcctgagccattctggttcctgtcagttgtttggttgcagcaaggaacaagactctaggtccacttaccagcagctgggggaactgagcctcttgcagagaacgagagccccacctctactctaggaaatgagctttttaatttaactggtcaggcctcaacccacattaggggttcatgaccattgtatagacagctgtagccagctgttcacagcccagacagacttgccctatctagacagccccctcctcccagctcagggactcgtctggctgtgagcttccaggaggtctcaggggtgtgacctccctccctccttccctccccactccctacctcctccctccaccccaggctataaagctgcccaggcttggctctcagcacatccagctgcctgagaccctcctgcagccttctcaagggacagccccactctgcctcttgctcctccagggcagcaccatgcagcccctgtggctctgctgggcactctgggtgttgcccctggccagccccggggccgccctgaccggggagcagctcctgggcagcctgctgcggcagctgcagctcaaagaggtgcccaccctggacagggccgacatggaggagctggtcatccccacccacgtgagggcccagtacgtggccctgctgcagcgcagccacggggaccgctcccgcggaaagaggttcagccagagcttccgaggtgaggccctccctccctgctgcccctggtcccatggggcaggtcagatgtgcccactccggtggtgtcaaagggctcctggccttgcagaggtctgtgggaggctgagtgagggccacggtctaaggggcagtgaggtggggccgggcctgtgaggatggcggggcctcagcatgcagcggtgcatgcagtcaggactccgggggtctgttttcgtactgccactctggtctgagttctacttggagcatattgctttaaaatcatctcacaaccatttgctcacatggaactggggtataactatgtcttgcccatcttccagcattgtgaacatcaaaatgagtcattgtaaatagaagcgtgtttgggtaactgaaaaatactgcacttgagtagacaacctgggttatacctggctgtcaggggtgcagcgggcctgaatcctcctgcagccggcctgaatcctcctgcagcctctcgcctccctagctcctcagtgcccagagctagacccaatgccaggcacctgggtgaggattctgctcccagcatctcagctgaggcaaacttgctagccagggtcccacaggcgcccctgcctgctggatggaaattgttactaaacaaggcccagatccaaggaagatttgtaaactgggtttgccccagaaatagaacagggccggtgtctcctggcctggctgccagctcagtggccctgccatcctcagagctcccctggagtcgggggaggccctgctgaccctgctcttgtccccagaggtggccggcaggttcctggcgttggaggccagcacacacctgctggtgttcggcatggagcagcggctgccgcccaacagcgagctggtgcaggccgtgctgcggctcttccaggagccggtccccaaggccgcgctgcacaggcacgggcggctgtccccgcgcagcgcccgggcccgggtgaccgtcgagtggctgcgcgtccgcgacgacggctccaaccgcacctccctcatcgactccaggtgggggtcgcgggggcgcgcagggtagggggagggcgctgctaggcccggcttgggggcggggacgcggggggcggtgcggggtcctcggggcccgtcccagtccccgccctcaagcggcgctgggtctctgtgtcatgtctcaggctggtgtccgtccacgagagcggctggaaggccttcgacgtgaccgaggccgtgaacttctggcagcagctgagccggccccggcagccgctgctgctacaggtgtcggtgcagagggagcatctgggcccgctggcgtccggcgcccacaagctggtccgctttgcctcgcagggggcgccagccgggcttggggagccccagctggagctgcacaccctggaccttggggactatgggtaggtgctgagggtcaaactggtaagccggaataaagagacaggcaattacatttattttgaaatggacaacttttcagagtgctgtgggaatgaatgagacaatgtatacaattcttcctctgactcttaggagatcctcagtaaatatcggttattaattttcaagttatttctagctgtccatcctatatcacaaacatccagctttttgaagttgagaggtggatcataaatctccatcccagacgccctctgacctcagccctcccagctgaccgctgaccctgctctctttgcccacacagagctcagggcgactgtgaccctgaagcaccaatgaccgagggcacccgctgctgccgccaggagatgtacattgacctgcaggggatgaagtgggccgagaactgggtgctggagcccccgggcttcctggcttatgagtgtgtgggcacctgccggcagcccccggaggccctggccttcaagtggccgtttctggggcctcgacagtgcatcgcctcggagactgactcgctgcccatgatcgtcagcatcaaggagggaggcaggaccaggccccaggtggtcagcctgcccaacatgagggtgcagaagtgcagctgtgcctcggatggtgcgctcgtgccaaggaggctccagccataggcgcctagtgtagccatcgagggacttgacttgtgtgtgtttctgaagtgttcgagggtaccaggagagctggcgatgactgaactgctgatggacaaatgctctgtgctctctagtgagccctgaatttgcttcctctgacaagttacctcacctaatttttgcttctcaggaatgagaatctttggccactggagagcccttgctcagttttctctattcttattattcactgcactatattctaagcacttacatgtggagatactgtaacctgagggcagaaagcccaatgtgtcattgtttacttgtcctgtcactggatctgggctaaagtcctccaccaccactctggacctaagacctggggttaagtgtgggttgtgcatccccaatccagataataaagactttgtaaaacatgaataaaacacattttattctataattttgtaattttctattttattttaattaattaattatttttgagacagagtctcactctgtcacccaggcgggagtgcagtggcccaatctcggctcactgcagcctctgccttccaggttcaagcgattctcatgcctcagcatcttgagtaactgggattacaggcatgtaccaccacgccaagctaattttttgtatttttattattattattattgagacagctctgtcgcccaggctggagtacagatggcgctatgttggctcactgcaagctctgcctcccgggttcacaccattctcctgcctcagcctcccgagtagctgggactacaggtgcctgccaccatgcctggctaattttttgtattttttagtagagacagggtttcactgtgttaaccaggatggtctcaacctcctgacctcgtgatccgcctgcctcggcctcccaaagtgctgggattacaggcgtgagccactgcacctggcctaattttttgtatttttagtagagatggggttttgccatgttgcccaggctggtctggaactcctgacctcaagtcattcggcagcctcagtctcccaaagggctgggattacaggcacaagccactgtgcccggctgtaattttccattttaatcaaagctctgcaaattgaggaaggagcagaaagttctacagcgattaggtcaacctgattgtaaaactaaggaaggagcttgagttggccaagacttggtaaagatcttggttaggtaatacatgaaactaggattaaaatgctttcagggccagcacgatggctcacttctgtaatcccagcactttgggaggccgaggtgggcggatcacttgaggccaggagttcaagaccagcctggccaacatggtgagagtgcatttctactaaaaatacaaaaattagctgggcatggtggtgtgcgcctataattccagccactcgggaggctgaggcatgagaatcgcttaaacccaagaggcggaggttgcagtaagctgagatcacactactgcactccagcctgggcaatagagtgagattctgtctcaaaaataaaataaataaaaataaaatgcattctgattctagaatctatggtacctgccctcccagaattgatacagaaatttctttttttttttttttgagacggagtcgcccaggctggagtacagtggcaggagtgcagtggcgcgatctccgcttactgcaagctccgcctcatgggttcacgccattctcctgccttagcctcccgagtagctgggactacaggtgcccgccaccacgcccggctaatttttttgtatttttagtagagatggggtttcaccatgttagccaggatggtctctatctcctgaccttgtgatccgcccacctcggcctcccaaagtgctgggattacaggcatgagccaccgcgcccggccaatactgaaatttttttgttcttgacactttgactttcctgggcatagtgactgggctttattccaatcctacttgcatcaaaataaaatctgtgatcaaaattatcatctatacttagagaagaaaataaagcttcagaggatctggaatttatagctgtaagagctgtgcagctgggcgcggtggctcacgtctataatcctgaggatcacctgaggttgggagtttgagaccagcctgaccaacatagagaaaccccgtctctactaaaagtacaaaattagccgggtgtggtggcacatgcctataatcccagctacttgggaggctgaggcaggagaatcgcttgaagccaggaggtggaggttgcagtgagctgagatcacaccactgtactacagcctgggcgacagagtgagactgtgtctcaataagtaaataattaattaaaaattaaaaaataaaatagtgattttacaagcacttcacacaactgacataacaaaggctgtggctatctcaactcacatatcgatccatcaaggccttctcttgattttgaaataaccttaacctactcaagaacaaatttagaaatcctttctctctctgaaatctttgtcagtggctccagcattctaattaccaagaccggaaccttgcacttgcctggacccatggcacagaccagacaggtgggggcaccattcattgaggaaggaaggaggacaggcaggtgcgggagtggggagtggaagaaagattggacagggacagtctaaggagccaacggggagtccaggggccacacccaggactctgcagaccgtcagatgtggaggtaagagagcagggaggggggatggccaggcgcagctatggagggacaagggcagagatgatactggcggggggcatagaggaaaaaccctggaaaataactagtggctagagctttggggagagaaggggaaagacagatgggacagaaaagaactgagagaggcaggaagagaccctccccaccccactcctggacagccacagactggcgctagaatcagggacagggaggtaaggaggaatttttttttttttttttttttttttgagacagagtttcgctcttgttgcccaggctggagttcaatggtgaaatctcagctcaccgcaacctccgcctcccaggttcaagcgattctcctgcctcagactccctagtagctgggattacaggcatgtgccaccacacccggctaattttgtatttttagtagagacggggtttctccatgcgggtcaggctggtctcgaactccagacctaaggtgatccgcccacctcggcctcccaaagtgctggtattacaggcatgagccaccgcgcccggccataaggaggatatttttatgccgttacagaaaaagatgaaagctcagaaatggaagggaggtcggagaacctgcaaaggcatgcatgtggggtgaggactgctcagagctcagagaggggtgctggaagggacctgagaggaagctttggtccaaccactcatttcacagatagggaaacaggggcctgcggacgggttggtttgctccttgattcccagggcgcgcggtcctccccgaacccagcctcgcttcccgcgcagcgcccagcagtccctggcgcggcgggccggccctgccctcgcgagcttgcggtccggttgtggaggccaccggctccctggaaacatttggctcccggccgggaggcatgccgcgctctcggacctgggctggagtaggtgcccttggcggccctggctcgagcagtaatggactagccccagggggcgttggaaatgctgcgacccgcccccacatttttgcccgaacggagaccctccgggctttcacggtccggccttctacagcggcgggggagccgtggcctcttgcagggcgctccgcgcggttcccgactacccggagccgaggtgcgggctgaatcctgctgagctccccatgctaccacccccgcaaccccactctcccggggcgggtctaagagctcttcggggaaattcaaagcactacagggaccaacgtttgcagatgctctccctgcgccgcgaccaccctgtgcttggcccagttctcccggaggcgtccagagactgggctcgtgccgggggacggaagagggtgcgccccggcggatcccttcttggagcctggacgtgagctggccggtccggggcttgcagacctccgggaggagctgcggggctgagcggcgaccaggaggccaggccggggcagaggaccgccgagggccaccgcgggaggcgcagtcagctgcgtacaggcttgcgccgccgcgggccaagactccaaattgggaaaggggtggccgcagctctgcgcatgtgcaggaggcgccggagtttcactttgtaacttttaagtggtcggaacacgccccgcgctgctgggtcccgccagacacgccgccgccgcaggtacaggggacagggggcgtgaggaggggcaatgcaccctccgcctttcccgggacgtgcgcgccaggtgtccggttccggaacggctcccagcctacgcagaccccagagcccccgaccccaagcagggggtgacgacgcgggattgggtgggaggagagggtccgggcagcgcctccattccagccctgcgctccttgggaattcctggcggcttttcaggactttcctctccggcttttcgctttcagggctggtatctccttcttccccacccctctctttgggatttgtcggcggagtccgacctcccacctaactaggagtgcagctatgggctcctcggaccctatacgaggccgggctgggaaagggccaagcgtccgactctcctgacgccaggaaggcagaggccacccctcgggctgttcctgggtgaccacttcctgcagccttggcggagtcctgaggagggaggctggggactcggggactggggggaagggcgggggcggaaagggtgaggcgagctctgctaagaaaccaaatccgcaaaggttccagcacctgataagactagctacctgaggccctggaggggccttggtcattcagccccaggcaggtggtgtcctcttcaagggcaggggtggacagcgtggcggacccactgaccctcccttgacacctctcaggtcatcctcaagtctgctgtgccttcaagggggatatgaacggaagccgaggctccttttcccttcacacgcccctctcctttgtttagtgtgggggcaaaggtctctcctagctgttcgttgggctctaacagagaagacgtcaggtgggatcctgcccttgtgtttcccattagctggaggggcgacttaaaataaaggcagacagcttctaattgcttgctagggccgggtcctgggctaagtgctttacaggtgttgtttgggatctgtgcctcccaacagctccgtgagagaaagtcatcactcgcatttcctggcgaaggaagccaaggcacagagtggttaggctgcttgtctgaactgcgtggtgctgagaccttaactccagagcctgctcacataatccctgagccacactgcctctggtttcagccaggggctgtgtcatttcctttgtgctccagggtagaggtaaacagttgtccaggttactgggtcctgtttggtgttgccataaggagaagtttgtactttactttgcaaccttattctgcatctgaaagaccagagttagctcctgaggcagaaggcctggagctgcttgtagtttcgctattgtcatcacaggattgaaagatttggtgatgataaaattaccctgaatttgtacgggccttcttgcaagaacgaacaatatccatatacttcctgcaacattctgctggtatttctagagcttgtcaagttgaccaccaggccagtccttgctgccaatggagactggcagtggattagcataggtagtttactttggcaaatttagaccagctgttggatttagccctctcccactggccacaatcagacgcttgcctgcacatgggttgaactttgggttgggagcgtgaagtcacctgctgcccactctggctcttgggcctcagcagtaattcttggctttcctaccctcggcatattgagtaggaataaggggatgaatggagaatttctggaaggcacaggtaagtgctaggcattcacatacatctaggatgactgaatattgccaggggttctcagccaggcagtgccacttcaaccacagtgcctagctgctggtttggcctcctctatacagctgccagctgggtgctcccctccccctgccttctcctcagcctggcagcactgtcccatggtgtctgtgttcccagctgcctgctcagagcgtgcctgtttgtgaaaatgcagaggagctgtcccatggagagccagagggacggagctgtttcagggggatctggactttatgtgtctaatgggcagggacaggctgggactgagctgaaaggtctgagagagattgtgggtccccagagctctaccctaacctgggtgctcatcggagagggcagacaggactggccacctgaccttacctctgtctcaggctgatagtatttgctagccacctccctgagttcatatcaaactttgtcaaaccaccctgggaagcctatttggcaagagacaagtaacttagaggcatgactggggctggagggagggggaagaggagccgcaggtgtttccctccgcagaggcctctctcctctgcagcactggcgagggtatgccactcccagcaccaccacagcaccctcccctttccagggacaatgctctctctgtgagcattttatggggatgttttttctttccacttcacatttcaagccttccttgttcatgctgctgtgttcccttttcctgattctagctcttggggaaccctggggagcctccccagtagcattggcccttggggcccaggtgaagtcctttgcttggggccctaccgtgagcccacaacctccagggtttctgtgggagagggctgctcccctagacccagcaggtccttgagccattggcaaagaggagagaggctggggccacaggtggtgctggccgaggaaggaggagtagggtcgcacagaggagcactgatggatggagaaccagttctgggagtttggggagagatcaaggcaggagggagcccactgggcagaacctaaaggtccatatgggcagcatgcatacacaggtgtgtgctggagggtttccatccagacccctacactggaaaagggtggctcccatgtgatgcttggtgtctgtgatccttcaggaaagtctacagtttggtaccccaggactcgctggtcaggaaagccctgcaggacatgagtgttaggcccgacgcctggcccttggcagcttgggaggtggctggggctgcttttgcctttgccagagacagctccaactgaggacctctccaacgggcccatccacagtccttccttcccctagtgtctggtaagtgtggggacaggaaggaggaggggtaggtggtggccttgaagtgttgggctggtgtgttccattgggtggtgccactgggggattttaaagggaagccaagaacatctgtgttccagaggtcactcttgtgacactctgttcagagtcagcagccccatgactctggcatcacaacccccactacctccagccattgccaagtctcttagaaggttgagaaagtcacttggctgtctgtgggatgctcccatgttcttgggctttccactcattcatgcttcctgtgcttcgtgtgtgtgtgtgtgtgtgtgtgtgtgtgtgtgtaggtaggtaggtaggtaggtaggtgtccatgtgtgattgtccccagcactctaggcctaggggttacccaacatacacacctcaccagcactactggtatccaaacatctgtttgggttctctatatcttttcttcttgttctcaagatctttgtccctgtaacagctagaagcaccagacttagcagaaaaatcccctgggaattctagatttaccagatttgggcaggtaggatcttaagcaagtccaggctgaatatgtgttctggcccttcagccacagcatgagaacttggacactaactcccggtcctctggtgtcaggggacagacactggagatttctattagcttcaccaggggcgccaggagcctcaggaaggaaaggtcaacaacccagcctggagcagtgtttgctttggaaatgctgggccttgcagttagactgatggtacccaggaggggtatgtgtgtgtgaaagcgcagagctaggggacccagaggtccctgaggaggccctgggactcctgactccctccccgtccctaccctagaccaccccctttactttctcctctgtggcaaagtaaaaagagaagtggcatctgagagtcaggatattgggtttgggattcaattctgccctgaccagctccttaaccttaactttggggcaagttattaaacctctgaggcttggtttccaagtatagcagatggacccatctctgaggtcccagctctgacattctgtgagcagtgggagtgaggtgttgtctgtggctcgtggatggaccatcgtgaatacttggatgttcccttcttccctggttgtttatcccggtgttttcctcttcctgcctttgtgtgcctttctccctctcctctgcctgtactctagatccgccagtggcttctgcaggagtgactttcccaacacgagtcctcgaggctagaggaactttaggacttcttaagacagcagctgcagcaactctgtccctcctttgctccatgtcgccccctctggggatctgcccactgtgttctggatgagccatccactctgaccatctgatcccctgagattgtcccacaatgcagccattctctgtggacactgccaggcacgcagaggtccaatgtctggctctcccggactccttgctgctggcttactgcccgatcagtccctgggaaacgcctgcctttggctctgccagcactggtgggaacctgcaagaaatttgagccctgaacgtctgccttgtcctgttgtcctgtgctccagggaagacaggcgcgatgatggactccccgttcctggagctgtggcagtccaaggcagtgtccatcagggagcagctgggactcggggaccggcccaacgactcctattgctacaactcggccaaaaacagcaccgtgctccagggggtcacctttggtggcatccccactgtcctgctcatagacgtcagctgcttcctggtgagagccctcatgagtcgtgtcccactgcctcagttatttgtttaaatgccccacccagggccttctgggaaacttagatgagaagtcagacatagctgggtttaaatctcaactctgctgcttaccagctctgtgacttaggcgtgttacttagcttctgtgcacctcccctttctgctccggaaatggagatcataattcctatctcagagaattttggaatttggataaggccagaatactcatatagctatgcctgtgattactaccgtgattgcagagctctcagcctgtcgtatctttaaggcccttgggaagggtcatctcaaggggttgagacatgtgactggagagtacggactagaatagagcagctgcagttcccaagtgtcacctcctgttcccctctggcatccctggggtttttaaagaatcagaagctgggccaggtacggtggctcatgcctgtaatctcagcactttgggaggctgaggcgagtagattgcctgaggtcaggagttcgagaccagcctggctaacatggtgaaaccctgtctctactaaaaatacaaaaaattagccgggtgtggtggtcggcgcctgtaatcccggctactctggaggccgaggcaggagaattgcttgaacctgggaggcagagttgcaatgagccgagatcacgccactgcactccagcctgtgcaacaagagcgagacgctgtctcaaaaaaaaaaaaaaacaaaaaaaagaattagaagctgattcttagagcgtaccttcagcaggtggcctttctttaacgtagatctccttgttcacaaagatgccccatggcattgttcttccttatgcagactcaacgttggctggctgagatttattggggttaaagtgccccttcttttcacaaatgccatgggctggccagtgcctcttgatactgtctcctaacatgtggcagagaccatctgagtgaagggggcagatggctctgatggagtaaacatccttggactgcttggagctggagactaggctcgggtggggaacatggggagggtggcttagggtagcaaggaggagtgggcaggggtgtgggggtggatttcagaattggtgggattagaggagggtggccttgggtcttcagggtggggagagtttggccaaggtgaggagtacagagagggggacctgggcagggaccctagctgggctgggtgggtattgttgcaacagtgttggctgagaagagagtcaccctctattgtgctgctgaaggtgaattttttttttttttttttttttttttttttttttgagacaaggtctcactgtcacccaggctgaagtacagtggcataatcacaattcactgcgacttcctcctcctgggctcaagcaatcctcccacctcagcctcctgcatagctgggactacaagcacatgccaccgtgtctgggttatttttgtatttttggtagagatgggatttcacaccatgttgcctaggctggtctcaaactcctgagctcaagcgattcaccagccttggcctcccaaagtgctgggattacaggagtgagccatggtgcccggccaggggtggatttttattgcagtaagttttgggggtgggggaggggggacacataagagccagagggccctggagagcatgggtttgtgggaagtgtctgcactgcacaggccagggcggcagccgctgtggacagagagggcaggcacctgctgagcaggtttcgtggttttcctacaacatgactcacctgcctttgaaaatatgtcaccaacttcctgattcacctgaagaaaattccacgagaactcagtgcctctggggttcaggtcttctggatttcctttaggaaaacaaagcctaccttcaaaacccccgtttctgatcagagcaggcagggatgtgcttactaagatgtatttctctacctccctgaacctcaaagagagggaccctgtctagggagggaagagaggcaggaacatggcatggagcctgccaaggtggactgtggggagtgaggacagtctagagtgtacagatgtctagagctaagcggcttagtccagccctgaggttgccattggacacaagcttgctgaggtgtcccagcttacggaggccaagccagcccgagcacaggttctcgtggtgccttgctgcctgcatgcatgctctctgctgggggattgcagggcctgcggggcctgccttcaggggaatcaaactcagaggaaaaaactgaccgtttctggctcagcctgaggaggctctgctaccttggttctgtaatttaaaatgaaattttctggccagcatggtggctcacgcctgtaatcccagcactttgggaggctgaggcaggtggatcacctgaggtcaggagttcgagaccagcctgaccaatatggtgaaaccctgtctctactaaaatacaaaaattagctgggtgtggtggcgggcacctgtagtcccagctactctggaggctgaggcacaagaattgcttgaacccgggaggggaagttgcagtgagccgaaagaaaaaaattttctgtaaagtgaagaaggatgctggttcctggggctgctctggggccagaccttaccctcctgctcggggccactgaaggcagagcagggcccgagactgggccttgtggtgttaccgctgccttgagagcaagagacagggctgacgtgcagaactaggcaggctccaggcaagcttggcgtcagcgctggcagccttggtggcgtgggcacaggtgacaggagcctggtgaagggggtgagcaaagcatccgggctactgagctgcatggccttgggcacttcagtgccctctctgggcctgggtgttttccttctagccctgctgagtgcgggcaggtgggctttacccctgagaccgctgtgtcttctaatgagaagccatccaatatgcttttacttggtttcttttctgtttttagttcttaatcttggtgttttctattataagaagaagattctgggactatggccgcattgccctggtgtcagaagcagacaggtaaagacatatcgcctaggctgtgagcatgcgtgtgcgtacgtgtgagtgtgtatatgtgcgtgagtgtgtatatgtgcgtgtgtgcatatatgtgtgtatagtgtgtgtgtgtgtgtccctggaatgggctaggggcttatgaagccctccatgtgggcaggacccacacatgacactgctatgagattgtgttcattaagtgtatctacctggcctgtaccaatagctgttctctttgctcttcaccacagacccatgaggtcagcctcgctaccctcattgtgctcacaaaacaaaaaacaaaaacaaaaacccaggctcagatgctcagctccctcagggcttctgttgggccaaggctatgaaccttgttggcttcagactggttgctttagatactgagggctttcgtcatcctctgaagaggatgcccattttctttctcaccttgagtatttttaagtgatcatctttgaaattaattagcttggggccagggctgagtgaggatcaagggcagcagagccatcagggaactgccccaccctcctgccaggtcagcgccgggtttggatgagtctgttacaaagcacaggctccctcggccaggcttcaggtccttccagttctgcgtggggctccaggattctctgttcatgtcgcctgaagggtgacagtgaattctggatctgcacaacctgacgttccagctccagctggctgtttgcacccaggatcttgtgtcagatgtggtaataggaagtgagtgatgaaaactcagggactggccccagctgccacccagagccccagaggggctctggcagaccctccactctcgggcgcctcctgacatgtggcctgtgcggcagggtcctttgaactgggaagaggaggtgtacctgaaaatgcaccatccttccccgtgatccctgctctgggatttgctaaagcctgaggtgatgatgaccttggactgttggagagaaacttttgggacatctgatgcctttacggcacattcagctggaagtggggccatgtactctggttgaaaagaccacctggggatcagagggccctgctgtatccctggctgtgcgaccttggtcaaggccccaaacttaatagggtcggtctccttctgtcctctcttccccatgaggtcacggtgaaggtcaaaagggacagtgtctctgcaaaggcttttaaagttaagtttcgtcatgtgttttgtctttagtaggggggcagtagaaccaggaataggagactagagaaaaggagtcacagccaggcatgttggctcacacctataatcccagcactttgggaggccgaggcgggggtggatcatgaggtcaggagttcaagaccagcctggccaagatgatgaaaccccatctctattaaaaatacaaaaattagccaggcatggtggcgggtgcctgtaagcccagctactcgggagactgaggcagagaattgcttgaacccgggtggcagagcttgcagtgagccaagatcaccccactgcacttccagcttgggtgacagagccagactctgtctcaaaaaaaaaaaaaaaaaaaaagaagaaaagcagtcacatatacgtattgcaaacacctcagatttatagcgcatggggtgtttttatgggggtactcgcaagaaaggatctgattaaaatgccacaatataaagtgccatcatttgtccactctaaaacatatgttttgacattttctcatctctgaaattggaaggcatcttgttattgatgggtggtcatagtttatttggcagcattttttctttagtgtttcataaaataattgtgcaaattacaaccagtggtatcttagatttgataaaatgtagtatttattccaagttttatttgataatatagggaaatatgctataaataggcaacactttgaagtcagtttagctagacgagtcacagtggtgtggtttctgggtgttgaccccttgctattcatcccgtataacatagagttttataccatgcctgggaatggtcattgtccttgtctctatctttcacagagtgagttatattttgtcccagccatcgagggctggtagctttggttctgagctccaagaggcagcaaaatactggatgtgatctttttgacttgtttggcttttttttttttctaagaattatctgtcattttttttctttttgtgtctctagcgagtccagatttcagagattgtcatcgacttcctcctcaggtcaacaagactttgaaaatgagctggttggtatctaaggcccagttgtggtcatggccagggggtggggactggcagtcatggttttggggagggagcagggcggatcttgagcggcaagtgctggagaaagtgcttttctgcatcgacgaaggcacctgaacttgggaaataccacaggagggatggcagctggatgacccgggaccttgagactggatgaatttgcaggcaggaaggggtacggaatcccttgggcttccccagcacttctctctcttacacctatggctttgtatgacagttaattatggacttgctggctggattatgagccagatgtgggcaggagccctgccctctccagccctgtttcccagcgcctgatgcatagtaggtgtttagtcattgttgaatgaattattgaacaaatatttgtctttcctagctggataacagcccagctttaggggtattaagtttaagagatgtgaaggacaataaaacctgcagacaccctttccccctaacacccactccagcggaccgtccaatccattaggcttgtttcctctcttttgcctcacctcttggtcagtgattgtaaacaatcaaacagcagcccacatcactttgcccagagctgccctgagctttcatcagcttttgatctaagttttgtgatttgaccacgaagttgtcaggagattttagcaagagttccaggcatgtggtgtatattgtgaagtactgggctcatgcttgctgaatatgggataaaagcactgttttttatacaacaggaggttaaatggttatttaatgtcaaagacaatggttacatctgcctctcaaagacacaaatgttggaagctaatccctgttctctccgtttccagggatgctgtccctggctgactgccatcttccgtctgcagtgagtacacccgggggcagctgctggggggcctttgggctggtttttttgggtgtttggccagtcaagaggcaagagccaagatgcttgatcttaagatggtgtctcttagatactttttagttaatgtccaaagcagtatgtgagggctgagaatcaaggtgaccaggcagcccctggggtcaggggcagaggaaggaggcctgtaggattggagcctccatgctggagggcacacagtccctgctggagcctggggcttcccaaattgagctggatcccaagagttcttgaagatagagatgaactttatttatttcaacatattcagtggaaatcatatgttcatctctcataatactgcacaaactaattaaagctatttttttgctttaattattcaacttaatatttaacaccaattagatgtcaatggacgctctcctaggcaggtttgcatgtctttgaattagtgaaaagtgaagaaatataatacattcaattcatttggttacaagttttctttttttcaatggggcccatggagagaaagctaaaagattattaaaggtgattaagagccagttagttacctctcatgtggtgtagggagccaggaggcggggggggcggggactgatgtgagtcttggttctcacctgctgccatattccattgaatctaagaagttattgttgtaagatgcatgttttttttttttttcagaccgagtttcgctcttgtcgcccaggctggagtgcaatggcacgatctcggctcaccgcagcctccgcctcccgggttcaagcaattctcctgcctcagcctccagagtagctgagattacaggcatgcgccaccatgcccagctaatatttttgtatttttagtagagacagggtttctccatgttggtcacgtggatctccaactcccgacctcaggtgatctgcctgccttggcctcccaaagtgctgggattataggcatgagccaccgcgcccggcccaggtgcatgttattttatatagcactaagaacaagaaaatgttgtcagctaagctaccatcaactataacgatagtgtacacctcatttcagaggagttgaaatatggccggctgcggtggctgacgcctgtaatcccaacgctttgggaggctgaggcaggcagatcacgaggtcaggagttcaagaccagcctggccaacatggtgaaactccgtctctactaaaaatacaaaaattagccaggcttggtggcgggtgcctgtaatcccagctactcgggaggctgaggcaggagaatcgcttgaaaccggaaggcggaggtcgcagtgagccaagatcaccccactgcaactccagcctgagtgaaagagcaaaactgtctcaaaaaaaaaaaaaaaaaagaaaagaaaagaaaagaaatatgaaaatgatatcttagaattgatgaaatgtggtggttatataatgaaatatggtggttataaggatgaaatgttctgggcctcagttttcccaactgtaaaaggaggctgaggataacatatgctcagcctaattcaaaggaatgaatacatgtgagagcatgttgtaaatgttcggtttggtaggagttgttcccaggggaactggcaggagacagagccccatgggagacagtcaactctggtctggaacaggaggaagcaggaggcgagttagtttatttagaaatgagaacaatgtagttaattgcaaagctttgtcctctagataaatagtaatcaggactcatatgaacaggcatatttctgagcatctgctgataccacgtacaggactaggtgtttgatgcttattatctcttgagcccctgctaagccgatgaggtaggcagtgggcagtttccttgctcgaggtcagaggcgggtaagctccatgacctgccctcaggtggaggccgctgcgctggattacactgtggtctgactgcaaagcccacgctgacatctttcacatctgcctttttatgatgcagcccttgcccccctgagctcttcccaaagcactgctttcccagcctagaagtagcgccttcagggagtgggaaagagcagagtgccctgccccttctccctctgtagcacagaagtctggcttgtgtgaacctggaattttctgagtccccagtggacccagagcctccaagtgtagcactccaagggtgggaaagggtggagcaagtcacctccccatctctggggacacagggaggaggccagggtggtaggatggactgggactcttggctccacctcaggtctccacctgagggggagacaggaaacaggtgggggcctggggcctgggcatattcccaactttattctttttttttttttcttttttgagatggagtctcactgtgtcacccaggctgaagttgcagtagtgggatctcgactcactgcaacctccacctcccaggttcaagcaattctcctgcctcagcctcctgagttgctgggattataggcatgtgccaccacacttggctaatttttttttttttttagtattttttagtagagacagtttcaccgtgttggccaggctggtctcgaactcctgacctcaggtgatccacctgcctcagcctcccaaagtgctgggattacaggtgtgagccactgcgcccagccctaactttattctgaatgtgatttcttagaagcaggacagggctgtgagatgactgtatttacgtacctttcccacacacgtaacttgggcacaaatgtttctagcaacatcagatggagtgctggtattcctttacctcgagtatggtacaggggctaagacgggctctggaatttatatcatgtgagatcctgaaagttatgcaaatttcctgtgcctttatttcctcatatgtgaacaaaaatgtggggatagcgatcgaaccatctcataagagtgtggtgaggatgatatgagacacttcatgcagagccccgaggcctgttccactgctcattaagattcctctgtgtcttggccagtgatgaccagatcctggaatggtgtggggaggacgccatccactacctgtccttccagaggcacatcatcttcctgttggtggtggtcagctttttgtccctgtgtgtcatcctgcctgtcaacctctcaggggacttgctgggtaatgaccctcctcacccttgtctatgttgtaatggggcagagtggcagtcctagggaaagggctcactgtggtagaccagaaccccaggagtcatgccccacttcagatgtaagatggtctcagggtgactctgaacatttctatctgattaaagatctggagcaaacctaggctaaaactggggccccaatatcaatgtctggttctatttaaatagggaaaaaagccccccaagatttacagaatcaggggctatcagagagtcttttatactttcctgccctcacccaaattaggaggtcacaattaatggacccagaagatatccatgatacttaattaaaatcagggtgtggcattatatctaagggcaactgcaagaatccaccttccaaaatgccaccatgaatccacttaggatacccagtggttcccaacgttggttttgtaacaacataggatgtttttagttttctcaaaacaaaatgaattcacattatgcctttacctgcaatggaaggttgagaagttatcagggagcattttggtttcaagcagaggccttgatggtgtagctctggaaagaccagtcagacgttgtcttcctgctggtccagacatgctcctcctccccagagctccacaaaccaaggctgattggttacgccccctcctgcttccccacatgaccctggaactaagtatctgtgcttctctgcagacaaagacccgtatagttttgggaggacaacaatagcaaacctacagactgagtgagtatggagcccgtggggataggtgctgatgggtgagatcaaggagaaggcaggtcaggagcccggggcaggccagaggtactccaaagggggccggctggtatctgaaggccccttgcagctagtgtgttgttgagctgtgggcatgaacatgccacaggcagacactgttttgccagggttttaagaaacacggagggtcctgtggatctggagttcatttgtcaggacagggatggggacccctctgaagtattcactgtgggctgaggggtgctggccacacaacctctgtgggaggcatctcttgcagtgaagctgttggtcctcagttcagtgcccactgagggtaaccaggccccagctctgcacccccagctccctgcctgggatcccagccctgatggcaggtggtttccctctcagcaatgacctcctttggctgcacaccatctttgctgtcatttacctcttcctcactgtgggtttcatgcggcaccacactcagtccattaagtacaaagaggagaacctggtgagtgaggcgggacttagggacatgtgctgggagggactcaggtgggagtcggagtggaagggcctcccaggctctgccacaggccctgactgcaatgagctctgggagggcctcaggagccccgcttgcttattcttgctcacacttggcaccatctttaaaaaaaacagtttcctggtggattgtttcaagatttggacagttactggtgctaagtaaagaaatttgggttgagagcagccctttctctttgccgcccacagcttcacaggggaggggagcttctgtggcttggttccaggcctgggtcctcctctgatctgctgtgtgaccgcatttgagtcacttcccctctttctcagtctcctgccatgcaaagaaggctcatagagttgctttggaagtggattctttgtacagcctggaagaagacgctgtgtaaatgacatgctttgggggctcccccggccacagaaggagaaaactggagccttctgatttcctgttgtttactttccagaggctggagttgggtaggaaacctgagcataccggcacactggcttgtgggtgacttctctccctgctgtatttcccggacaggtgaggcggaccctgttcatcacaggactccccagagatgccaggaaggagactgtggagagccacttccggtaagcaggtggggtgggaggggagctgagccccctccacgtaggaccaacacagccccacccgcagggcgagcaccttaggtgagcgccttctgtctctcgcttgggtatccaggtgagatctgagaaggacctggccctgccacacgtgtatggagtggctcctgtgtgccagccctgctggtgctgtgcagtgaatagcgccctggtggcctatcctcttcaagcagcctgtgcacagtgtccagagcacagaccagggtgtaggtgcgaataaacgtcttgagagcatacgggggaaaaaattgttgaccccggggttcttagcatcacctttgcagaataagagagacgtgagctgagcatttgtatggacccacagggctagggtctcacaggtggaaggacctcggggccatctctgcgtttgttcgtttgtccacccactgagcgggtgtctgttgagtgagcactgtgtctgagtccaggctctccctggtagaacctcctttccagcggctccctttgagtatctgcaccaccaattcctgcagatggaggctggaggaaagtctttcctgtgaggagattacgtgtgcagccagggatgcggggaaaggcccagagcatcaggaaaggtggcggtggggtgcaggggggcagggcaagcagtccgggaaggctcccaggaccccatgctggaggacctgaaggctgggctgaggagctgacattttattctttcttcattcctttttttgtaatcctatttttttagagacagggtcttgctctgttgcccaggctagagttcagtagtgcaataatagcttactgcggcctcaactcctggacttaaggcatcttcctgcctcagcctcccaagtagctgggactgcagacacatggcaccacacccagctaatttttaaattttttatggagatagagtcttgctatgttgcccaggctggtctcgaattgctgggctcaagtgatcctcctgccttgccctcccaaagtgctgggattacaggcgtgagccaccatgcccggcctctcttcattccttatcaatacagcagccactaatttgttgcatggactaggagttggctgcactttaactttgcactatttgtgaagaaagcacttgctaagcaaattgctagacaggatcgtaaactgaatgtttaaaatttgaaaaacttcttcagaaactctaagtattttagaaatatttactaatatgtaaatactcaataccagaatcatttttctgtatttccttgaagcaactcctcaaagttgcctgctaggcaacacctggaaacagtaattccacttaatgtataactttaaagagaaaaaaaaagtctcctcattctcatacaaacattgcatgactcatgctttcccctattttaagaggcctttttagtgaatgctgttgcagtccgtggggattgatgtatgaatttgcctttcaagcagggatgcttaaattgcagttttcttcctcacagctcttattgagaccagaaattgtcctactgtttaatttcatgattgatatacctatgggctgtctctctcactaaaatgtaagcacatccaggccctgttaccagcacctagaacagtgcctggcaggtggtaggtggggatttacatggttctggaatcccctggaattgtatgtataattttgcgtgtatggtgagggggtattgcatggtggccatgagcattgaccttggagccaggttgcctgtattcacctcctggctcagacactcactagctgtgtgatcttgggcacaagccacttacctctgtcggcctcagtttactcatctgtaaaatggggacaaaacctcacaggttatgatgaggattaaataaataaatatatgtaacaatacctggtcaatagtgagtatgtattttgctggtttttttttttttttttttttttttgagacggagtctcactctgttgcccaggctggagtgcagtggggcaatcttgctcactgcaacctctgcctcccaggttcaagtgattctcgtgccccagcctcccaagtagctggattacaggtgtgtgccaccacacctggctaatttttgtatttttagtagagacagcgtttcaccacattggccaggctggtcgcaaactcctgacctcaagtgatccacccggctcagcctcccgaagtgctgggattacaggcatgagccaccgcacctggccttgctggttgttaatatgtgtgtagatattttctggtctgagggtcctttgctttcattagaccctctgaaaggtctgtgaccttaaaaaaggctacctgaataggatttcagtgatggctcaaggtagatactgacctagcacaaacaataaatctgttcctttgggtctttagaggggatagtgatgtgttcatttttccccaggagaagtgccagctgattccaagccaagtgggtataaacttgtcagttccaggcagttagcttcatactactaaaaaaggctagcggggtgcagtgactcacgcctacaatcccagcactttgggagggtgagacaggaggagtgcttgaggccagaagttcgaaatcagcctgggcaacatagcgagaccccgtctctacaaaaaataaaaatcagcctggtggcatgtgcctgtagccccagctactcaggaggctgaggtgggaggattgattgagcccagaaggttgaggctgcagtgagccatgattgcgccactgtacagcagcctgggtgacagagtgagaccctgtctctaaacaaaacaaaacaaaacaaaagccctctttgtattaaatttcaaaatttcccccttttggaggataaaagacaaagagaagagaggtctccgctggcacagaaaccagcagcgagatcactctgccatcctttcccttggatccgtgggcacgtctcctgcttggggtgttttcttttccaacggtgtcttttgcctccttctctccctggccacagggacgcgtatcccacgtgtgaggtggttgatgtgcagctgtgctacaacgtggccaaactgatctacctgtgcaaggagaagtgagtggtgggcgggccttgcaagatgccccctccttccttgctggcctcgcatctcccagctaggaagggaggcgggaggccctggacccctccttctcccctggcgttcgatggttgaactgtgggtatgggggtccctgccacaggattctaaatctgaggtttgtgcccccgctcccacccctacagaaagaagactgagaagagcctgacctattacacaaacctgcaggtgaagacaggccagcggaccctcatcaaccccaagccctgtggccagttttgctgctgtgaagtgctgggctgtgagtgggtaagggtcccaccccccggctgggagcagaggcattggcatcggggtgccccagataccagcatggggccacgtcatcccaatgggatgtgtcttgtggcaggaagacgccatctcttactacacacggatgaaggacaggctgctggagaggatcacagaggaagaacgccacgtccaggaccagcccctgggaatggccttcgtcaccttccaggagaagtccatggccacctagtgagtgtaggcacatccagaccccttcttggctgactccctgttcccctccagataactcactgtccctctcgagtggagatggtactgctgacccaccatccctgggatttatctgtggtgtttccttctcctccctcagctacccacactcactttcagccagcccagcccatgtttgtgtaacaggcggtgggggtgtgggcagcagccacggagtgggtgattctggctgaccccctcgagctgatgtggcctggccccactgccgggctcttccctgctgccctggacccatcctgttggcttcatgtgccagccttgccccaggggagatggaggcaccctcctttcagacatctgctctgggccacagatccttctgtctgtggctccccaccttcccacaaatgcaaagctgtggggaagacccctggggcacgctggggcgctcactgcagtggggagcttgaccctggggagtggcttttcacagtggcccttggcatgggactctaggctctcatgcctgtggtctcagtgtcatctcgccttaggagcagcacagggtgggtcgggagaggggtgtggaaaggtgtccagccactgccccaggcattgtgacactaggaatggactcacacaggacttcctgcctccttgcagacactggggcaggaggaaaggggaaggcatctgaggcaggagtagaggggctgctgggctccttacgggaggttaaaggaggaaaagctgtgacctgttgagatggtgagggtcgaggtgggagccctgaggagggaagcttgggaacaggcaatgtgtaacgtggtctattgctacacttgggcctggggaaaaagtgacagaatgaaaagttgagccactggcctggcagtagcactgatcagagctccagcttaacaggcagggtggagggggatggccctatggaagagcagtgtgttgccctcagtttccttatctgtaaaatgggaatcgtactccctttgttgctggtggttgcgaggattaaacaaaattctccacacactgtgctagcgtggcacctcttacatagcgttactcataatacactaatcacaacaaagcaaaggtcctatgccactgcctcccactcctactcagtccccacttgccacatgtgtgcttggtaacctgagtagcctgggcctggctgttgctacatttccttgcagcatcctgaaagatttcaatgcctgcaagtgtcagagccttcagtgcaaaggtgagccccagccgtcctcccatagcagggagctctatacctccaagtggacagtcacctttgctgctgaccctgaggacatctgctggtaagctcctagaccaaggagaggtgggagagaggcctgggttcctggtgggagctgcccatcacctggagcacaggtgtgacctggcagtcaatggagatctccacacatctgcaattctgtgggctgtgatgctgtgatgtgctcggtgtggcccaactggggtatctgcccagcccttccctccagtgttcctccctagcattcaagtgctacccagcagaaatataatgccagttctgcatctaattttaaatttcctaatagccatgctaaaaaagtaaaaagaaacagttgaaattaattttaataatgtatctcgcccaatatatccaaactgttatttcaacatgcaatttttgaaaaatgtgagatgttttacattctctttttcacacttagtcttcaatatctggtgtgtattttacacttctagcacctctcaattcacaccagccacatttaaaatgctcagtagccgcatgcagcttgtgcagccttacttaggtccagtgtcagcctggggccgtgctggggagctgagctgtgtccatgggggccctggtgagcctccagtgctgtgctgagggtaagggcacccagcgcaagccccagcgcagctgcctgtccagccctgcctcagctccttgcacagaatgagcttgaagtgctcccctctgctcggttctagttctgcctctgacagttttgctctttggttcacaaggcttcctaaactcaggattgctttgtgggtctgttctttgggatgagaggccagggcaggtgcaagctatgccttcactcctttgtccctgccttcctccttcctgtaccccagctacagccccgttgggaagaatgtgtcgttagtcacaaagcattgcagatgtgtctaagaaatgccacgctggggccgggcgtggtgctcacacctgtaatcccagcacttcgagaggctgaggcaggcggattgcctgagctcaggatttcaagaccaccctgggtaacatggtgaaaccctgtctctactaaaaatacaaaaaaattagctgggtgtggtggtacacgcctatagtcccagctacatgggaggctgagcaggagaattgcttgaacctgggaggcagaggttgcagtgagccgagatcacaccactgcactctagcctgggtgactgagcaagactctgtctccaaaaaaaaaaaaacagaaaaagaaaaaataaatgccatgctggagccttgtttggcctgcttgggtgctcatgccatctctttgggtaggttctggcccccagactttagctggggagccacatctgagagaataattgttccctctgagctcttggggacctaagatttggtctttctgtagttgaaggtcagtgcagagaacttgcccccaggctagtctcttggtctgcctaaatctgaccttctgacccacctaagccacgagcactgggagacaagcctcgagacctgtatcccctctcccgctgcaggaagaacctctctatccagggcctccgctggtggctacagtggctgggcatcaacttcaccctcttcctggggctatttttcctgaccacaccctccatcatcctgtccaccatggacaagtttaatgtcaccaaacccatccatgcgctgaatgtgagtaactgttctgcaaggcccctcccaggatagctggtgagaagagggcttggtgggtggggaaggagtggggacaggagtggggtgtgtgcggggaactaaaaccagtgggtcatgttgctcagctcacatccttgcttttaagccctgagcaggcatggccacatttattacaaagtccttatagtaatgccatacacacacacacacacacacacacacacacacacacacacacattatatgtatatatacacacacatgcatacatatatattttaatagactatctaaatactgaatggtagggatcatttgagttgaatgtggtatattcaggttggtagactatcaagcatccattcaaaattgtatagattttgtggcacccatgcagggctcctgacagaagcagggatgtaccagtgaggcatgtctatcatggacactacggggaggggccaggaaggaaggaaaaaagcttcgttgattggggtggcaggatcacaaattatttcttttacattttggttgctaatgaccttgttataaaactattttggggccgggcacggtagctcacgcctgtaatcccagcattttgggaggccaaggtgggcggatcacctgaggtcaggagttcgagactagcctggccaacatggcacaaccccatctctactgaaaatacaaaaattagctgggcgtgttggtgggcgcttataatcccagatagtcaggaggctgaggcaggagaatcgcttgaaccgggaggtggaggttgcagtaagccgagattgcaccactgcactccagcctgggcgacaagagcgaaactccatctcaaaaaaaaaaaaaaaaacaaaaaaaaactattctgtataggtaatgaacgattttcaaaaatcttagatgaatcaatgagataacagccaaacactcactcaactggcatctactcaaaaagctattggtttctcatgattagctttgccaaaccatctccctagattatttttctttttaaatttcactttgcatttggttaatcattccctgggaaagcacacggggcaggtgggcctccttgtcttcactttgccattccctatctgatgaattctgaacctcagtttttcatccaagaactggagttaaaacacctgcactattatacagggcgtgaggctgttgtcatgataatcaatgagctgatgtgtggttgaagctcttatctgactccatagatagttttaaactacctaagtataaattcagcagctttgcttaagatttaaagcaggtattataaatatgcattcctttgccaatcttttaatagaaggacaggcctattcttttgaagatggatctgctgatgagagctcccctttgtctactttacatcaaccacacccttatttcattgttttgtgattccagtgttggtttctttaaagtaaaggaagaatttagatatttgccgagccattctgaatatagaaacttcctagatcgcatatcccttgatcttttatcgttaatttactctcatctaattaacagcgttttgtttttttttttagaaattgacttttattaagtctttccaaagtagccaacttagttttcaaagaaaatttctctctatttttatgttcatctaatcagtgacagtaataagtcaatcagctcatgtaatcccagtaacaaacagcaggattgtggacacacacagtggagccctgatatgctgcagctggacagtgggagctgagcaggcagggcacccccccccccgcccgccggccaggactccaggccttcggtgttcagtcttgccatggcatcagtcattggttttgtatagggagcagagaaggttatttaatctggttagtcagataagtggagtttactcgtatgtgaaattgctttctttgctgtgctgtgaggagctgtacaaatataaggtgctgttactgattattcagccaacatttatggactaccaactctgtacctggcacagttttggttctggggtcagagatgacaaactcctaccctgggagtccactgagcgaccataccaataggtcatggcctcagagccgcgtggcccacggcccctgtgactctctctgctgtggacctttctcctagaacccgatcatcagccagttcttccccaccctcctgctctggtccttctcggccctgctcccctccattgtctactactctacactgctggagtctcactggaccaagtgagtgcccgggagccccgaggccctgcccctaagaaggatatctctgaccgctcccttgtccacaccctaaccccccagctgctcaggcagtgggcacatggcaggggcctcactgggggcacatagagcatttgggggactgcgagtgctcacctttgacttcctgcaggtcgggggaaaaccagatcatgatgaccaaagtctacatattcttgatcttcatggtgctgatcctgccctccctgggtctcaccaggtatatgccaccaccttctgctctaaattcagaataagagtcacatcaggagagcactgtccccaggagaatgcaaacggtttggcagcagaagcaaacctctaacaatatctaagcctgtcgcaaccactcggcgtgcagtagggctgggtcattgattcttctggcaatatgattgattgttcttctttaaaaaagaaaaaaacaccatattggtcaggctgttcttgagctcctgacctcaggtgatccacccgcctcggcctcccaaagtgctgggattacaggcgtgagactctgtctcaaaaaaaaaaaaaaaaaaaaccagcttgaaaattttgtggccaggcacagtggctcacgcctgtaatcctagcattttgggaggccgaggtgggcagattgcttgagcccaggagttccagcctgggcagtctggcgaaaccccatctctacaaaagagaaaagaaaatgaaacttatcaaggaccttccacttagggaaggcctcatcatggctttatttatctcaaggaaggaagtttctgttaaagcagactgtgacaggtcatgccgtagtaagtggcatcgttgagaacaaaagtcaatctcgagctttggcctgtttttagagcaaaagaaaatgaaagcatgtgtagtgacaatatggaatgctggaaataaactcttagggggttcctttgtttttcagtctagattttttcttccggtggctctttgacaaaacttcctcggaggcctccatcaggttggagtgagtattgccaagttgagttctggagccatggccctgggtgaaagtcccacaggggctggggctgcagtgggatgggtgggggcggtcgtagcctatgcttctgaacaggcatcttcctccccagacagcagggcttggggcctcacctccaccctgccaggtttctggtagacactgtgggagctgacccactttgtgctatgcttgcagaaatgtggttaattttttaggccagaactcaattagcagctgtctcattcattgaaacttactgagcacagagtcacatggggagaaggaattgctgggtctcagtggtgccagggagtggggaaaggagaataataattaaagatggcagccaggatgcctctgggctctggggattatttttgccagaatagaattaaatttattactgatgtatccttgttagtattttaaacttataccatgccacttaatagtaatagctattgtttaagaaggcactatgctaaatgctttatgcatctttttctcactgtatctttacaatgagctatgaggaagatactattattctctccattttacagatgaggagactgaggtttggagacgttgaataacttgcccaagtttatccagctggttaaggaacagagctgggattcaaccccagcccctacagactatacattaggtcttaatataggtccagaggcttggcattgactttcctaaaagaatgtgcttacctgtaaggatggggcgagttattttaaatgagttcttgctgagtaagctgatgagttgggagctgatgactgtgacagacacacatacatacagccagcaatagtctaggttgacagtgactttcagattgacaagtccagtgaccagctcaatcctcatcttatgatctatcagcgacatctgacacatttatccgagccttcctcctcgaagctcggccttgggtctctcatctcgcagcatcctcttgtcaccctccttggtgggttctctcccatctccccaactctagattttggctgcctgaaggctcagcccccagttctgggtccacactgcctctctaggtgacttcagctgaacccacggcttccatgccatgatactgctcctgaattaacttatgcggacaacatccacatttatgcctctagcctgcacctccaggctggtaacccaactgcccacctcaaactctagctggagttttactgggtaccacggatgttacctgcccaaaaccaaactctcgacttttaccctcaaatctgctactctacaactttccccattccatattgtttttctacttgttttggcaaaaaacctcaaagttcaccttgtttcctttctatccctcccatgccatacccagcctaccagaaaatcctgacaactctctctaaagtagatccagaatcccttcatatctcaccacctccatcacaaccgccctcatcccacatggggatgacacagtggccatctgtgtagtctccctgaccccattggaacagatcccttgtcctgggctggcccccagcccctttcagccttgtcttctgcctcccctcgcccactgctgtccagcccctggatgtgcagcagacgaggacatcctcaggtgtcttgtatgttgttccctttccctggaatcctgtcttcccaggtttggggatgacttgctccttcacctcttcacatttctgcacgaatatcacctcgttagaaaggctcctccaacccctgtatgacataggaaccctccctgctttgttttcctctagtgctcaccgtccccagcagatggaatatttgtttgtctgcttgtttgtgcccccagctagaatgtgaacttcaagagagtggcgcaggggctttgttctattctcagtgcctagaaaggtgcttggcacacagatgtgtttcccaaatatgtgctgaatgaacggaagagtatacagccctcccaggggctttctgctcctgcccagcctaggggcccctcctctccctccaagagcggctctcagctcacagacctgggccctggtttccccaggtgcgtcttcctgcctgaccagggtgccttctttgtgaactatgtcatcgcctcggccttcatcggcaatggcatggagctgctgcggctgccaggtctcatcctctataccttccgcatgatcatggccaagacggctgctgaccgcaggaatgtcaagcaggtgccatcccctgggcccagggctgtgcctctgactccctcccatgtcccccttcactgacccgagggcctctcacccccactacccccactagtgggtagcatttacctgactacccactagtgcaggcactgggctaagtgcttctcaaacccgggtccaggcaggcgtggcctcctccagcctcctctctagctcacaggctggaggagagagcttgggactttggcatttgaaacggtttgatcgcacacatacatacatacaactcaaaccaacagactctttttctgtaggcacccatttgcataaattcttagccaaaccccagatgtcaaaggcattttcggcttgtggcatttattccaggattccctgaactggagggtgtggctttctcttttattctcctctgccatggtgggcactgtgcgaggaaagtgggagaagtgctgcattccttcatttcattctcagcccccttatgagctgggcactgctagtatcccgatttcacagaggcatgaactaagctggcccaggatcccctgctagaagggctggagtcactctacacctcttccctgaccacctcttccctccaggggctcacatgcctgttgggtggaacgaagggagcacgagcaaacacgcatcaccatgcctcgggagggctgggtgcactgagtgaagcagggcaggctgggagggatgggaaggaccttgggaggcggggagccacgcatctcctatttccaaagtcctcctccaccctgctctcccatcaccacttagagagcacaaaagggtgtttgaggtggaacaagtccatgagctcctcaccacctcctcctcccagaaccaggccttccagtacgagtttggagccatgtatgcatggatgctgtgtgtcttcactgtcatcgtggcctacagcatcacttgtcccatcatcgcgccatttggtgagtggccctggagcctgtcccagggtacatgggtacatggacggctgattgcaccaaacctctcggggacagctatcaccagggcacaatggagttcccaaaaccacagccacaagagccacaagctgctaaagactcacgtgacaccagatttcactcatttctttctttttttgttttgagacagggtctcatgctgatgcccaggctggagtggcatgatcttggcttactgcaacccccacctcctgggctcaagccatcctcccatctcagcctcctgagtagctgggattacaggtgcccgccaccatgcctgcctaactttttgtatttttagtagagatggggtttcaccatgttggccagcctggtcttgaactcctgacctcaggtgatccacccgcctcagcctcccaaagtgctgggattataggcatgagccacagcacccggcctcattcatttttaaatgaattcctcccactggccctcagctaggacctctcttagtatttctggtctgaggttctctgcccactgactatgtcgttcatggttgatttctttagcagcaagtaagacagtgccagagtcacaatcaaagctctcgtgctgctttcactctggcagatgcctgcctccacgtggattaccacatttctcacctcatcctacaaggcagttcctgtttctattcccccttcacacaaaataacttcgtatgttgttagtaagcaggagaaccagcctttgaactcaggactgtttaaagaccaaggtcctggccactgaaataaaacatctgcaactggcagattaatgaaaggctctagaaggaaacaaaaaacccaagagactgctggcagtgatagctgagttttagggggaaaagttgttttagttttccctgtatactttcttgtgtagttttaaaaatctacagtatttacactttcaaaacaaaatttattttttaaaaaagaacctggggctgggcacgatggcttatgcctgtaatcccagcactttgggaggcctaggcagtgcatcacctgaggtcaaaagttcaagaacaacctggccaatatgatgaaaccctgtccctactaaaaatacaaaaattaactgggcatggtggcaggcgcctgtaatcccagctactcgggaggctgaggtaggagaatcacttgaactcaggaggcagaggttgcagtgagccaagattgcaccagtgcactccagcctgaccaatgagcgagactccatctcaaaaaaaataaaaaataaaaaaacaaaagaacctggcataatagaaaaggcagcacccactttctgttggtcccctgtgtgctcctgtgccacccctggggtaagacccttgggcctcattctctgttgactgtgatgagggcagggatcagccgggtgggagaaggccaggggtgtgggagcactgacatacaggggctcagcatgggaagggctggggaggaattgaggccaggcatccaactgtgaaacagcctctttccaagatgattctggaatgttagtgttctgtggggacaggatcacagacactgtgactcccttggtgcagggtctgtcccacagaccctgacccagcgacggatgaaagacatacactgccgggtgcggtggctctcgcctgtaatcccagcactttgggaggcaaaggtgggcggatcacgaggtcaggagatcgagaccatcctggttaacatggtgaaaccctatctctactaaaaatataaaaaattagccgggcatggtgtcaggcgcccgtagtcccagctacttgagaggctgaggcagaagaatggcatgaacccaggaggcggagcttgcagtgagccgagatcgcaccactgcactccagcctgggcaacagagactctgtctcaaaaaaacagacagacagacatacactgacagatattttgcctgtcagtgcggctaaggggctctgcagcctgagtctgcagtgtagtcctcaatgccaggcgaagttcgcatttatttagtacagactaaatgacaaaggtctcgagtaaacaccactagagggtaattaacattgccgaccccctgaatagcgagcaatcatgcaccagtggatgatcaaaggttggtcttaggaccacatgaggaaacaagctatttaggtaaactcccccacattcctatgtatctgcaccctaagcttttaagagaattcagctgccttcagccaaaccctttactgaagctatgcaaacctctcggctttccaagaaggtttgtgtctatttcctataactttatcttaaattttctcccaccaccctgaccgatcccctacaccttggggtcacagataagtgaggaagtgggtaggagagagaaagtgaaaaaaaactagtagccagaggtgcaggatgcctcattttgtgttcaggcagtagagcagcagccccagccctggctccttgccaaaatagccgccccggagaggaagaggacagaggtgtctgtgtggccctgcgaggtctccagctcacagccccatcccctgcaggcctcatctacatcctgctcaagcacatggtggaccggcacaacctctacttcgtctacctcccagccaagctggagaaggggatccactttgccgctgtgaaccaggccttggcagcccccatcctgtgcctcttctggctctacttcttttccttcctgcgcctgggtgagcagcccttctgacctggggccagcccttggcctcccagccctgcatccccaccagccagtcagatccctcattgctttcacagcatcagcatggcatccagtcagaatgtggtgcccagagtgagggctggttaggtgtcccatcagaacgtggtacccagaatgagggttggttacatgtctagtcagaatgtggtgcccagagtgaggactggttaggtgtccaatcaaaacatgatacccagggtgaggggctggttgggtgtggtgttgacagcctggctcctaagctagcccgagtgcaggtgtaacccttgtgaaggcctggtcaattgtcccatacatccctggagagaagatagtgcctttatcagctgtgcagggactgaaccagaggaaatggggaagctgatccagatttgccctttgaggctggtggttgggcccagctccttgtacctcctggcatggaagaggtggggacgtggaggagagaaaactgacactcctgggggaaagacacgtctgccccggtcagactgggggtgtgggagggtccatcctctctagcccagggcactggagactggagggaacggaccagcaaggaggctgaagaattgccattgacttggcaccccagtgcctgaaatctgaccagggatgatgccagtcattcagtgggtccctctgtgtgttcctggctgtgaagacaccatccttgctgctggagttgaggggtgggggtggggggttaggccttgcctttattttctgcctgagggagaagtcacgggcagtttccacaccaggtgcggccccttcctcagcagggtgagggtaggtggtggcccctccctgcccaccccaaggctagccaccctctatcaccaggtatgaaggcccccgccactctgttcaccttcctggtgctgctgctcaccatcctggtctgcctggctcacacctgctttggatgcttcaagcacctcagccctctgaactacaaagtaaaggcccccgaccccactgcccggtcaagccctgggaggaacagatggtgggacgggctcgctgtcaaccccgcccacccttgtctgtatcaacacagcagcagccttctccagattctgcttctccatgggaaaggcgtgggtggttgggtgccatgtgtagcttcccttcctcccctcatccctgcactcccccaccccatcctctctcgggctgctggggagcttggtgccagctggtactattattccgggtgttaatagtctgtgtgtttggagggtgttcgttcacagagatcagttttgtttatcatcgcaagtttttgctgttatctgcagacagaagagcctgcaagtgacaaaggaagtgaggcagaggcccacatgcccccaccgttcacagtaagctgtgcccctcagcctctgagcttgtcgcccttttttttgctttggttgtaacagtcccaaccagatgggccccggcaaatctttgatcatctcttgctaagatcacatggcaggcaagtttgtgaattaatggcagagaaggaatcctggtccccctgggtattttaacctgcatatttgaaactgttgaggagatagagtcttgtctcgattcatggccatcccccttggtttcagttccctgctctctttccttctctgcatatttaatgcctggtgagtttggggctttagtgaaggcacatggtaaggcgctagggtttgacaaaggtttgtcatcagcgatgcacctgcctgtgcgaggtcctccactaggctccaagagggtgtcaggcagacttccctttgaattcaagaaatgaacattgcacctgcttcagaggaagaccccatggtagagagacacagggctccttgccttcctagttctctctgcacacagcctccagggtcctgctcctagggtggggctgggaagggaaagcagagccccagggttccagagctgtagtcaccagccttcctgacagccgtggccaggacagagccgacctcatctgcagggttctttctggtggctgcctcccaggtgtcaggctctcttatcggtgtctgtccttggacaagttccaaacaagggagggcctcagaaggactcattacccagcgacacacctgtggctatgctggccaagcagggaacatgcaggacaggtggatgatgtcaagccctcacagccagggtctcaggaggagtatggcagggctctgtgcctggggtcagtggctggagcctgggattgggaggaaatgagactcaaaatgagactcacacagatatgttgagcatcccaggggtcccagggcagcgttctaagcccccctatataggtagacttgtttcttctacaaagtgagaaatcctcctaggatccagggctaggaagtttagtttcctctgagaactgctctcttgtgcttccttctgtgatcatgagaactgtataactgtgctttctcttttgccctggctgctaggaaattctgcaggtgtcatattttcggtcttaatgtcctaaatggatgtcggtgtttcttcatatgtcctttatggccactgtctgtgtcctgttgggagaagggcaggaggggagggatgcagtgtggaagctcatgcctgtccaggccaagcacaaatccatttgctgacagccctacgtgcctcggattctgaacggcttggcctcggagaggacagcactgtctccgcagcagcagcagcagcagacctatggtgccatccacaacatcagcgggactatccctggacagtgcttggcgcagagcgccacgggcagtgtggctgctgccccccaggaggcctgaggctgggtgagctgctggctgggccaggctcaggggagcctgtggggtgagaagacaggtgaagcggcctgactcccaagttcatgacttcttcccatctgttttaggtctcactgctctgaaaagacacaaccagaatggcctggggctcaggcccttggctgagtgggaatgcgttgggactgcccagctgagctatcaggtgcccatcttttctggtcccagcagtggtgaggagagcacaggcaggcctcgcccctcccttgctcacccagtttcccctccggcacaagcttccagctctgcagctggggtgacatccccagtggtttgtcgccaagaccatgtggtggacttttcgccccccaaactgatgagtccgggagaatatatggagagagagatgtaacaaggggaaggcctcctcccttctgagcacacacacaaccgataaccaaagagatgctgcagtccaggtctgaggtcccgctggcatccagctccctgctccatggccagtccctccccagcccagcagtccctccaggctacatccaggagtaagctatggggaacaggttgggaggtggccagtgctcctgccagctgtgcacacatctctgtatcccgctagagttctgtgtttttgtatcatgttgtcagggacgctagctgggtcagggttaccccatagcaggcagggacaaggaccactcataatatgcccattggaccacagttaagatccagcctctctcacctcttcagggctgagtgcatgagtctgcacctccaggcaggctctgtgcagtactcaccccctccgtctgctccctccaaggtgtgggggtgggcagtgctcagggcctcctcggagccaaaggacagcatggtcggcacagaggaaggggtacctgggctgggtgcagggccatcccactgcccttgagctgtggctctggcaggaaggaggggcagcccatccctcttctccctcctggggattctggggaatgggatgcaacttaagacttctgcctgagaagcctcctccctgctgcctccagggggcaccaaggcacaagcctgtgcagtaggggcgggatgggggtgtggaagagcaggtccaggctcctagcacaactggcctggggccttggcacctctgtaggccctgcctgtgcctgtccgctggcctggggggcctgggcttatctgggccttctcactcagggactctcttgacgctgacttgcccccgcagtggtggccagtgctgcctctgctccaagctgcccctgcgctgggaggggtgggggcggtgccattggtctggtgcagcatagccctggccagtggcctcatccccagcaggcctcccgtgcctctgccagcaaggaggggccggccagctctgcttgcacagggggccccatgtggggtcagcgcacgctcatgtcactgagttccagccgcttttagagtaaagtcgtttatcatcaaagccatgttgcttaccacacggagttgggggttggggagtgagcttggaggggtgagggggtgagcgtgggctcccagcatgggcaggggacggaggcaaactcattcctcagaaaaggggtatcttccccaagaaaagcctggagggcacttgtggggggaggtggcaggcggggggagaggggtgggtcattgccgctccagcaccgacaggaacttgcggatgtcctgggcgagcagctccggctcctcaaaggccgcaaagtggcccccacgaaccatgtaggaataggagatgagctttgggtacttgaacctcacccacttttcaggcgtgtgcaatagctcaaaagggaaggcagagaagccagtgggcacatagaccttcatcctggaagtgaaagagccgacggaggggtgaggctgtggccctgcgcccctccgtcctgcacagcagggggttaaagcgcctgggggtgagatcagctggcccacccacaaggagccataaagaaaaggacaaatccagggtctcaaccgctctcccctcactgagggccttctcttttctgggagggccacccaggcaggggcatgggacagcctctaaatccccacctttgagggtttccatgtgagacttggaaatcccagaaccatcagtgccactccagaccagcatcctagactggggagcggtactgagggccgcccgggagccaggcacctggtccctccatgagggctttctccaaacacctcgacctttagtgttcccatccaagggcccctggggcacctgcaggcaaggctatacttatcccaccaccaagtgcccttcgtggagcccaagactggccgtccccctgcctccagcctcagaggcccctgttctcggctcagccaggctcaccgctcatgcttctgggtcatccagccctgtcccaggttctccttgtagaagcgctgggaggagatgatggtgcctgttgtccagtagagcatgacgttggtcagcaggtcgtccagggagaacttcctgggaacgcagaacacaaagccccactctcagtgccacatgcagttgtgtgacaaagggcagccagaaagtcctacaaatgccaggccctgcccatgcggcttccctcctcagacctcatgcaacgtgtgtggtatcctcgtgtcacaggcaggctgcgcccagggcactagactggagcgcatggatttagttgaagtgtctcttatcaccccaaggtcctccccccacccaccttgcctctacacacctgtcccctctctcctgccactgacctctcctccctcccctcaacccctgcaccgtgaaactgctcagggcaccagctactgtggtgaccacataccaggcagcatgttctaagctccttaccttcttttaattcatgttttcctctcaacagcctatgggacataggtactattatctccattttacttattaagtggagaatccaaacctagccagcttgggtccaggatgcatactccacagcccccaccccaccttccactttccccagagcacgccctcccaaccctaccttcctcactcaaaccctgaatctctagcaacagcagcagggagcagggacagagataaagggaacagccttttcaatgtgattttggtggcaaaatgaaaactggtcaatgaaaactagttccagtatacacatcacctctgtgaactggatttctgcaagttggccaagtgcttccatctccctttcggctctgcccgcagcttgaaaacgaccacgaccaccatttccaccctagtgtattcctgttctttctagaacacagatctgatcctgtctacctcctgctcagggatttggtgctccctgtaacccggggccagagctgcaggagtggcctagtgggatagtctggtggggcctcacatcttgctccaggtatccgtgtgcaaggagcaggccagaccccctgccaaggtggtcttgcagaagctccatcaacccctgtgtcctgctgaatgtagggcaggggaaacagatcccagacgaaggccctgctgaggctcttggaggaggtgaggacctgcctgcaggaatgagtttgcttttgatctggccccagtgtacctgcttcagcctctggacaagccaccctttccaagcaccctttccttgcatttttattgcttttctctttgcctaagtttctctcctccatccagcaaactcctacttatcctccaaggcccaaatcagatacattctcctggtcatttcccctctctgccgcttagacaaagaatcctccttccactggactctcacagtcctttgcgcattcattcaacatctatgtactgggctctcccactgttcacccggcattgttctaggtgatggggctacagcatggccaagacagagtccctacccccaaggcaggattcagtctcattttactgtctttcccatccccagcactgtctggtcctgtgtgtcactgaaggaataaagggatgggccctggaaagggtgggtcagagctgaccttggtgaagcctgagtcaggccacagagctgggagtcaggcatgtagaggatacagcctctaaggctctgagagattaacagcctcctgtctttctgcgaccaccctcctggaacacgcagtcacgtgaccctgatgccaggctctccagggaatcaggaggaaaagcccaggtgctcttgacaataatgtggtgcctgctgccctgtgggctccctaatccccagaggggcctgttcagcaaaaggagcacaagcaggtgagcctgcatcctagtcttgaccatgcactgtgaggctgggaacaacccaccaggccacctcacccaaaaaatgcagctacgttggtcacagggtgaggatttgtaagaaagccaacaatagaatttgctgagtgccccatgcagagcaaccagacaaggggatgaagagggtgaggaggttggctgctgggaccagggtcatgactgcaggggcaaaccagggcctcacctttccaggcctccatcctccaggtatcggaattccgtattggtccaggtggaaaacttctctagaatataggcagccagacccacaggagagtcattcagagcagagcctggcggggagcggggagcaagggagagactcaggcctggggaccagagagctggagcttcaggtgtgatgtgtggcactggccgcagagggcggggctgtgtgcaggaagccacgttcgagcacaggcctgccttaactcctgggtgctcacatgcctcgcttccttaactctgcctcggcatcctcatctgataaacagggacgataccttcccactgtctcccagggcctggcacactgcctgctcagcttccttcaaactgaagggcctacgcctctgcatttggtggggtcccaatgagaagtgctgtttttaaaaaggcggggtttttcagtctatgtgctctgattcatgaaaaatgagaagccacctaaaaaagtctaaaataggggatcagttacaaatattgatatactcataagccaaaatactgtacagtcattaaaaatggctggaacaggctgggggcattggctcatgcctgtaatcccagcactttgggagggtgagaaaggtggatcacctgcggtaaggagttcgagactatcctggctgacatggtgaaaccccatctctattaaaaatacaaaaaaattagcagggcatggtggtgcatgcctgtaatcccagctacttgggaggctgaggcaggcaaattgcttgaacccgggaggtggaggttgcagtgagccgagatcgtaccactgcactctagcctgggcaacagagcaagactctgtctcaaaaaaaaaaaaaaaaaaggctgggacagtgggacaggctgggtgcggtggctcacacctgtaatcccagcactttgggaggccgaggcgggtggatcacctgaggtcaggagttcgagaccagcctggccaacatggtaaaaccccgtctctactaaaaatacaaaacattagccaggcatggtggcaggtgcctgtaatcccagctacttgggaggctgaggcaggagaattgcttgaacctgggaggcggaggttgcagtgagctgagatcacaccactgcactctaccctgggcaacagagccagactgggtcttgagaaaaaataaataaataaagctgggacaatggcataaatgaatctcacaaacataatattgagcaaaagaagccagactcaagggtatatactctgtgattctattcataggacttaaacaggcacaatcaaaaccatctcagtcagaagtcagagcgtggtacctgggagagaaccccgaggggcatctggagtgttggggccatgttggtgatatggacgtacttcacttgtgaaaattctcaccaaaatgttcacaagttcttttgaaggagaggggatgtggggagggagaagaggttatatgagattgtctttaatgttttgtactttttgcatttttaagctttttgacaacatgtattttataatcagagaaaaatgctgacttttataaagtgccattattatgattatgagctgcctcgtgtgtgtgggcatgggtttgccatgaaaactatgaagaactttgagatgggcaagacaattcctgggtgtcttctggacaagatctagggagttacctagcagaccttccggactgacgtgatgctacaggggtcccatctttccttgtcattgagctattttacagttctgtgaattgtaaagaactgagggtaatgcgaatgactcttgttcatagaggcaaatgaattttgtcccatggagatttaattgatattactctgtggatgttgacaagttttgtgtctgttagcaaattaatttcagtgttcttatttgtctttgaattgtttctttttaaaattttactggttcctttataaatttacctttttgaaaaagtattgtcctttaacaggaccctggtggcagacatggttgctgggccctccctcactgcctgggaacctcttccccaaggccccagggcaccctctcccctctcccctgcagccccagagctgcccactcccaggattcctcctacctcaccccctccatccctctgcttctcagtgtaggatatagactcaggggtgggagatcaggggtgaaagccactatgaatactgagtcggctaaacagagttgctaaattggcctgggaatctgctgagggtccatcctcttgattctatgggaaaatgcagtttaaagatctaaagagctgggaggtccttacaagaggcttccttctgtgggcagcattggggtggggtggtgaggttaccccgcgggtgtctccctgccccagtggagccggcagtgggcgaggacccctgagcacactcacctacggtgtcaggcttggtgcactggatgtgcatgtagccgctctccctcatcaggctgtagaataccttctccttgacggggtacagcagctccacatccctctcagtgaggccaagaaacctcccgaaacgctgtcccaggaggagggtcagggtagagaagttgcttaaaaccaaagccatgttcaagtgcaggcctttcacgtggctgaaggcagagagaggggccggggtgaggctgggctggtgtcaaggacagggagagaggagagatggcggaggaacaggcctcagggctgaggagcgagcacagagccagcctctttcagcactggccccactggggaggccatgggagttggagaagggaggttgggggaaaaatacagtttctggggagttctgctcagggctgtcccagagcttggtccagcagagaggtctaatgcctgaccttcccctcctatcacaggccttctctgcctgggaacctgacccagagccgcaaccctgggttacagacaggaggatccaagtcaacgtgcctcaggcactgctgagtgacaggtcacactccctcctctcccctggggggtccttggcccaccctgcacacaggtccacttcttagaggacacacacacacacacacacacacacacacacacaccaccaccccaacagtgacctcacctgggcaccagctgggccatattagtgcagatcagggacccccagtcccctccttgaatgtagaattcctggaagcccagccgcagcatcagcttgtaaaagatcctggcggtggccaccgagttgaaccctggcagtgatggggaaaggcatggagtcacggagtcacaggcagattgctccttgggccctctggtgttctatgaaatttctcaggcccgcctacccccaggtggaggtcagaaaagctcacagaggcaagaaggaatcctggagcccaaatataggggtggcatctccagccccggagggcggtgtgtctggggccggcctctcaggcccctcctttcccagcttcctcgggccaactccctgctcaccccgccggaaggagagcctggtgggaacaccgggcccacccttggcgaggacggggcagttatggaacctctagcagccccgtacccttcttggaggatgcctctgagaagccatagccagggatggaagggcagatgacttcaaaaacgtgctcatcgctcaggccatggttcttggggtcagtcaggagtgggatgatcttataaaactcgtagaaagagccgggccagccgtgcaccatcagcaagggcttcggggtatggcctgcgggcagctgggggggcttcacgtggatgaagtggatgtccagccctggggggacagagcacagtcagggtggagggagagagaagaccctgcacggtcaggctctggcaccccccagagcctagatattgagtcctgccacccttagtgcccccgcccccccttcatggtattgacagtaataagggctgacactggtttcacactcacactgtgctccaggtgcacagatgtcctcactcagccttcacaacctccctgcaagggagctacgattattgcctcccggtttccttagaggtgccccctgacagctgggccaggtctgtacagccactgctgggtttccagggctcaggacagctcctggctcacagcaggcctccataaatacttgttcaataatttaaaatctggagggtagggagaaagccccacgtatccagcaatacaggattaatcaagtatagtttgacagtatactggagtccagtacagtcatctaaactgacaaggtagatgtatatttatttaacatagaaaactgatcagaagatattgctgggaggtaaaagcaaatgatcaagtcatatccattgtgtgacccagtttttataaaaagtcatctatgcttatactgtacttataccatgtattggtgaattttaaaagtctgggaggataaactccaagaatgtaaaaagcagttctcctgagcagtagattccagtgcttttaatttctctttgagttttatgtactttccaatttttctacaatgaacaggtattaaatgcataatttttttcatacacattgacaaaatgtcacctttttctgattaccaaatgatattttctttaaagtggaggatttttgggcctggtgtggtggctcacgcctgtaatcccagcactttggaaggctgaggcgggtggatcacctaaggtcaggagctcaagaccagcctggccaacatggtgaaaccccgtctctactaaaaatacaaaaaaattacccgggcatgctgacaggcgcctgcaattccagctactcgggaggctgaggcaagagaatcgcttgaacctgggaagcagaggttgcactgagccgagatcacaccaccacactccagcctgggcaacagagcaagactccatctcaaaaaattaaaataaaataaagtggaagatttttttttaagtgcaatgctgaaaacatcatcatagccaagggcaggtgaatggattcttgtctcctctggactgacttggggcctctgcatatcaaaagaaggcagccccttcccaggccagtgccctggacagcacctggggccttacggcattcacagtgagggcggctgccatgcttggaactctctgccaccagggctggtgcagtcagcatggtctagctaatgttctgttctgtcgttaatatattatacaaataatacatgtttactgtagaaaacttagaaaacacagataagccaaagggggaagactcacatgtaatcccactctctaaagaaaacatggtgttgtctgtctaaactttattttggaacagttttagattgctgaaaaactgcaaagagtccagaaaactcccatatacctcacacccaccgggtttcctccattattaatattttatgttagcatggtacatttattacaattaacgaaccagactgagatattattaactataaagtccattgatttccttagtgtttacactttttattatatggcgagaacacttaatatgggtcctacccttttaacagattgtaagtgtccaacactgacggcgctctgctgtacagcccatctctaggatgtattcggctggcaggactcaaactttacacagcaacgatcagcaatgccgtttcccctattccccagcccctgacaaccacccttctcctctctgcttctgctgagtttgactatttcagattccttctataggtggaatcatgcggtatttgtcctgtccctggcttacttcacttagcattatttcctcagagtttattcatgttgtcacacattgcaggatttcctttttttttcttcttcttttagagatgaggtctcactgtgttgcccaggctgaagtgcagtggcacaatcacggctcactgcagcctcaacctcccaggctcaagtgatcctcccacctcagcctctcaagtagctgggactacaggtgggcaacaccatgtctagcctatttttgttatttttttttgtagagaaggggtctcgctatgttgcccaggctggtctcaaactactgggctcaagccatcctcccaccttggcctctcaaagtgttgggattactggcgtgagccaccacacccggccaggattttctcctttttaaaacctggataatgctggtatctacacacaacaaaatatgagccagatttcctcagtttttcccctgatatccattttctgttccaggatcccatccaggactcacacaccactgagctgtcatgtctctttagacccttcttggctgtgacagttcaaactttttaaaaagacttagagaacataacttttaacaaaaatagaaccatacatacattctattttagaatctctttttttttaacttaacaatgtatcctgggtgtcctcctatgttgccaaatttactcctattctaaaggaccaaggccaagaacaggcctccagccccgggcagggtgccagaaccacacatgggtaagtccacgatgaattcaatgctggaaactggctcttttggagccgttgtacctgagggaggttttgtaccataaatgcccaatgtcagctgggtgtggtggctcacacctataatcctgatactttgggaagccaaggtgggagaattgcttgagcccaggagtttgcgatcagcctgggtgacatggtgagaccttgtctctactaaaaatgtaaaaaaaaaaaaaaaggaaagaaaaaacaaaggccgggtgccgtggctcatacctgtaatcccagcactttgggaggctgaggcaggtggatcacgaggtcaggcgatcaagatcatcctggctaacacggtgaaaccccgtctctactaaaaatacaaaaaattagctgggcatggt

SEQ ID NO: 665 - DNA, 4105 bp, Homo sapiens
gtttcactttgtaacttttaagtggtcggaacacgccccgcgctgctgggtcccgccagacacgccgccgccgcaggaaagtctacagtttggtaccccaggactcgctggtcaggaaagccctgcaggacatgagtgttaggcccgacgcctggcccttggcagcttgggaggtggctggggctgcttttgcctttgccagagacagctccaactgaggacctctccaacgggcccatccacagtccttccttcccctagtgtctgggaagacaggcgcgatgatggactccccgttcctggagctgtggcagtccaaggcagtgtccatcagggagcagctgggactcggggaccggcccaacgactcctattgctacaactcggccaaaaacagcaccgtgctccagggggtcacctttggtggcatccccactgtcctgctcatagacgtcagctgcttcctgttcttaatcttggtgttttctattataagaagaagattctgggactatggccgcattgccctggtgtcagaagcagacagcgagtccagatttcagagattgtcatcgacttcctcctcaggtcaacaagactttgaaaatgagctgggatgctgtccctggctgactgccatcttccgtctgcatgatgaccagatcctggaatggtgtggggaggacgccatccactacctgtccttccagaggcacatcatcttcctgttggtggtggtcagctttttgtccctgtgtgtcatcctgcctgtcaacctctcaggggacttgctggacaaagacccgtatagttttgggaggacaacaatagcaaacctacagactgacaatgacctcctttggctgcacaccatctttgctgtcatttacctcttcctcactgtgggtttcatgcggcaccacactcagtccattaagtacaaagaggagaacctggtgaggcggaccctgttcatcacaggactccccagagatgccaggaaggagactgtggagagccacttccgggacgcgtatcccacgtgtgaggtggttgatgtgcagctgtgctacaacgtggccaaactgatctacctgtgcaaggagaaaaagaagactgagaagagcctgacctattacacaaacctgcaggtgaagacaggccagcggaccctcatcaaccccaagccctgtggccagttttgctgctgtgaagtgctgggctgtgagtgggaagacgccatctcttactacacacggatgaaggacaggctgctggagaggatcacagaggaagaacgccacgtccaggaccagcccctgggaatggccttcgtcaccttccaggagaagtccatggccacctacatcctgaaagatttcaatgcctgcaagtgtcagagccttcagtgcaaaggtgagccccagccgtcctcccatagcagggagctctatacctccaagtggacagtcacctttgctgctgaccctgaggacatctgctggaagaacctctctatccagggcctccgctggtggctacagtggctgggcatcaacttcaccctcttcctggggctatttttcctgaccacaccctccatcatcctgtccaccatggacaagtttaatgtcaccaaacccatccatgcgctgaataacccgatcatcagccagttcttccccaccctcctgctctggtccttctcggccctgctcccctccattgtctactactctacactgctggagtctcactggaccaagtcgggggaaaaccagatcatgatgaccaaagtctacatattcttgatcttcatggtgctgatcctgccctccctgggtctcaccagtctagattttttcttccggtggctctttgacaaaacttcctcggaggcctccatcaggttggagtgcgtcttcctgcctgaccagggtgccttctttgtgaactatgtcatcgcctcggccttcatcggcaatggcatggagctgctgcggctgccaggtctcatcctctataccttccgcatgatcatggccaagacggctgctgaccgcaggaatgtcaagcagaaccaggccttccagtacgagtttggagccatgtatgcatggatgctgtgtgtcttcactgtcatcgtggcctacagcatcacttgtcccatcatcgcgccatttggcctcatctacatcctgctcaagcacatggtggaccggcacaacctctacttcgtctacctcccagccaagctggagaaggggatccactttgccgctgtgaaccaggccttggcagcccccatcctgtgcctcttctggctctacttcttttccttcctgcgcctgggtatgaaggcccccgccactctgttcaccttcctggtgctgctgctcaccatcctggtctgcctggctcacacctgctttggatgcttcaagcacctcagccctctgaactacaaaacagaagagcctgcaagtgacaaaggaagtgaggcagaggcccacatgcccccaccgttcacaccctacgtgcctcggattctgaacggcttggcctcggagaggacagcactgtctccgcagcagcagcagcagcagacctatggtgccatccacaacatcagcgggactatccctggacagtgcttggcgcagagcgccacgggcagtgtggctgctgccccccaggaggcctgaggctgggtctcactgctctgaaaagacacaaccagaatggcctggggctcaggcccttggctgagtgggaatgcgttgggactgcccagctgagctatcaggtgcccatcttttctggtcccagcagtggtgaggagagcacaggcaggcctcgcccctcccttgctcacccagtttcccctccggcacaagcttccagctctgcagctggggtgacatccccagtggtttgtcgccaagaccatgtggtggacttttcgccccccaaactgatgagtccgggagaatatatggagagagagatgtaacaaggggaaggcctcctcccttctgagcacacacacaaccgataaccaaagagatgctgcagtccaggtctgaggtcccgctggcatccagctccctgctccatggccagtccctccccagcccagcagtccctccaggctacatccaggagtaagctatggggaacaggttgggaggtggccagtgctcctgccagctgtgcacacatctctgtatcccgctagagttctgtgtttttgtatcatgttgtcagggacgctagctgggtcagggttaccccatagcaggcagggacaaggaccactcataatatgcccattggaccacagttaagatccagcctctctcacctcttcagggctgagtgcatgagtctgcacctccaggcaggctctgtgcagtactcaccccctccgtctgctccctccaaggtgtgggggtgggcagtgctcagggcctcctcggagccaaaggacagcatggtcggcacagaggaaggggtacctgggctgggtgcagggccatcccactgcccttgagctgtggctctggcaggaaggaggggcagcccatccctcttctccctcctggggattctggggaatgggatgcaacttaagacttctgcctgagaagcctcctccctgctgcctccagggggcaccaaggcacaagcctgtgcagtaggggcgggatgggggtgtggaagagcaggtccaggctcctagcacaactggcctggggccttggcacctctgtaggccctgcctgtgcctgtccgctggcctggggggcctgggcttatctgggccttctcactcagggactctcttgacgctgacttgcccccgcagtggtggccagtgctgcctctgctccaagctgcccctgcgctgggaggggtgggggcggtgccattggtctggtgcagcatagccctggccagtggcctcatccccagcaggcctcccgtgcctctgccagcaaggaggggccggccagctctgcttgcacagggggccccatgtggggtcagcgcacgctcatgtcactgagttccagccgcttttagagtaaagtcgtttatcatc

SEQ ID NO: 666 - protein, 801 aa, Homo sapiens
MMDSPFLELWQSKAVSIREQLGLGDRPNDSYCYNSAKNSTVLQGVTFGGIPTVLLIDVSCFLFLILVFSIIRRRFWDYGRIALVSEADSESRFQRLSSTSSSGQQDFENELGCCPWLTAIFRLHDDQIWCGEDAIHYLSFQRHIIFLLVVVSFLSLCVILPVNLSGDLLDKDPYSFGRTTIANLQTDNDLLWLHTIFAVIYLFLTVGFMRHHTQSIKYKEENLVRRTLFITGLPRDARKETVESHFRDAYPTCEVVDVQLCYNVAKLIYLCKEKKKTEKSLTYYTNLQVKTGQRTLINPKPCGQFCCCEVLGCEWEDAISYYTRMKDRLLERITEEERHVQDQPLGMAFVTFQEKSMATYILKDFNACKCQSLQCKGEPQPSSHSRELYTSKWTVTFAADPEDICWKNLSIQGLRWWLQWLGINFTLFLGLFFLTTPSIILSTMDKFNVTKPIHALNNPIISQFFPTLLLWSFSALLPSIVYYSTLLESHWTKSGENQIMMTKVYIFLIFMVLILPSLGLTSLDFFFRWLFDKTSSEASIRLECVFLPDQGAFFVNYVIASAFIGNGMELLRLPGLILYTFRMIMAKTAADRRNVKQNQAFQYEFGAMYAWMLCVFTVIVAYSITCPIIAPFGLIYILLKHMVDRHNLYFVYLPAKLEKGIHFAAVNQAAPILCLFWLYFFSFLRLGMKAPATLFTFLVLLLTILVCLAHTCFGCFKHLSPLNYKTEEPASDKGSEAEAHMPPPFTPYVPRILNGLASTALSPQQQQQQTYGAIHNISGTIPGQCLAQSATGSVAAAPQEA

SEQ ID NO: 667 - DNA, 23503 bp, Mus musculus
catgatgctgctgctgctgctgctgcagagtattaccggcaaaccccacaaacttcctaaatgggaccacacagcgagatgaaggccttccgaaaacccagaaggaaaaatatttttagacactctcaatttttttattcactgatcttcatctttcaggcgaagcagatgaagagagtgggcagctccaacacccctcagtgggctccctgggctgactcaagatgcaaaccctggtcctggaactcatctgctgtggcagtgacagcagggagcaaggcaagctttggggtgtgtggagtgaagtacaagggtttaatgatagctatgtgatataacagcacctgtcacagtaggccttatttcctagggcactgcctgttggtggcctcctttgaagatctgcctggagagacaacacacaaaatctcaagagaaggaggaaggacatgacaacacttacccttctctcgtgttctctgtacctcccattcctctcatctctatagtagcttcccactgcccacacagcccttgacattctgtctcccatagataaagctatgtaagagaggcccccaggttctttcccaccaagtcagttcccaggacatcataaatgaactagacttctcagagtcttatcccagctcctgaagcaacagaggtctctgcccagaatgatcaccgaggagtccatccaatggccagcccaacacgagtcctaaacagtcaaatttggtgtcaaactgtccagcaccgtgctgtaagggtgctaccttcagctgggtggtcccctttatgtgcagatctttggtttgttccacattcaaaccatgcaaagttatctgaaccgtgtttacatcaaggagtaggtttctagtacatagtagagacttcaaaaatatggtcagagtgatggaatgaatcttcaagtgatagcaagcccgagtgggctaatgggatccctggactggaacgacagagaggaaatcttgccagttcacacatctgaagtggttttgtttagacagtcgatgtggtcctcttgaactcatgtcctgggcaggactgtgtctttttgttttacattgctttcatctgttttggcttcatccttacactcctgaattgaccatgcatgtcattatacttttttggatacccaaccactcttgtcctttctgtttaatagaaacctaagctgaactctgtagcttcccaatcactctgagttctctttgcctttggagtctttgactgtgcctgttagggttactattgctgtggtgaaataccacgaccaaatgcagccttaggagggttaattccactcacagctccttagaacagttcatcatcaaaagcattgagggcaggaactcaatcagagcaggaagctggaggcaggagctgatgatgaagaggccatggaggggtgctgcttactggcttgcttctccatggcttgctcagcctgctttcttatagaacccaggactaccaacccagaggtggctctaccacactaggctgggctctccctcatcagtcactgtcttagtcagtgtttctattcctgcacaaacatcaagaccaagaagcaggttagggaggaaagggtttattcagcttacacttccacactgctgttcatcaccaaaggaagtcaggactagaactcaagcaggtcaggaaacaggagctgatgcagaggccatggagggatgttccttactggcttgcttcccctggcttgctcagcctgatttcttatagaacccaagactaccagcccagagatggtcccacccacaaagggcctttccccacttgatcactaattgagaaaatgccttacatctggatctcatggaggcatttcctcaactgaagctcctttctctgtgataactccagcctgtgtcaagttgacacaaaactagccagtacagtcactaattaagaaaatgccctacaggtttgcctacagccagatcttaggaaagcatgctctccttctatgatgatgataatttgaatcaagttaacataaaaccagccagaacactgatgatctcagagccttctgcctggaacttgggtcaccattttgtttactcagctggtagtccccaccaagcacatatgtcatctcttcctgagtattcctcgacactcaaaggagctatcagttccttccctatcttcagtgatctctgctccatggtgtccctactctgggctaaggctaacaatgtggccactactgaagtaaagataagagcaagagagaagagagagtcttgcaagccttctctcagtttctgcaagacacattcacatacttatcatatattgccaagacatggcacatggtggtgtccaccttctagaaggtaagaaggtaggatcctactagaaataggcaaaaccagaaagatctgttaaacagcctgagtaacaaaatagcctcaagtaaatccaggcttagaaagtcttcagtggagttgatgaccatgatgagaatttaggtgagggtgtggaagccacttacggaggagcaaagagaaattaagaaacaatcacattgaggaagacaagacattcaagatggctgccatggggttggaggtggaaggaggtgtgagaggtgtgggggcaggagtgtgggtgggggaaaagaatgacagcagtggggtgtggctaaggaaagctgtctgactgatggttagtgtgggtgtgactgcaggttgcctgctgagttccagaagcactagagtttgaagacccaaagggttgggttgattccctcagccagtgaattccaaagcacaatgagaagatgagtccagaactcagctaggcttcatcctttgagcatcagagcaatgaaaacgtgagcagagacagaaacacgttgggtgtctggactgagaagtaggggattcttgggcagtaggatttgttatcatgggatccatcccatatacagtcaccaaacccagacactattctgggtgccaagaagtacatgctggccaggctgtgatggcgcacgcctttaatcccagtacttgggagacagaggctgtcggatttctgagtttgaggccagcctggtctatagagtgagttccaggacagccagggctacagagagaaaccctgtctcaaaaacgaaacaaaacaaaacaaaaacaaatcaagaagtgcatgctgacaggagcctgatatagctgtctcctgagaggctctgccagagcctgacaaatacagaggtggatgctcaaagccatccattggactgagcatggggtcaccagtgttggagttagagaaaggattgaaggagctgaagggttttgcaaccccataggaagaacaatatcaaccaaccagattccccagagctctcagagactaagccaccaaccaaggagtacacatggagggcctcatgtctccagccgcatatgtagcagagggtggccttgtagagcatcaacaggaggagaggcccttggtcctgtgaaggctcgataccccagtgtaggggaattcaagggcggggaggtgggagtgggtagataggtgggggagcaccctcatagaagcagggggagtttcagaagaaggaaggaataagcagtttcagggtggggaagtgggaaaggggataacatttgaaatgtaaataaagaaaatatctaataataaaaaaaaagaatttgttatcattaggaacttgatttaaccacaatgtgcttcacttggagaaattcaggaattgaataagagaggagagagacaaaagcactatttactattactattcacacacacacacacacacacacacacacacacacacagagagagagagagagagagagagagagagagagagagagagagagagaggtcttaccaaggtgggaaagatgttaagccattatatctgaatgtcccctccctgcgagttcttctttgggtaccaggtaggcagttttaatgccaaacacaattttctttttcttttaaggactcatttatttttattttatgtgaatgtgtgaatgcctgcatgcagtatgtataccatacatgtgcctgatgttcacagtatgcagaagaggctgccaggttccttggaactgggattgcaggctgttataagcagatgctgagaactgaacccaggtcctctgcaggagcagcaagtgctcttaaccactgagacaactcttcagctcctgcaaatgcattagcctcacaaataagccagaacccataaactcgttcatagttgacagcagaagttttaatacggctgctgaatgaaactccagttctgcccaaccttattcaagataaacctgagatatcaatggccccagaggttttgacctgacttaagccctgccttcagtctgaagatagtttctcagtttatacctcattcaacagtctatgttgaatgttgggtttgtgtttgattgaggataaacctgtctgaccattttcttggtcgcatatgaacttcactggctcggagcattgctcctctgtgtgggatgcagctacttggcgacttctgccagctgtcatctcagaaaatcacaagcctgtccgcttgccttttgcaagctggggcagctcaaggtctcccccccccccttttcaaatagttttgctgttgttgttcaggcggagagggttccctgcctaatctaattttgtttctcctttctttgttacaaacagatgtcacttttacatctgtggctctgatcaaatgccctgtgtctctctaaccaacagcccagcagatgttactaccattaaccaaactccagctgaagataacagacagctccttctgctaattgtggctttatatgggggagagaaaaatagggggaagatggctgggaccaggtgtgtcccctaaagaggtccttaaagaacttctacaggggtcagcagcccaccgccaatatagagcatttatatttgaagtacctccagagtaaatccagatacacaaacaccacctagaagtcatctgtcaaactcccacccaagcccaccctgctaaccaaacacgaaagatttttactgtgacagcctctctaacattcagtgtttgcatagaaaaataaagcatggtaataatcaagagtaaatgctgtgcagaatggaagataaaacatataaaattaacttatctatatctatatagagataccttcttgtaaatcccttaaaaatggaatctccacagttgattgcccatgttttctccccttgataacctagaaccttctgggtgcttggttaccatcctatacacatgttataaacaggtaatgggagaaacatgagtctatatgctcccatctacatgcaaaagtcagtatccaacccacagtcctcagagacctggagaaaccctgccaatgtcgtcgtcgtcgtcgtcgtcatcatcatcatcatcatcatcagatatcatttccccctaatccaggcgacttaaccatctctggtttctttcccagtgcagagtgagttctgggttgcttgctttgtgcacgttgtcaaacagttaacaattattagaatcatggtgtcaggaggttagtgacaaaaactaaaaaggtttctattgggaagtgtgtaaacttgggttgctttgcaaatgttgtacatagggtttttttttttttttttttaaagtcagatgcttagtgaatacttgggtttgagagttttgtggctcccttgttttaggttctgggagttggcatcgtgatgaaatctgtgaggattattttcttggtgcaggtaagcagggaaattgcagtctgcagtgttctttgtgcagagagagccaaggacaaattgcaccctctgattctctggttgagagaatgccggctctgagatccatcaccaccaaacatggggctggctgtgtgtggacgattcagatgcaacattaaataaataaagcaaccaaacagaaaattcctctgaaaatctccctgcagcccagtgtttaacattttcttcacccctgtgtcattgtgccttgcctacggtgaaacaccctcctaggagtgaggcatgaaggagctgacaagcattttcccatgaatcgttgctacaatacaatggcattttgtttgcttggtttgtctccttgtctcctaacattctttctgactttcaaggaaaaaaaggagaagaagaagaggaagaagaaaaaaagagattctcctatgaatggcaaagtaaagggaagaaaagtttcttttaacgggtcaacctttttcatctgatagcatgtaaacattttctcccctcgtggtatatgtgctggtaatctggtgggttttttcctcttgtcatttaaatagccctctcccacccctttggccacataagatcgcctttccattattgatttaggaaattggcagggggaataaaaagtcaaccgtgcacacatactaagaaagggaagacagaggaagatggatcaaaccatccatctctccatgtggccatttatctatcaatccatctcgcttcccacccgcctctattaaaataaatagcaggcactgtacacactgctggttggctgaagttgtgatctggacaaaaggtctgtttgggaaaaggatgctgaacctctaattctatttgtgccggttgaaaatcaggaggggtttttctacacttcacttttattagattatttcttatagatggcttcttttttcctcccagacgcgtggtggcggctgctgaagcagttggtctatagttggaataattaaattaaccatttggtacaacttttaggggagcgctcgcgtgtagaaagcacaactgggacaaagcagggaagctggggctggggctctgggctggcccattccccacaagcctttcatcgcagccgagcagaatcaggatcctgagccacaaaagaggggccagggctggggacagggcgagtgggagggacagtgacactgaacaaaataaacgtacaaggcctacaaaggggaaaatgaagtcaagagcgtttgctcaaccaaccgtgcggttctagctaggagaggtcttcaaggaggcgcacagcacatgggtcgggtgaggatgggcaccagggggcgtctagagagaggcagaagaccgtccagtcggctgaacagggctggcaccctgaagatggctggcgcgaccaagtggaggcagcttggagccagactacgggagggacaagccttgggctggcgccctacgggtggcttcggctgggcttgtccctcctccgagggcatttcctgctcttccccccccaacccccctccccacttgtccagcccgagggcattgaacaggatagccagaacctctccccaaactccttttcaaagaactgccagtgcaccataactttcaacccggagtcggctgaaaaggtgcctgtggaggctgttggaacacagtgtagaaattcgtggtgtggagggttcctgactctgttgaagagcagctgtcaggagcctgggtgaagcttcgaatggcttacaccggtcacacacctcagacaggctttgaacctggcctttgccaaacctaggccttagagactaaacgcatcctagaccccctaaatgtctctcctgcaagaaaaaaaaaaacacttaaagcccgtctcaaccaggcgcaggctggccggtgttaatctggcctaacctggtctaaaccctgcgctttggcatcgtcagagcgctggcctgagctaaaacatccctttgagaaaaaccaacgactctgccctcctttctggcctcagccctaactcccagggaacggagaaacttggacaatcagcgccttgtgcttgttggcttacccccccccacctctctgaagtggaaggcagtgggagaaaaccagcgagggaaattccatgtggatccgtggggtacacaggcacctcccggtccagatgcagattcatattcatgagggagcgataaataaagacaaattcgcgcagtaataacccttggattcgcatccgtctttgctggcctttaggttcagggactgaagacagatgtttgtatccccttttctcctcttgtctggtgaccataaagaaaaaccatttagagtgttgcaatttgtttcccgccgcagtcaaaccttgaacgcatttattttcatcttaccctcgtgcacaaaaaaagtgcacgttgctcaccaagggcccttctttatcaaatacgcattgtacagcgtacaactgcaataaaactatcagctctccccataaaactatcaccagcttcctcgctgggtctccttgcctgaactcgccagttcagcgctcttccgtacagaggatgcgcaaacacctgggccgaggctgaaaaggctgggggccggtgtcgctgtgggtttaatccattacagcgtctgcagcggtttagtgtgcaataaagtagggtggcagtggagagcgggcgcccatccactccccagcactagcatcgaattaaaccacttagtttggcaaacactgaacgcctaaatgcccctataaagactttatgagtttgttactttaattactgacttgttacagagcacataaagggggtaatgaatgcaataaaactaattatctacacatttaattcatataaaatatccagggtttgtttacaccgcacggcgattcaactaagcatttcccccctcttgtccaccgagaggaaggatttaatgaaatatttccctttattctgctagagtctaacgaaccaaatgaaaattaccctccgcttaaatcatagggccaaggaggtccacaaatcacggctggcttctttgtttgcgccttgttgccaggacccaagagcccgaggaatcgaactaggaaagtgcgctgcttcgagccgttgccttgtttgcttaaattgctccgtgaagtccaaaaacctaaagggcaaacaggcagcgatcctctttgggaaactccaagtctggaggggattgggacgcgaaagagagtgcgagagcaaagggctggaaaaggagacccccatttgggtacatttcgtgctgggcttggtagctagcgagtgattaaaacgaacctccaccgcgggaagtttcatacacgccgatgcaaatctgaactaacgcaggcagacacagcactgctaagcgcagagaaacgttcagtaggaaatccagatgtttcacctttgagagctttactcggttgtttattttactcttgtaaaggggctgtctgcccacgtctttggaaagcacattaagcttcgaggagaaacacaattgataagatgctattttttccaaccccttggactaggtgtattttaaagaaatccgcttatccttatcgttcacataaaaccctttggcccacttacgctatgttacagggcgcctgagtcttgccaatgtcccagtcctttatagcatttcatgcacttcagggggtaggcttgttgttaaattgagcgtgtaacactcttacaaaacaggttttctatgacatcaaggtttcttctccctaaccaagaaaaaaaaaaaaaaggacgaagaaggggggaaacacactatctcaatttatgcctaaggtatatgatcagttaaaaaggcttaaaagctcttggaaattggatcagggaaaatcgtcacccaactttcattatttccaagtagcgtgattgaattaaagggcaggagctggttagaagggaggatcaggggctcggtgcgtaatggtgtggtattaaattctaattagagatgcaggaatcaatgatagggaggttggacagctcagttccccagtgccagcccaatagacggatgagttattgtcatgtaaaaagcgccagcaataagaccaaccgctttgctattgtccaagtggaaagagccaagtttattatgaggactatatactctagagacctcagacaaggcatctcacaggaggctttttcataaaactaggctcggctggtagtaaggaggccagtgtggaggcaggcgttgagcagtgcacatctccccactccagccaccgtctccacatccatcttttatttcatttttccacttggctgagccatccagaaccttttcaatgtataaaatggaatattcttacctcaattcctctgcctacgagtcctgtatggccgggatggatacctccagcttggcttcagcatatgcagacttcagttcctgcagccaggccagtggcttccagtataacccgataaggaccacttttggggccacgtccggttgcccgtccctcacgccgggatcctgcagcctgggcaccctcagggaccaccagagcagtccgtacgccgcaggtaaggaccgctagctctctcagcggaagaagctgcctttccgctcgtatataggaagccttgattgcatttgaaaatggaaatgtgtttagtatttaccaaacgaaatttgcttacacaaatgaaagaatttatcacgttagaagcgattgcagggaggggtaattcacttacagggttacactatcctagtcacacccgaaccgccaacaaaattatcttaagctgccaaaatgataggcataatttatttactttgcgatgagacgtaaagcttagaaaataattaaataacaaagagtaaagctcattactggcggtgtctctttttttaaaagaaccgacagcggctcacacctctttggccggtcatttttatgatcatttcttgaatttattggttttctttacagcactatcccccaactttgcggtatcaagttctgagaattgaaaagttgcaacagtgggcgtgagtggttaacttcgttcctggctttctgatattccaactaatgatggttttggactgttttcctgctgaatgaactatcctccatttggggcctcaaacactctccaacttgctatttcatctcacccaaaggcacttgggccacaaaaacaggcacaaagttacactcgcgcccctgtttctgtatgatactaatttgctgggttttcttggcaggtcgccgtaactaaaacctccttctagaagtgcctggtgtctgtagcggctcccgggctatctgaccttggtccccgcgttctggttcagtggcccttcacatcctgactgttttgctcactctagtctcctctgtcatcctctagttccatacaaactcttcaccgaccacggcggcctcaacgagaaacgcaagcagcggcgcatccgcaccaccttcacaagcgcgcagctcaaagagttggagagggtcttcgctgagacgcactaccctgacatctacaccagggaagagctagcactgaagatcgacctcaccgaggcgagagtccaggtacggggagaccgagtgccgcagcagcagtgagggggtgggtgctgacgcttacggttccaaagggacccaggcccgtcacagaaatgggatttggagtgttatgcgcacgagcggggatggggggtgggggctaggacacagactctaggtaatttattcacaactgcagtgtttcccaccaaagcaggggtttgggagtttgaacgaacacggcttttttggagagaagtgtcccgtgagaggaagattgcatcctctacctgtatctatgtcagcttaattgcgtgattcgtttgcccacagtgcctcttaactcaagcgcccttaaaaaatctagtgcccctggcgcaaggagtaatttcctagtaaccaggacttgaaatagattcacgaaggggttgttactccattagagtcagaaacccgcaccttactatagctaaccaattgggagcaaaggtgctttctggagctggtccccctagctgggtataaggtcggtgagcactaagaaggttcctctgtggatggccagtggatccgttgtgtcaccaaagcgaaaggcaccctccttccaccattagacctgagaagcctagaagtaggtgagacgcccgtttaagagtacggaaaaaaaaaaaaagaaagaaagaacgaaagaaagaaagagaaaaagaaaaagaaaaagaaaaagaaaaagaaaaagaaaaagaaaaagaaaaagaaaaagaaaaagaaaaagaaaaagaaaaagaaaaagaaaaaggcttcacttttagggccttcctgctatctttgtacttgtcccttacggtgtcatttctttggcactttcgtttgggtcctaggaaagtttctcagcaaaggcagtagcagcgagaagggcagacttgtcggactctgctctgtagtgtctcaatggtccattcatacagcgaagtgtgtgtgtgtgtgtgtgtgtgtgtgtgtgtgtgtgtgtgtgtgtgtgtgtgtgagaaacagagtgggtctcgagcgccactttggtttctggttttgttcaccggttcaatcgcctgccctctctttggcaggtgtggttccagaaccgccgggctaagtttcgcaagcaggagcgcgcagccgccgctgctgccgccgccgccaaaaacggctcctccgggaagaagtctgactcctcccgggacgacgagagcaaagaggccaagagcactgatcccgacagcactgggggcccgggacccaaccccaacccgacccccagctgtggggcaaatggcggcggtggcggagggcccagcccagccggagctccgggggcggcgggcccggggggcccgggaggcgaacccggcaagggcggtgcggctgcggctgctgctgcagctgcagcggctgcagcggcggctgcggctgcggcggcgggaggcctggctgcggccggaggccccggacaaggctgggctcctggcccgggccccatcacctccatcccagattctcttggggggcccttcgccagcgtcttatcttcgctccaaagacccaacggtgccaaagccgccttagtgaagagcagtatgttctgatctgcgatctgcggcggcggcgggcgagcccggggcccgggctggcgagtgggcgagtgggtagacccaaggctagtgtcgctgctgtcagtggctttttttttttttttcatcgaaggcctaaaatgatcgcgattcgaaaaaacaacgagaaaatgacgtcgctccatttcaaccccactcctacccctttcctcacccccaaacaaagcaaaacaaaacaaacaaaaatcttcacctgccttgggctgcgcataggacagggctccacctgctgcccaagggatgtgagcttggacttcggggcactctcagggggctgtgtctgagtgacgggtgtatgtctgtctcagagaatgtgtgtctgtggccccaagtaggtgatagggagagacgggggcaccacaaccaactcagtgacttcttaggaaaaaaaagttggaaagcagcaaagatacaaaaggaaaatgaaataaattacaaaaagtgtttttaaaagatccaaatggagggaataatttgaaaatacaaaggagacgagggaggactgtggctggcgctgaggttttggtcttgcgaacccctaaattctctcgctcacgactgcacagactgtcttgcggctcctctataggaaagagtactgatgcctgtccggccccggttcccctcaggtccctgtgctctggtcattgcagtgatggctcactcagactgtcctggcagccaaagtgactttctggagctctgcttgcctgtccccacctcgctggaaaccatctcgccattagcgcaactgatttcccacactctgctctggcccgaaccctaatcttcgcagccgcttggccctgagagatgatgccctatacaggagatcccttctcaccctccagctctgcaaaccgtgtctcatgtttcacagcgctcctgttttttctctcccgccacccccaccggcatttccttcttccaccagctttaatggaactttttttggcactgctttgcattggagtcagttgtagtccacatagctggctgcagagaaatcagtcttacccagcaaggggaaggcacacacaagtttgcagaaagtgtctcagatcgcgtttctgattgagtgatccgagctggactcctcctgtagggtggacagactgtatattgataattccttctatgcgcagtttagacatctctgttgggctttttttttaaatttttattttaaaaggcacaaaactatagatattagttgaatgttgaggctttaactttttcggtgtctttctacagctgtgttctgtgactcaattgtatcgtgttactctcagtacagaccgtctcctctacgtgaccgtataatgttttttctcctcttgtagtctttatggtgtgtctttatgacgtaataaggttctcacgggttcgattcctttgtgtttagagagaccaggttcagacaatggtatatatttttgttatcaggtgcatgtctgtctgatttccttttcttctcgttgggactatgtttgtgaacatgagcgtcataagttatgtttcagattttcaaatttatttatacgtgttataatgaatgcttctatttaaaggggaaatatttctacatgtgcatatagttttccaagagtgtaccattaacttgattgttgataataaaaagaaaaagcaagtctaagcaagtaacctctctggactttctcttgagctttcttatttaaatcaatctaattttaaagtgttaagcgcagaagaactggtagtaagtactgggagggcaactcctcgtagcatccaaattgagccaaacctgaactttagtgcttggggaagaggagtacttctgctctgtaccaaattgtttctcagtaggaacatccagcaccaataaaaatgtacacatgatgttcctggtcaccatggattatctgaggagggttatctgaggcaggatttgggaactggtgtctgaagggtacttgaagtgaaaactagggctctgtgtacaggggtcctgcaggacttatagcatcagttctgggtgatccagagtctccaggccactgagagttatcctggtacctctctgtgggcaaggcattgcttgcagtgttggtgtgctggggaagcagcaccatcacttgaactttgggaggcacagcacataacaatagtgcttttctacattatctcctccatgtgggaccacacagcaggtgcaactcctattctcattgccttttgaatggaggtgaggggacaccggaaagggtgaccagctcaggagacctcctattgatgtgttcgtaatgccaacctttgaatagaactctagctatgttcttgaagagttaacttattccagtagttctaaaagtgtagctctcagaaccccaagtatcagcaccacttggggatttgtgtgcgcacattcttggatctcgggaatcttaactctgagtaaggttgagtgacaggtttcaaccaggtttactaagattatgagagttgatgaactgtactatataacagtatacttcgtaagaaactcaaagggaaagtttaaaatcctgagtatattggaagcaggtgtatgtgtgttttctgatagctatagtggttcccttttaaaataaataggtcatcaagacagccccaggacaccactctgcctctttttctcttgaactgtttgagtcactttccaaacaggagtcttatatgagtttctgacctttcactttgtttttgactttgccttaacaatcaacaactcagtccccttaccggaggcatagccatagcctgcatcctctagtctgaatataagctgctgctttgtttgagcctatcagggctaggctagctagttcattcagagcttgctgaaccatgattgtgaacataaatcatcataaactatacttctgattttcaagtgtatttatccatctcatagtgattcttttatttgaaagggaagcatttcaaacattatatgtgcatataccttcccaagactgtcaaaactttgggtcaaactgagcttctgggtatctttgaaaagggctttcaaatactctttgaaacaaacaaacaaacaaacaaacaaaatgcatctctaaatgtcccttagtaaatgctaagtctacattgcttataaacagagcctttaattgttctggtccaaataccagtgattactagatgtctttgggctcattctttagttataaatgtaactcagaagcaaagaaaaggaagttattgattaaagtgtatttaaagcaggtaatagtttgactagaggaagattgtcagtgaggcccatttggtaaaaattctttgggcctgggcagggccagtgggacaagtgccttagagaaggcaaaaccagcagagagaaggagaagatgagagacatgaaacgcacacatacacacacacaccacaaaataacaacagcaacaacaaacaaacaaacaaacaaacaaaccagtgaagcctggtgtggcggtcatgtctgtaaacctcagtgctggagaaacagaggcaggaggatcagacagcctttgacacatgggttggatccagcttgggttacatgagactgtgtctcaaaaaccgtgcgttaaataaatacatgaggaaacatcagacaggagagcttttggaaagaccagtgaagaccctggagatctttgcagatgggagccaccggggatgggtaaaagatttcacttctcctagtttagatctactttgagtgtcttgttgctaagacaagaaaaaccctagggctgggggggctggtgagaaaactcccactcctcagaaggagctccccaaagggttacatgcaacttgagtcacctctgcttctcttaatgacctaaggaagacattgttggaaggtaagttttctatcaaatgtaaagtacagtccctgtaatgtgatggtgccgactggcaggcaggactccgtgtctctcacattgtgtcatctccttggagtcccgcacagtgtgaacaagctcactctcactttccctctcctgtggaatttgcattttggctcatcaagccatcccttttcctggcaaccccggagaccacatgtgacttcacaaaagcaccgtgaattgctgccagatggccatcctgaagccaagtctcttctaaaacagtccagtccagagagcccaagtggctgcagagagcaactgataacccacagcacaatccaggtgcttctctgcacttacctcaaaccttgaggaaggtgctgtatggctaactgggaaatgatcctaccttcaagacagatatttttggaatgcaaaataccctaatacttttgagcctgatcccccccaactataaatttgaataataatacagatcgagggttggtagggtgactaagtaaatccattacaggaatggcagtcagtttccagtagatgataatgatgatggctagatctctctctcccccaggtctttttcttgatttttctagctcgggtctcagttaccaaaaatgtttagggacattcagtattgaagcatgggatggtaaccatgactacagtgaacggttaacactcacacaggaaagtcaaaaggggccctgccaggttgctttctcttcccagtgaggaaaggatggtatcttcaaataagtcagcagcatgggcaaataatatatagagatatagagatatgattagatagattagatgtagatatatgataagatagatagggatatgggcatagatatagctgtaaagtataagtgaaaaggtcgggacaggagaacttgggtgagggaggtatagcaataaacccgaatcatgcaagggctttcctcactatgtgttaggtactgtttaaagcttccaggctttaaggaatttagcttccacaattactctatggggaaaaggtctatttttcatgtttttcttaagaaggaagtgagtcactgaattgttaagcaacatgcccagggttagtgtgcacgagggatccagtcctaactgatctgtctctagagttcacgttctttcacatggacaggaaaggcttcgttttagcccatgagattgcatgctgtcagacccaagagaccttgaaaggcaggtgagtgttagaaaggatagcagaagagtagggctgtggatggaacttccagtgaagcccaagacctgaatgggagcaagctggaggattctgaaggagggagtcagttttctgcaagacagcctagtcccagttacatctccacataaatagacaagacaaggagtagcccgaggcaagaaaggaaaaagagtattcatattataaagggcagatcactggtctgtcaacaggaacagacacaacccctgtggctcatttatcatcatcatgacagacacatggctccgttggagcccttcatctttggccttgatttcaggatggctgtcctcaatccgggtggctgtataatgatgagccatcttcatacaatagtgtttccctgtgagaaagcaaggcatcatgcaaagacctgtatagctcagtatacaggcaggcaggtgggtcagaacctggtttctatcactatggtagacattctgggttcctgttattttagcttaactgggggtctcctcactttggaattcatgtgtactctacctagagcataggaacagagcagtaacctccacatgagcctaaatgatgaacttaggcaacacagataccacagtgattgtcagtaccacgacttggtcatcagtagaagttacagacacttgcgtttcatggtggaccttctagctgtcttgacatatgatttacattcattattatttattattatgatacttactagcctagttgctgtaactcattactgaatgtatcaataaagaggcatataccttattatatcaaaaatcgtttgcattttttgtggtgttggagatcaaatctagcacattctaggtaacggctctctactacagagatgcaccccagttcattacaaacatcttctgacaacgttaactggcttttctcttagaaccatgctctcttcctcagatatcttttgtttcagttgattttgttttatttacagtttttcaaaatggcaaagtttgcacgtatttattgtatacaatttgatatcctaaactatgcatacattataagaagattggtatctcaaccttacttacatactcacagttttatctatatgcatttctttgaggtgagatcacctaaggtttatccgttgtttttaagtgtagtcaccaagttgaccgatagacatattcaatgtttagaccagtgtaacttaaatcttacagtatttgatccatatctcctctaatctctcccacttcatttggtgttttgcattgaagcatgctgttttgactagactcattttgctgggggcccatagaacacacacacacacacacacacacacacacacacacacacacgaagctacaggccagcagatgagaacatggaatcatgtctctggtaccagaatatgtaatcattttactttataggtacaagcaacatcaaagaaaattcaatcgtatcatatgcttcttcaaaagataaaacagaataaaacaagccctcaaagccatccaaagaaaactctaagacagtgattctcaacctttgaccctttaatacagttccttgttttgtgatgacccccaaccataaaattattttgttgctacttcctaactgtaatcttgctactgttatgaatggtgatgtaaatatctgatatgccagaaatctgatataggatccctaagaaaggtttgcaggatctccagaagggttgagacccagaggctgctgttcctggacttcacacgttcctggctaggcagaagtgctagcccagggtgaggagacctgaaggtgtctgcaaatcctgggcttcgactctctatgcctcatggtcacaggatcctgacactgtgcggaagctcagcaaagccctacaggaagaggacagtgttccccttcctcttccacacccctgagatctgacgcatggagtcttccccaaggttgcacgattaacaacacggaagcaaggatctcactcaaagcttagcctgcaaccaaattatctaaacagctttaaaaagaacacaggaaagaaagtttgcatcaacctagctacttagtctctctctctctctctctctctctctctctctctcacattttgaatctgaagctatttggttggttgaaacatcccaagacccactgctttatcactgttactttagctatctgtccatgtcaaagacccccttatgggaaaagccagacatcacagggaatgaatacttgctacctgggtgtaatttcatcatggaactgagcagactactgcttgctgggtggcttcttggatgatttaagtgtcagcttccagaacaggaagagcttggtgtaaaacttaatttctttaaggctgtcgtgatgggtcactgtgggcaaaagtggaagacaaacctggtttgcttgagatataggatattgagcctcctcctccacccccacaactttaaatttagtttcggtgtgtgtgtgtgtgtgtgtgtgtgtgtggaggggatccagagccatctctccagcctagatgcagagcgttttaaaactattcaatgtgtcacatactcttagccagtatgtcacatactcttagccattttgcacgtactgtcttgaggcagttgttcaagcaagtatcctgaatgcagatgtctttgctctcattttacagatgtgaagggcattccaaggacagaaaagaactacttgctgcagacttcaaagtggataaggaccagggctgagttccacgcccactttgatactgaagtcccaacaggaggagcctcccaggtcaagaggagtctttgcctagaacacagcactcactgcctttagctatgcctcaggaaagtgttggcaagagcagaaagagggacagagatgtcctggcatcccttatagcagggaggtttcaatgtgtgaattagactcagttcaaaatacagactcaagcaagggactacctcttggttttcgtccacatcactgatgtcgtgtggccataattcacatacactttctgcctcagtcattagtcaggccacagtaaagctgaacagagaagatagcaaaaaaaaaaaaaaaaaaacccaaaaaccctcatttttcttttactgtcttctaaatcaattatctctcttttgataatagaaagaatgtattgttcttcaatattattttgaaacactgggggacaatcataaggcatgtagcttttgctgaatattatatgatttccctctagtcttattgttgaaattccagggacctattaaaatatctagatattttagcagtttatattctggatcacatattaggaccattcttgcacagaaactcctcaggggggtagttattgtctttggttgaaggaaaaaaaaatatcacaccaagacttaaaagctttttcaaaatgtttacaggaattcttcgtaagctgaaaagtttcattctgttgacttgggattcttcggtgtgtagtctgtgatgctccggtgctctttcatgtacaattacaaagctgcctcatcactttgttaagcgctgggctagggattctcaacctgtgggtcacgactcattttggggagggttgatcacagggtcgccacaggggtcacatatcagatagatatcctgtatatcgatactttcaagtcacgacggtagcaaagcatatcagatatttacattgcagttcataacagtagcacagttacagtcatgaagtagcaacaaaaacaattttatggttgggggggtcaccacaacatggaaaactgtattcaagtgtggcagcattaggaaggttgggaatcactgctctggactgtgcagaggggcagtgctggtgcatggtcctcccagtgattacatattcaggggacctttgctctcacatgcagttcacagaccctaaatcccattcatgtgccagccattgttggctgagcttgtggctggtatcactgggccaggcagtccagataggagcacacttaggtaataacactgcactcactacttggtcttaggagggaaccgttcagcacagttagtattaggtttggacaagattagcttctgtgcaggtcacacctgtagaagtagtttggaatgagtcatttttttaaaaatctgaataattgagtgatttcaaattttgaacattgacataggtacgatgtacctcgggtaaaaattttaaatgaccgaaaagttaagtgaggtgtctcccccccccaaagtttctagtatttgcagcctttgtctccttcagtcagtgagggtgcatgccttgatctcagtaactgagaggcaaagatcaggaagattatgagtttgaggtcagcctgggttataatagttactgagttacctagttactgtgtcccaggataaaaaaaccatcagtcttctgtctttcttcatttatctacatgtccctgcccatcccctcttgtgtatgtgtgtgtgtgtgtgtgtgtgtgtgtgtgtgtaaagacagagaactataaattacttaatagctgactcagaagtgttgccactgaagtctataatcactttgtaccaccagtagaaagatatccattcaatatttttattcccccggaggcaaagttttgatatctccatcaaaactcatcttgaaatttaatcttcactgtgtggttttaagagtgtgggacacttaatctgctacatttggcgacagggactttggaaggttattaatacttatggaggccaaagggcgggggtccctcattcaataggactatggcttcataaggggaagaaatagctgagatacagtttgctctgccttattgtggttaccctgtgttcctcaggattctccagagcctactccagcaagaaggacctcacgagctgctgctacccagccttcagaagcatgagtcaaggaaacatgtcattcattcattcatatatatatccagtctctggcattcaataacagtaacagaatagttaagaagagaaacatacaaatgggtaaacacaaaggctctgatggctagactttgtgccaacatgactaaatttagagtcacctagaaaccctaactctggatgtgcctgtgaaggtgtttctgggaaagtttaatcaaggaagaagactcaccctaaaccactcctgcatgtagtctggatgtccaactgaatagaagtagggaagtaagcaagaaaaccagga

SEQ ID NO: 668 - DNA, 1590 bp, Mus musculus
aaagagccaagtttattatgaggactatatactctagagacctcagacaaggcatctcacaggaggctttttcataaaactaggctcggctggtagtaaggaggccagtgtggaggcaggcgttgagcagtgcacatctccccactccagccaccgtctccacatccatcttttatttcatttttccacttggctgagccatccagaaccttttcaatgtataaaatggaatattcttacctcaattcctctgcctacgagtcctgtatggccgggatggatacctccagcttggcttcagcatatgcagacttcagttcctgcagccaggccagtggcttccagtataacccgataaggaccacttttggggccacgtccggttgcccgtccctcacgccgggatcctgcagcctgggcaccctcagggaccaccagagcagtccgtacgccgcagttccatacaaactcttcaccgaccacggcggcctcaacgagaaacgcaagcagcggcgcatccgcaccaccttcacaagcgcgcagctcaaagagttggagagggtcttcgctgagacgcactaccctgacatctacaccagggaagagctagcactgaagatcgacctcaccgaggcgagagtccaggtgtggttccagaaccgccgggctaagtttcgcaagcaggagcgcgcagccgccgctgctgccgccgccgccaaaaacggctcctccgggaagaagtctgactcctcccgggacgacgagagcaaagaggccaagagcactgatcccgacagcactgggggcccgggacccaaccccaacccgacccccagctgtggggcaaatggcggcggtggcggagggcccagcccagccggagctccgggggcggcgggcccggggggcccgggaggcgaacccggcaagggcggtgcggctgcggctgctgctgcagctgcagcggctgcagcggcggctgcggctgcggcggcgggaggcctggctgcggccggaggccccggacaaggctgggctcctggcccgggccccatcacctccatcccagattctcttggggggcccttcgccagcgtcttatcttcgctccaaagacccaacggtgccaaagccgccttagtgaagagcagtatgttctgatctgcgatctgcggcggcggcgggcgagcccggggcccgggctggcgagtgggcgagtgggtagacccaaggctagtgtcgctgctgtcagtggctttttttttttttttcatcgaaggcctaaaatgatcgcgattcgaaaaaacaacgagaaaatgacgtcgctccatttcaaccccactcctacccctttcctcacccccaaacaaagcaaaacaaaacaaacaaaaatcttcacctgccttgggctgcgcataggacagggctccacctgctgcccaagggatgtgagcttggacttcggggcactctcagggggctgtgtctgagtgacgggtgtatgtctgtctcagagaatgtgtgtctgtggccccaagtaggtgatagggagagacgggggcaccacaaccaactcagtgacttcttagg

SEQ ID NO: 669 - protein, 340 aa, Mus musculus
AVHPLQPPSPHPSFISFFHLAEPSRTFSMYKMEYSYLNSSAYESCMAGMDTSSLASAYADFSSCSQASGFQYNPIRTTFGATSGCPSLTPGSCSLGTLRDHQSSPYAAVPYKLFTDHGQEKRKQRRIRTTFTSAQLKELERVFAETHYPDIYTREELALKIDLTEARVQVWFQNRRAKFRKQERAAAAAAAAAKNGSSGKKSDSSRDDESKEAKSTDPDSTGGPGPNPNPTPSCGANGGGGGGPSPAGAPGAAGPGGPGGEPGKGGAAAAAAAAAAAAAAAAAAAAGGLAAAGGPGQGWAPGPGPITSIPDSLGGPFASVLSSLQRPNGAKAALVKSSMF

SEQ ID NO: 670 - DNA, 24888 bp, Homo sapiens
aaagtgtgtactttgtgaccaaggaattccgtttttaggagttaatccttgagcttcaaatcactaacaagtaaaaaaaaaaaattgatcctaagcatatggatgcgcacagagatttagctaaaagaatgtccaagacaaaattttaaatatattttaaaaattagaagcaacttaaataccaaaaaaaaaaaaaagcaaacaaaccagggttgcctaaataaactatggtttatcttgcagtggaatatcatctagccaaaaagatgacatgtcaggatattttatgatatggggagatgtttataacataaaatttaagggagaaaggttgatgtttttaaatttaaaaaaattaaaatttttctaaaagtgagaaacatgaacaaaacagttgatagagaatgtttctcattttttaaaaaaaatgtatgcatgaaaaaaaagaccgaaaaattatatgagaaagttaaattaactccttttattttattctcctttccgcacacatgctataataatttccataatggatatttattattttaaagtaaaaaaaaggaagtaatcaatgaaataggaagagggtacacagggccaacctggaccacatcacagttttctccctttgtcgggtgcagcctgttctggcctgaccgcctctcatcagcaaccactgacctccccttggaggggctttgctgccccatctctatgtgcagagaccagggggcagcagcagtgactcttagggggttttcagcaggtaggaggaaggctcctacctgcccaatagctgctaaaaaaggaatttgccccaagaatgtgggcctggccaaggcaaggccaagaagtccaatctgtcctcagctctgtctctgcaagggcacagtctggccccaccctggggttgttttagagcttggtggctcacctctcagcagttaacactgttcattcaagaggtttccctggggtttgggttaaagccgttggcctctgctctgcagtctcttgtgtgactcactgtgctgttttgttcattattatgtactacttccttcctagcagcctccctggctcttcttagaaatctcttttcctccttctcttcctcaagcccaatttcaatgataaagatttatgaataagcaagggagttggcagtgtgtgtgattagaacccttagccttagagttctctagactgcggtttaacttaccagagtaaacaaatcagagagagaaacagaaaggggagacagagggagagggagagggagagggagacggagagggagagggagagagagagggagagagaaaaagagagagagagagaagaaaagaagtgtgtgttttaaaagaaaataaatattatgcattatatctaacaggggaaatactacaaacatgcatcactgtgagcattttattgtcttctggctcctaaggtctaggacatgtggtgcctgtccctgagtactggattgcatttgtcctaaattctgaatcagctgaaatacacattaaaatgcatgatgctgcagcaccttactggcaaaccccacaaacctcctaaagaaaacaaaatgagacaaacaaacagcagcaccagtagggtctttcgaaagcccagaaaaagaaatatttttaaagtttttgaattctaactcatttttatatgtatttcaaggctgagtagtttaagacattgaatgattccagtgttcccgacatgcctttcagttagctcccttgctgtgctgacgaagaatgcaagaacatgttattggagttaattctggatatgatggaggcaacatagagcccttgagtaccaggaccaaggcagctttcttgtgggtggacgaaatcggcatcttcatggtgtgacaggaacaacataggaaagagctgtctaaaatagctgcccccacttctaaaatacctgctgtgtcaccaccagtactttcttcctctgtgatactgggctctcggtatcttcacttgaaaatacacctggtggagataacacacaaaatcctaagaccatcatgcaaaggatggaggaacagaagacaatcattcttctctctcctgttcttcatggagccctctttatgaatctcaaaatactactttgatttcccactgtacacactgtcccttatgtcctttctttcactaagaatacatgtagagaaggttcccagacaaccccctctccaccaaatcaatgaacagaatgttaggactgaaaagaatttcacaaaattcttattctgatccctgaagcaattagggtctttccccagcttaagcagtgacaggtccaatggccagtccatccagtgttagttctagaccctgcaaggtcagcacccaaactttcttgtgggtgtccccactttcaagaccagcggctccccttcctctaagatgcctgcagttcttgggtttgcttcatctcaaaaattagctttcaagacaatatctaaaccacttctactctaaagtacagatttctagcacatagtaggtaattaataaatatgggttgaatgagtgaatgaatgaatggataatatcatcaagtgctgccaaacccagagaaatatgttattgaggatcactaaacccaagttactgaagtgaaggtcttgccagaaaatgtgagagagggtttttgctttgaggtatcttcctgggtcccctgaaatcccagcactgtgcaggactgtaggttctccctgtgctaagactctacttctctaacatctcttgcatccctttacttctctttgtcctatactgctattctctggctgaaaaatatattattccttaactagcattgtgccacagccttctaatttatctcttggcttcccttttccatcatgccctcctccccaaatcacatgaccttgcatccataatcctgtagggtctgattccagatctattgctcttatcttgtatttcatcacacacctcttggtgtgttccagcccctatcagttctgctctaaccaaaagctaaactgaactacttagaaattctcaaacactctgtgctctctctagttttggagtctttgactgccgctaacatactgggaaacatcttttccacttcatcaccatttgctcactgccactcactgcttagtacccagtatagatgtcacctcttccagaagccttccctgagactctaaggaaatatatgtccattgtgggtcagctgagatctttacttcatgatgtcctcactctggaactcaggctaaccaagcagccaccatctggagcatagaagagagcaaaagagggagattggagacttggatgctagctctcaaagcttccacctggaagtcacactttaacacttccattcaattttcattgctcaaagtaagtcacatggccatatctaacttctagggggcagggaagtgaaatcacactatatgcctagaagtgaaaagaaagagaaatgtttgtaaaacaaccctagtgatttacatattcaagtaagtggaggcccggaaacccccagtggatctgataaccttactgaaaaatatttaatttgcatgagggtagtggaagccatattacaggaagctatggagtgatcgagaagtgaagaaataataatagtgagaagagatagctccttcaagatgtttgactgtaaagggcagatgagaggtaagtggtggtggtgggttgtggccaaggaaggataacaagttggttggtaatttgtatgagtgtggtttgagcatgtttagagaacaacaggatatgtccagatgggcagatgagagtttgaagatccatgagagaggaagaattgggtaggatccttgagctagcggaagggatcaaactccaaagtatgatagagggattggcctcagatgagactaggcttccctcctccaagtagcagaagcaatggagaaagagtgagtgcagaagttgatcgatttctagattgaaacacaggaggttgagggaattcttgttcagtggcttctcttatcattttgaaattcatttatataaagctgtcaaaatgtgttccacttaagagaaatttaggaaatcattatgagagagagagagagagagagagatgctcctttgtaacacttgtgatttcctagaacaatggttaggaggatgttagcatatctcacctccaccccacccccaccccgtgccacaattgagcccaattttaggcaccatggcagttttaattgccaaatgcaatctcctaagcacatgcatgagcctgatgaaaaatggttcatctatagtagttggaagtaggagtttgaatatagctgttaaatgaaaatctgtttctgcacaaacttacccaaaaatataccgagatattattaactctgaaggctttgcccttactttcttcttgtcttcaacctgaaaatgatttctcagcccatacgagactcacacagctcaggtcattgcttggctaagaaagataatcttgtctgaccattttctttggagcataagaagatgccttcaaggtcttaggacattgctaccttaggatgctgctcctccagttattttgggagctgctggctcaaaaaaatcataatcccctctgcaccctgcaagcttggtcagggctcatgattactttttttcctccttcttcaaataggtttttttttttttcccctgggtttaaacagaaagggcttcctggctaatttaattttggttcccctttgttacaagcagatgtcacttttacatctgtgtcacttttacatcaaatgccccatgtctccccccaccagcccagcagatgttactactattagccaaactccagcaaaaaggtaacaggcagccccttctgctaattatagcattgtgggagtgaagagaaggggaggggaggagtggagtggggctttgaaatgtccttaaaagttcttaaaagaatggattttggagatctgtacaccatcacctatataacacatacacatggggtaccttcaaagttaacccagatacagaaacatcatctatgagttagccataaaagttcaacccaaacccacacagctagcccactgcaaatgcctttcaaagtgagatcaccctgaacatactgacatttacatacaagataaagcaccatattaattatgcataaataccatatataatattataagacaaaacataattaacctatctaatacaaatacaccttccagtaaattcctaaaaaataaaattttccacctggttgctttcttttctcccatttgatatcctagagcctgctttttgatttagcctaccctcttccacatgtattataaacatgcaataggaaaaatcctgtgtctatgcaccatctaaatctcaaagtcaagtgtttaatatacaattcaaggagacttaccaacatcatcatcattgccatcatcataatactggtggctaacagtcactggattctttccatgtgccaagcactgtgttaattgctttgtatacgctattgtcaatcagttaataattgttagtctcacagtgccaggaggttagttaccagaacctcaaagagtttctattatgaaacgtgtatcatggttgctaggcaaatggaaagtgtggtggattctaaaatgctaggaaaatgtagtgggtcatcagatgtggggctgctgtgactggtatgctttctgttctggggaaatggtgtcccagtaaattctgtctaggttattttcttagcgcaggtgagtgggaaaggctgctgtctgcagaaatctttttggagaagcccaaggacaaatcttgtctattctttctcggttgagagaaatgttggttctgagttgagtatgccagacagtaggctagctgtgctgggataatttggatgcagcatcaaataaagcaatcaaaaagaaaattcctctgaaactctcactggtatttaatattttattcattcccatgttattgtgcttcgcctgcggtaaaacagcctcaaaacagcctcctaggagtgaggcattaggaggctgacaagcattttcccatgaatcgctactacaatacaatggcattttgtttgctgttttgtttccttgtcttctaacattctttctgactttcaaggaaaaaaggaagaaaaagaaaccctcctatgaatggtgaagaaaaggaaagaaaagtttcttttaaactttcaacctttttcagttggtattgagtaacatgtaaacattttttttttcctgatagtatatatgctggtaatctcttcctttttggtgctttaaatggccttttcccctccttttatcacatagcattgcttttccattattgattcagaaaatcggcagggggaaaaagtcaaccgtgtacgcatactaagaaagggaaggcagaggcagatggatccaactcatccatctatccatgtggtcatttatctatcaatccatcctgttacccacccgcctctattaaaataaatagtaggcactgtacacattgctggttggctgaagttgtgatctggacaaaaggtctgtttggggaaaggatgctgaagcttaattctatttgtgccggttgaaaatcaggaggggtttttctacacttcacttttattagattatttcttatagatggtttcttttttcctcccagacgcgtggtggaggctcctgaagcagttggtctatagttggaataattaaattaaccatttagtacaacttttaggggagagctcgcgtgtagaaagcacaactggaacaaaacagggcgctggggctggggctctggcctggcccagccccgcacgcctttcatctccaagcagaagcaggaccccgggccacaaaagacgggcagagggacgataggccaggggtggtgggggagggatggtgacactgaacaaaataaacctacaaggtctacaaaggggaaaatgaagtcaagcgcatttgctcatccgaccgtgtgggcccggcgctgaaaggtctcctggtacaaaggcgagaaggctcacggcaccccgacccggggcggccggcagcagggggcgcccggcagcagggggcgcccagagagggctggcgaggcgttccggaaccgcgggacgggaagggaacccaggaccgggagggacagagccccgggcctgccccttgaccgccccccgggcaccctccccggccaagcacttcccttgccagcgcccttcggctgagacctcgcccagatcccttagcttctccttttgacaccctctgatgccccgtcagcatccaggtcccctgaggtgcccactgaactccccaccccaacactccctttcgctcaggaagtgcctctgtgcaccacctaaatttccaagttccacatcttcacctaagagcaatcctcagaaactggcaacatgaacccctctactccgagctcccagcactttttaggtcctagtctcgcctcctccccaaaagctaaaggggcctgggaactgtcagcaaactaggacccacggcgaaattgccctgccctgcactcgactagggcgtagggatcaggcccagggcgcacagcggtggcgcggcacccggccgtagcttccggagtagagcgcgcgctctgcaccacgcggagacacaccccaggtgcagtaaggctctagtgccaagcggggtgtgaacctggttactgtcaaaaataggccttggagccgaaattcatcacctcctgaccacccctggtcactctcttctgcagggaaacgcgcttaaaccctacagcagaggagcgggctggcggtggacaccccggcctgtgctccctacatccacatctcctgagtgcaggcctcggcggcagagttgcgttcagaaaaccagcaagcacatcccccaacccgaaatccgagggaacgaagaaacttggacgatctcagccttgtgcttgacaacctatcccccacctcccttaagtggttggggagggggatgagcgtgggggaaattccatgtgtggagtccaaagggatacagccacctcccggcccaaatgcaaattcatattcatgagagcgggataaataaagacaaatctccgctgtaatagcacttggattcgcatccgtctttgctggcctttaggtttaggggactgaagacagatgtttgcatcccttttctcctcttgtctggtgaccataaagaaaaaccatttagagcgttgcaatttgtttcccgccgcagtaaaaccttgtatacatttattttcatttcacccccgtgcacaaaaaagtgcacactggtcaccaagggcccttctttatcaaatacgcattgtacaacatacaactgcaataaaactatcagccctccccataaaactatcaccaggatcctcggtaggtccggctccctgcactcccgactttagcgcttcctcacgccccgaggatttgcaaccacctgaaacgagcctgaaactcaccctgcaaagaagcacaaggctgggggaccgctgtccccgtttaatccattactgcgtccgcggcagtttagtgcgcaataaaacacggtggcaggggagagcgggagcccatccactccccggcactagcatcgaattaaaccacttagtttggcaaacactgaacgcctaaatgcccctataaagactttatgagtttgttactttaattactgacttgttacagagcacataaagggggtaatgaatgcaataaaactaattatctacacatttaattcatataaaatatccagggtttgtttacaccacacggcgattcagctaagctttccccctcttgtccaccgagaggaaggatttaatgaaatagtttcccttattctgctagggcctaacaaaccaaatgaaaattaccctccgcttaaatcatggggccactgaagtccacaaatcactgctcgctcctttgtctgtgcctcgctgccagcacccaaaagcctgaggaatcggacaagaaaggtgcccgacctggagcccttgcctgggcatttacatggcaagaatttccctcactacagtccgcaaacctaaaaggcaaacagacacaatccccgggtctgtggaggattgtgggcacctgaaaaaaaaaaagaggcgagaaagagggagagcgcccgaaagagatgaaagaggagatacatttgggtacacttcatgctcgcttgccagttatggtgtaattaaaacgaacaacctcacagaaactcaaaccaaccaaggcttgcgctaatgcaaacagacagaactgagagcaaagaacacaacggtcgagaatccagatgtttcacattcgaaagctttcctcagatttttttattattatttttaagtggctgtataccctgagtctcttgaaagcacatttagctgcaagaagaaatgcaatttataagatgctttctctctgtctctcttttttttaaccccctctaccaggtgtatttttaaagaaatccgcttatcgttcacataaacccccttggcccacttactctatgttacagggcgcctgagtcttgccaatgtcccagtcctttataacatttcatgcacttcggggggtaggcttgttgttaaattgagcgtgtaacactcttacaaaacaggttttctatgacatcaaggtttcttctccctaaccgagggggaaaaaaagaagaggacgaagaagggggaaaacacacacactatctcaatttatgcctaaggtatatgatcagttaaaaaggcttaaaagctcggggaaattggatcagggagaatcgtcacccaactttcattatttccaagtagtgtgattgaattaaagggcagggagctggttagaagggaggatcaggggctcggtgcgtaatggtgtggtattaaattctaattagagatgcaggaatcaatgatagggaggttggacagctcagttccccagtgccagcccaatagacggatgagttattgtcatgtaaaaagcgccagcaataagaccaaccgctttgctattgtccaagtggaaagagccaagtttattatgaggactatatgctctagagacctcagacaaggcatctcataggaggctttttcataaaactaggctctgctggtagtaaggaggccagtttggaggcaggcgttgagctgtgcacatctccccactccagccaccttctccatatccatcttttatttcatttttccacttggctgagccatccagaaccttttcaatgtataaaatggaatattcttacctcaattcctctgcctacgagtcctgtatggctgggatggacacctcgagcctggcttcagcctatgctgacttcagttcctgcagccaggccagtggcttccagtataacccgataaggaccacttttggggccacgtccggctgcccttccctcacgccgggatcctgcagcctgggcaccctcagggaccaccagagcagtccgtacgccgcaggtaaggaccttcagctttctcagcggaggaagccgcctttccgcccgtatataggaagccttgattgcatttgaaaatggaaatgtgtttagtatttaccaaacgaaatttgcttacacaaatgaaagaatttatcacgttagaagcgattgcagggaggggtaattcacttacagggttacactatcctagtcacacccgaaccgccaacaaaattatcttaagctgccaaaatgataggcataatttatttactttgcgatgagacgtaaagcttagaaaataattaaataacaaagagtaaagctcattactggcagtgtctctttttttaagaaccgacagcggctcacacctctttggctggtcatttttatgattatttctttaatttattattatttttttgcagctctttcccccaacttttgagccgggtcaactttctgagaattgaaaagttcccaaagtgggactgtttggtaacttctttcctggctccctgatattccgactgatgtttttggatttttttcctctctggttttttcctgctgaaagcactatctcaagtccgtcacatcgcgctgtttcaatccacccaaaggcgcttgtgccagaaaggactccgccaagcccgaagtttgagcccaggtttccgcagataacaaatttcctcggtttcttcccgcagcttctctcggcaactctctcgcgcgggtgtaggtagcggctgccgtatgacctgaccttggagtcctcacattctagctccacggccggcgagctgccggctgatttgctcactttctgtctcctctgtcatactctagttccttacaaactcttcacggaccacggcggcctcaacgagaagcgcaagcagcggcgcatccgcaccactttcaccagtgcccagctcaaagagctggaaagggtcttcgcggagactcactaccccgacatctacactcgggaggagctggccctgaagatcgacctcacagaggcgcgagtccaggtacgcgcgcctggaaaccgaccccgctccgccgcactggtccggggaggtgtggggtgaggggcggctggtgaaattcgaagtcctggagcctcgagtgagaaggacctagggccccatggccgatcagaaatactggatttggtgtggctgtgcgttcgagagaggcttagagcgcacgctcttggcattttatttacagttgcgaagtgtttcccacccgagcagagacatggggggccttgggacgtggatgagcgatgcaatttcggggacaggaagtgcctgtggtggaaggtgtgcagactttgctcccgtattataagtttttccttctcccctcccgccccccaaaaaaatgcctcctaactcaagtgcttttaacctggccccatggcatataggttcattttcccggaaactgtgacttgcatcagatttgcaaagggtctgtgacttcatgaaggtcaagaaccatgacttactccaacctgttaaacacaggtgcgctcacgagttggccacagcgcctctctgggtgagcccccgaccgagaagcggtgcgcaccatcgcacgctcttccaggctcaaaggccggggatgggcagcggagcaaacccagagaggatcccttttccttctaccaattagagtttaactttagaacttaggcttaggggtgaatggcgagctcggggcttgctcaagaagccgactgaacagaggcccaccaaaataaggccttcccttttcgggtctttctgggacctgcggctttttaaactctgccgcaagccttcatgtccctggcgtgctcactccccctaagaaagtttctccgaaaatgcacagcaataagaagcggtagacttggtggatgtgcgcgcgggggtgatcacagcgcatggggaggagggtgttaaaacaagccgaagtagaacttgggccaccctaaccggtgcttttctttcccattttcttctttctccccctgcttcaccgtctctccttccgtcttgggccaggtgtggttccagaaccgccgcgccaagtttcgcaagcaggagcgcgcagcggcagccgcagcggccgcggccaagaacggctcctcgggcaaaaagtctgactcttccagggacgacgagagcaaagaggccaagagcactgacccggacagcactgggggcccaggtcccaatcccaaccccacccccagctgcggggcgaatggaggcggcggcggcgggcccagcccggctggagctccgggggcggcggggcccgggggcccgggaggcgaacccggcaagggcggcgcagcagcagcggcggcggccgcggcagcggcggcggcggcagcggcagcggcggcagctggaggcctggctgcggctgggggccctggacaaggctgggctcccggccccggccccatcacctccatcccggattcgcttgggggtcccttcgccagcgtcctatcttcgctccaaagacccaacggtgccaaagccgccttagtgaagagcagtatgttctgatctggaatcctgcggcggcggcggcggcggcgacagcgggcgagccagggcccgggcgggcgagtgggcgagcgggtaggcccaaggctattgtcgtcgctgctgccatggctttttcattgagggcctaaagtaatcgcgctaagaataaagggaaaacggcgtcgccctcatttcaaccccactcctacccccttcctcaacccccaaacaaaacaaacaaacttccctggcttcgcacctgcctggggcctcgcagcggggccagggctccgcctgctgatcgggggttgtgagcagcgcggcctggacgcggggcactctcagggggctgtgtctgcgtgtcagtttgtgtctgtctcggggaatgtgtgtctgtggcccaagcaggtgacaggaagagatggggggcctcaaccaacttagtgacttgtttagaaaaaaaagacaaaaaagtaaaaataaaaacaaaaaagttggaaggcagaaaccattaaaaaacaaaaagccaacaacccagaaaggtttaaaaaacataaggaaaaaaaagacaaattaaaggaggggctaggggagaagctgcagctggagctgaaggctcgatcttgtgaacccctaaatccgctccctcctaacagcacggattctcttggggctcttcttcagggaagagtagggacgccgttccagccccccttcctatcgtgtccttgggttcgggtcactgcggcgacgacttgctcagactgtcccggcggccggagtgactttctcgcacccccttgcctgtcccacctcgctgaacaccatcccgccattagcgcatcggaaccccacacagttgcaactcccaaccccgaatctttgcagccgttcggccctgaaagatgccctatccatgagatgccttttcatctgcaaactctgcaaaatgtgtctcatgtttcgcaactctttttttccccctcgctcccgcctaccccgtcggcattttcttcttccaccagcttttactgaactttttggcactgctttggattggggtcaattgcagtccacgtaactggctgcagagaaatctaccgagcaaggaaaaggcacacacacacgtttgcaggggtgtctcggtttgcatttctgttggaatgatccgaactggactcacatcctgtatggtggatggactgtatattgagggttccattcttcgcgcagtttagacatctctgttttgattctttgttgttgtttttattttaaaaggcacaaactctagatattagttgaatgttgaggctttaactttttcggtgtctttctacaactgtgttctgtgactcaattgtatcgtgttaatatcagtgcagactgtctcctctacgtgaccgtataatgtttttctcttcttgtagtctctatggcgtgtctttatggtgtaataaggttctcacgggttcaatcttttgtgtttagagaggccacggttcagacaatggtatatatttttgttatcaggtgcatgtctgtctgatttctttttttttcctgttggactatgtttgtgaacataattgtcataagttatgtttcagatttttgaatttatttatatgtgttataatgaatgcttctatttaaaagggaaatatttctacatgtgcatatagttttccaagagtgtaccattaacttgattgttgataataaaaacaaaaagcaagtctagcaattgaactcttctttttcttgattctttttttttttttttttttttggttggtcattgtttttttttttttaagtttttttttaaaaggataagggaagataaaggaaattgtgctaaaaaatagcaagaacctcactgggctctggaaatccaggtgggttgggacatctaaacccatgcagccaaattcagccaaatataaaatttagtgcttgagagagcagggaggcttcttgtccatgcttttctgtcccccagaagcacaccagggcattgataaaagtgttcacatctggatgtggatatgtggactaagtggcagccaaggcaggatttgaattcaggtctttgaggtggacttaaaacgacagtgtggattctgtgtgcaggtgccttcaagaccagtgatatccggcaaggtccaggctgtccagctcccccaaaccctgcagagtgctgacaccccaggacacccgacaagctccatgtgggcaggtgatcaggtgctatatggaacagggtgtgccttccatgcattttctcatctatccttcaaaacaagaccatgaagcaggtacaattcctatcctctgttttattttaaataggtgagggaatggaggcaacagaaacttaacctgctgaagcacccctggtttatgagtgatggggccagccattgaaatgagaaaatctcattcaagaacctgcgacatttaacaataccaatggttctcaaagtgtggctcctgcaccagcagcatcagtatcacctggggatttgctagacacaaattcttgggacccaccttggacctactgaatcagaaactctgggggtggggtccagcaatgtgctttaagttctagaggttataggaaccactaaactaccctgtaagaaatgcaaaccagaaaattccagaactgggactaccttgggaacaggtgaggggaagaattctggcagccttagtgatctcttttggagggaaggggtcctcactacggccccaaaatggaatcgtgcctcctccttggaccctttgactgcgccactttctccaagcagaatccctgtgtaaacttctggtacttacctttatacccctctggctgggcataatcaacacataattcagttctcctcatttgaagggaggccacagtttgccttctctgatttaaggattagcagctgatctggtttaaatttatcagggcttcttgccaaaagcatccaaatgtggcttgcatttgatcaggcagtttgattcagaaatctcaaatatttgcatcatatcaaactttgaatcatctttctagaaggattttagggccaggcgtggtggctcatgcctgtaatcccaatcctttgggatgccaaggcaggaggatcgcttgaaggcaggagctggaaacctgcctaagcaaaaaaaaaaaaaaaaaaaagaaagaaaagaaaagaaaaaaaggaaagaaaaattagccaggtgtggtggcacatgcctatagtcctggctacttgagaggctaaggtgggatgattgcttgagcccaacagctgaggttgcaatgagctatgaacatgccaccgcattccagcctaggtgacagagagagacactgtctgaaaaaaaaaaaagagtaaaataaaaggctttaaaatattcttttaaaaaaatctgtctctaaatgcccctcagtaaagtctccaagacaacattgtttataaagagtgccactaattgtgctagtttaatatgccagcaattcccggaactcttgggttgtagtctttggttgtaaatataacttagaagatctgagacaggcagaccacaaaaacaataatttattggcaaaaagagcaatcaaggtcctgggcctggacacaggaaagttcaccttcctatagtcatggaagcccacgaggtaagtccctgtaagcttttgggcaggctagtggacaggcattctggaaaaggcaagaccaatggagaaaaagaaagcaatgagtggagagaggaagaagagggatagagaaagaagaggaaaaacaaatagccacagggtttctttggaaaccccagagaaggccctagaagtcctttcagatgtgaataaactgatgagggtcaccaaatttctttctcctggtcttgagcaactttgagtgacttgtctccaggacaagggaaactctggggattggtgagacaaccatgcccccccacctccatcccagcttcccagaggactacattgtaaatgtctggaggcacccagctctagctctagtattttgaataccaccttcgttttaatttgggtcatctctgcttctcttactgatcaaagaagcaaactgttgggaggcaagtttatgatgaaatgcaaaataatatccctgtaatatgatggagccttagtggcaggacactctgtctctcacattgtgtcatttccttggaaccctgcacagtgtgaacaagctcactttcacttttcctctcctaagaaatttgcattttggcttatcaaggcatcctttttcctggcaactctgggaccacatgtgacttcacaaaagcttcagagccgatgccagagagccacccctaagccaagtctccttcaaaatggtggagtgcagagaatcagagagtggttgtagagggaagtagacaacacagcaaatagtagctgtccgtaactcactccagatgcgtctctgggaccactgcatatccttaggaagacagcctatggttagagatagtcctcaattcagagaagggaactgtgtcacctggtggagcaaataacttaatccctctgtgtctgatttatcaaccaaaactgtgagtaattatgtagagtatgggattgttgagaggattaaatataatatacagtaagcatctaatatagtataagttttcagcaaatgtcagatatgattatcatgatgctgttgctggttgctgctgctcttgatcacgctgtaacttctagatcctttcttgatctgtccagctcaggccttagaaaattaaaaagagccctcagttgtcatttaatcaactgtccaggaacatagagtgtgagtgactgttcaaaggttggaattcgagaactttgctgagggtggacaggaacagactaaaatcagtcaggggctgacaagaaacacctaacatttattgagtgcctactgtatgccaggctctattttaaacttacaagctttaatgtgtttagtcctcatgactaccctgtgagataaagtgccatttccatttttttttcttgtgaggaaactgaggcattgaggagctgggtaatatgcttagggttacaaagttagtaggtttgcaacaggaatggattccagccctggctggctggtctctggagtgtgtgtttcttcttaaccactgctctttagagccttccaagaggaagaattcattttaggccacaaggttacacactattggaccctggaggagattttgcaagagactccggaggcaggtgaaggctagaaagggcaacaggagagcagtgttgggatggaatcccagccagactcagaaggaagcccaaggcctgaaaggctttgcaatccccaggaggagggagaatgttttctgcaaggcaacatatttacagctcccggtctttttctggtaagtgaacaagacaagaagtagccaggggcatggaatgtggaagggaaaaaacagttacatttatgaagtgcagaacgtcagttggtggacaggaaaggatgtcagcctctaagctcattcatcaccatcgtaacggatggcacaaatgacaaaagcccacctgaatccttcattttccagccctcattccagagtggctgtttacaaatctgtgtggataaataatgactaaatgtctttaccttacaccatttccatattggaaggaaggcaaaacacagtgcaaagacctgtgacctcattagatcaacaggcaggattatctgaaaacagtccatgaccatgtccccatcgccatggtagatattttgaattgtgttagtcttggcttaatgcaggggttctcaaccctgggttcatggatagaattcaagggagaaagggaaaaatacatatatactttcactaacttctacctgaaatgcagcattttcttcagtgatgaatgtgggcaacgtagccacagtagtaattatcagtacctgtgactttgtagccagtggaaatcacagatattttcatttcacaatggagtttttgaagctatcttgatagatcatttgtattcatcctaagtttgaaattatgatatatactagatcagacattatatcttgttatttaatgcattactgaagaagcacataagctactacagcacaaatttgttttaaaccattttttataactttgtttccattggcttctgttgtaatcctatgtacttttaaagattatctttcctttaaaaaattttatttatttattaagcaattttaaaaattatctttatttgacaaaaattacatatatttattgtgtacaacatgttttgaaatatgtattcactgcggaatggctaaattgagctaattaacatatacatcacttcacctacttactatttttgtgtgtttgtggtgagaacacttaaaatccaccctctaagtgactttcaagaaaacaatacattattattaactatagtcaccatgttgtacgatagatttcttaaactattcctttcacctaactgaaacattgtatcctttaaccaacatctccccagccttgccctccgggggagatgctccttattgtttatactttaaaacattatcttgagaagggattcttggatgtcaccaggctgccatggagtctatggcatccacacaaaaaactaggattggatgtcattcctggctcctagctagctgatgagaacagggtgttccgtgtctctgtgaagctttgattctaagaacatttcttcaggatcagagcatgtaatcattttacttcataggtggaagcaatcttagagaagttttaaacctatctcatgctccttcaagggacaaaagaaaataaaacaagccctccaagttgcacaaagaaagttccagggttttataggccactggctggatgtggaggtgacagtaagaaagccggggagagcaggaggtgattcggaggagcaggaggtgattcagcaggactggagcaccctgttactgtttatggaggatttatatggactgggcactgtgctgcgtgcaccacactatcgagattcaaatccattgactcttacccaaggtcatatcattaataatggcaaagcaagactcagtctaaagctcagccttttaatcaatatgttaaaaaggtgttttaaaaaaacatgaaaggaattccttagttacctagctgtcgcttactttactttttgtctgaacttgaagctattgggtttgttggattaccccaaggccaagtgattgaacaataatgttactttagccatgtgtttgatgtcaaagacctccctctggggaaagtcagacatcaaggggaataaaggcctcttacctggatataatttcattagggaacatagtggatgactacttgctatatgacttctcagatgatttaagcgatgatttccagaacaggaagagcctgggtgcaaaacctaatttctttacagccccagtggcatggccaccttggacaaaggaggaatgtaaacctgacttgtttgaaacttaagatattgtgctttctggagtatttgctatgtgttagatactcggctagctgttttgcctttgttatctgtatagggtttcaagacttctggggtagatggtattgttatgaaaagaaatccaagtgatggaaaagctgagcaacttgctcaagcccccaaagctggtatgtactagagatgagctccaaacacaagtcccttgaccccaaagtcccatcgcctggggctcccagggtccagaagagtcactagcatggcctagaactcagtactgcccttagcctttcttttctttttctttctttctttctttctttttttttttttttttttttttttgaggtggagtttcactcttcagctcaggttggagtgaagtggcatgatcttggcttactgcaacctctgcctcccgggttcaagcaattctcctgcctcagcctcccacgtagctgggattataggcacctgccaccacgtctggctagtttttgtatttttagtagagacagggtttcaccacgttggccaggctggtctccaactcttgacctcaggcaatccacccaccttggcctcccacattgctgggattacaggcgtgagtcaccgtgcctgtccttgcccttagcctttctgctcacaacctaagcaaatgttaaaagccagagagggtgatgagaacgttctggaattacatagtggtgatggcagcacaacttcgtcaatattcaaaagtccactgaattatatactttaaaaagatggattttatggtatgtgaatcatatctcaatttttttaaaagtagagaataatacgagaaacccatcaccccctttaccttcctccataatgtctttgatttcttacagatataatttacatacaccctccatcttagtcttaagtcagagcaacataaattagcagagagggaagagtgaaaaatattactgttttcttaaccaattatcttttttttgaggctagaaaaagtgtgctctccaatattgatttaaaacaaagtggacaacaatttcttgagatatatagactctgcttcacattgtagtaaagttttcctaccttgtcactggaagcccgggtgctgttaaaatattcagacatattaacgtccctgtacctgaccatatattggaacaatcattcatggaaactcctctatatgcccattcttgcctttgattgactggaaagaagctacaacctaaaggacatttgggccaggcatggtggctcaagtctatattcccagcactttgggaggccaaggtgggtggatcacctgaggtcaggagtttgagaccagcctggccaacatggtgaaaccctctctctactaaaaatacaaaattagctgggtgtggtggggcattcctgtgatcccagctacttgggaggcggaggcaggagaattgtttgaacctgggaggtgtaggctgcggtgagccgagatcacgccgttgcactccagcctgggcaacaagagcaaaactctgtctcaataaataaataaataaataacgattgaaaatgtctgaggccattcatctacttatgctggaattttgttcaggtccattgaaacacaaaaaggtcatttcttagaaaattctgaaaagattaaattttattttctctaagcactctactgatgggggaaaaaagaaacaaacaaacacaaagatgatgctggtgagactgtggagaaaagggaacgcttatgcaccgctgtgggaatgtaaactagttcagccattgtggaaagcagattgacgaacttaggtatatactcaaaggattataaattgtgctaccataaagacacatgcacatgtgtgttcatcacagcacattcacaatagcaaagacatggaataaacctaaatgtccatcagtggtagactggatagagaaaatgtggtacatatacaccatggaatactatgcagccataaaagaatgagatcatgtcctttgcaggaatgtggatggagctggaggccattatcctaggcaaactaacacaggaacagaaaaccaaatactgcatgttctcacttataagtgggagctaaatactgagtacatacaaacaaaaataagggaacaacagacatcagggcctacctgagggtggagggtgggaggagggtgagaatcaaaagactacctacagggtactatacttattacctgggtgatgaaacaatttgcacaccaaatccctgcaacaagtaatttacctatattagaaaacctgcacacgtacccctaaacctaaaataaaaggcccggcgtggtggcttacacctgtaatcccaggactttgagaggctgagatgtgtggatcacttgaggtcaggagttcgagaccaacctggacaacattgtgaaacactgtttctactaaaaataaaaaaagtagctggatgtggtcgtgggctcctgtaatcccagctactcaggaggttgaggcaggagaatcgcttgaaccgaggaggtaaaggttgcagtgagttgagattgcaccactgtactccagcctgggtgatggagtgagactctgtctcaaaataaataaataaataaataaataaataaaataaaagttttaaaaaaagatgaaaatttcagcatacatttatttgcagaaatatggtaacccatttaaaaggttgtttcatgttcattgtaggtcctttgagacgcatagatgatattcgtgtgggaggctacctaaggtgcaagctattctttgaggagttgatttttctggacttaagataattatgcctttttattcacccaggattctgttgctccaacagtttctgcttagtaggagggaaccacatctaaatgttagccttggagttagtttttctttggtaagaaagtcctttggtaccatcagtgctataactggttgagactagcttccatgccgttcacacctccttgcagaaaaaatagtttgtaataagtaaaaagaagtctgaataattcagcgatttcaacgttttaaaaaaattgcacacatatacacatgcagtctaaaaattaaaaaagattttaaaggttatttagtgaaaagtgtatctctctcttacctctgtttccccaaagtaaccagtagtagttatttttgtatccttctgagaacagtctctctctacatatgtgtgtgtataaatacagatgttattacattatacatcttttctatacttgtattttttacttaacatacatatcccaaagaccatttcctatgaaaacctgtagatttgcctattttagctagctgcgtggtatttggtttcaaaaacaaacgaataaacaaaaaaagacagcaaaattcttcctacatttctaatggtgcttggaatgctaaaaagtagtgtggcagagattgctaactgtcccttaataagcattctcttcttccagttagcaagagaactccttgttttttggggagtttgcacatggccattcagatagagactacgtttcccagcttcccttgaagctagacatggccatgtgccatgggtttgagcagaaaggatacatgccacttctaggtgaacgaaagctgcttgccctgaagtacttcttttcctttttgcaggaggctagaaagtagacatgaggatgatgagtcatcttcaactgcaccaatgagggtaagatttgggggatggccaagcagcacaacagaagctgcctggggccatgagtgactccttggggtagagccatcctattgccctctatagatttgtgcagtaaaatacataaacgtattccattggcaattgtttaacctgtgttaaataactgaaccaatatcttaacaaacataagaggtgtccttgaagagttgacattaatgttgaatattcagtagtattcaccagatggactggggtatgagaatgacattccaggctgctgcaggtgcaaagatggagaaatttaaatgattttttaaaaagagccattaggctgggtatggtggctcatgcttgtaatcccagcactttgggaggctgaggcgggtggatcacctgatgtcgggagttcaagaccagcctgaccaacatggtgaaaccctgtctctactaaaattacaaaaattagct

SEQ ID NO: 671 - DNA, 3029 bp, Homo sapiens
ttaaattctaattagagatgcaggaatcaatgatagggaggttggacagctcagttccccagtgccagcccaatagacggatgagttattgtcatgtaaaaagcgccagcaataagaccaaccgctttgctattgtccaagtggaaagagccaagtttattatgaggactatatgctctagagacctcagacaaggcatctcataggaggctttttcataaaactaggctctgctggtagtaaggaggccagtttggaggcaggcgttgagctgtgcacatctccccactccagccaccttctccatatccatcttttatttcatttttccacttggctgagccatccagaaccttttcaatgtataaaatggaatattcttacctcaattcctctgcctacgagtcctgtatggctgggatggacacctcgagcctggcttcagcctatgctgacttcagttcctgcagccaggccagtggcttccagtataacccgataaggaccacttttggggccacgtccggctgcccttccctcacgccgggatcctgcagcctgggcaccctcagggaccaccagagcagtccgtacgccgcagttccttacaaactcttcacggaccacggcggcctcaacgagaagcgcaagcagcggcgcatccgcaccactttcaccagtgcccagctcaaagagctggaaagggtcttcgcggagactcactaccccgacatctacactcgggaggagctggccctgaagatcgacctcacagaggcgcgagtccaggtgtggttccagaaccgccgcgccaagtttcgcaagcaggagcgcgcagcggcagccgcagcggccgcggccaagaacggctcctcgggcaaaaagtctgactcttccagggacgacgagagcaaagaggccaagagcactgacccggacagcactgggggcccaggtcccaatcccaaccccacccccagctgcggggcgaatggaggcggcggcggcgggcccagcccggctggagctccgggggcggcggggcccgggggcccgggaggcgaacccggcaagggcggcgcagcagcagcggcggcggccgcggcagcggcggcggcggcagcggcagcggcggcagctggaggcctggctgcggctgggggccctggacaaggctgggctcccggccccggccccatcacctccatcccggattcgcttgggggtcccttcgccagcgtcctatcttcgctccaaagacccaacggtgccaaagccgccttagtgaagagcagtatgttctgatctggaatcctgcggcggcggcggcggcggcgacagcgggcgagccagggcccgggcgggcgagtgggcgagcgggtaggcccaaggctattgtcgtcgctgctgccatggctttttcattgagggcctaaagtaatcgcgctaagaataaagggaaaacggcgtcgccctcatttcaaccccactcctacccccttcctcaacccccaaacaaaacaaacaaacttccctggcttcgcacctgcctggggcctcgcagcggggccagggctccgcctgctgatcgggggttgtgagcagcgcggcctggacgcggggcactctcagggggctgtgtctgcgtgtcagtttgtgtctgtctcggggaatgtgtgtctgtggcccaagcaggtgacaggaagagatggggggcctcaaccaacttagtgacttgtttagaaaaaaaagacaaaaaagtaaaaataaaaacaaaaaagttggaaggcagaaaccattaaaaaacaaaaagccaacaacccagaaaggtttaaaaaacataaggaaaaaaaagacaaattaaaggaggggctaggggagaagctgcagctggagctgaaggctcgatcttgtgaacccctaaatccgctccctcctaacagcacggattctcttggggctcttcttcagggaagagtagggacgccgttccagccccccttcctatcgtgtccttgggttcgggtcactgcggcgacgacttgctcagactgtcccggcggccggagtgactttctcgcacccccttgcctgtcccacctcgctgaacaccatcccgccattagcgcatcggaaccccacacagttgcaactcccaaccccgaatctttgcagccgttcggccctgaaagatgccctatccatgagatgccttttcatctgcaaactctgcaaaatgtgtctcatgtttcgcaactctttttttccccctcgctcccgcctaccccgtcggcattttcttcttccaccagcttttactgaactttttggcactgctttggattggggtcaattgcagtccacgtaactggctgcagagaaatctaccgagcaaggaaaaggcacacacacacgtttgcaggggtgtctcggtttgcatttctgttggaatgatccgaactggactcacatcctgtatggtggatggactgtatattgagggttccattcttcgcgcagtttagacatctctgttttgattctttgttgttgtttttattttaaaaggcacaaactctagatattagttgaatgttgaggctttaactttttcggtgtctttctacaactgtgttctgtgactcaattgtatcgtgttaatatcagtgcagactgtctcctctacgtgaccgtataatgtttttctcttcttgtagtctctatggcgtgtctttatggtgtaataaggttctcacgggttcaatcttttgtgtttagagaggccacggttcagacaatggtatatatttttgttatcaggtgcatgtctgtctgatttctttttttttcctgttggactatgtttgtgaacataattgtcataagttatgtttcagatttttgaatttatttatatgtgttataatgaatgcttctatttaaaagggaaatatttctacatgtgcatatagttttccaagagtgtaccattaacttgattgttgataataaaaacaaaaagcaagtct

SEQ ID NO: 672 - protein, 312 aa, Homo sapiens
MYKMEYSYLNSSAYESCMAGMDTSSLASAYADFSSCSQASGFQYNPIRTTFGATSGCPSLTPGSCSLGTLRDHQSSPYAAVPYKLFTDHGQEKRKQRRIRTTFTSAQLKELERVFAETHYPDIYTREELALKIDLTEARVQVWFQNRRAKFRKQERAAAAAAAAAKNGSSGKKSDSSRDDESKEAKSTDPDSTGGPGPNPNPTPSCGANGGGGGGPSPAGAPGAAGPGGPGGEPGKGGAAAAAAAAAAAAAAAAAAAAGGLAAAGGPGQGWAPGPGPITSIPDSLGGPFASVLSSLQRPNGAKAALVKSSMF

SEQ ID NO: 673 - DNA, 81684 bp, Mus musculus
  misc_feature (1)...(81684): n = A,T,C or G
actgagacaaggattaagtgaagcttcagtcttctcacccttgacctttaatactttcaacactattaagtggaccaactagagcagcaggttctcaacctgtgggtccagaccccctctggagcagtgtcaaatgactctttcacaggggtcgcctaatgaaaataattttatggttgtgggcagggtcaccctaacatgaagaaccggattaatgggtttcagcattaggaagtttgagaactactgctctagagtttaaaccactgctatttcccactgtaagacaattcaaatgctcccaacaaaagactcaaagccgtagtcaatgaaatgaaaattgcaatagggtaacagggagaagtccacaacggatttattaatgaaatgtgtacatgtacaaaaaccatatagaatataaatgcccaggttcaatgacagagcattagcttagcgtgtataaggccttgggttggaggcccagtgccaaaaaggaagagccaaaaacaataaatgctcaaagatgacatcaaacagtaggagcttaggtgccattctgtacaggacaaagggaaatgggggcgctgtgggcactttagatgggtagcaaaggcttgttagagaaaatgagctagcgtgaagagcagataataccacagaacaaagttctctggtctgggtgtgcggtctgagtgccctaaatttactcccttaatgagtaaattggcagattgaagatggctgtgtttctctttggtaggtctggtcctttgtggatgacagactctcagggaaaacaacttcttgcttaggaaaagaggatggagagagaggaggtttgtgtgtgtgtgagggggtgtgggggacaagtcagagagacactggggctgtttctgtaacatattaaagtgtccagtgccatctatcttgcctcctacctctcagctgcaaggactgcagcttgtaccaccaacacctggctggagtgtcacttgctcaagcaccttgaggttggaggacagcgagaaccacaggaaataatttacatgactccttagtgccccctctcgagtcactgagttttaagttcccaagctctgctcgtcccgtgggacactcattcatcctcactggtcagtgggcggctactgtgtgccaggtcctgtatgggacacacggtgtcaaagggaaggggtgaactaggccatgggtgacaggattttggcattctatgtggaaaggggctcacttatcctcaccatctttctggcaatagctcatatactccagggtttcctcagacgtggccccaccctaaaggctcagaatttcagacctaccagaactttgtttcctcccaacactatttgtataagcagcatgggagaacaccagccccacagagaacagtcaggggtcacaccaatcctgtccccacgatgagagtaaggggcccttgctctggagacttcatggggtctgggtattttgtggggggggggggacctgaacctgagccagaactgaattggagccttggacgtggctttggccaatggagtccaaggctttggtaacgcagatatagcatcctttagggggagggggtaggtgctgtaggtaagcctaggaagtgtatagcttttccttttacaggggaagaggttgggcctgagaaagacaatagaagttactgctggaaccagaaccctggtctttacattcatgtcttctgttgtgatatagcacaaaatggcaaaaggaaaagaaagtagatgtaggaaaaaataaataaataaaaccccaaaccctggattttaacttcagcctctttattccttaactgtgtgacctttaattaaaaacttttatctgtgctcctggctgaagtaaagcaggattaataatattaaatatcagtggagttcatctattgcatgggactattagactgctattagacatatttcccaataatgataccttttactccttcagtacctacccatggcttttactcaaggaagggctaggaatgccgtatcaccaaggctcacactcttaagaacattccttgaccctttctaagaggacatgtctctagttcactccatcatctcttgccatctctttgcatggaatctctttgggtccttgaacccttactaagggtgatagcaggaataaagaaatgacagatgctcgggacacaggaaagctggggttgggtgatctcagctctcagatagagaagcccaggagctcagagttttattgtgtacagttgaatgaggacaattgcatagaggtggggttagggtatctcagtaggggcagtgtctgcaggggagcagtcctctgaccataaacataaacttgtgtgtgtgtgtgtgtgtgtgtgtgtgtgtgtgtgtgtgtgtgtgtatgtgtgtatgtatgtgtgactatggaggataactttctgcacacagtatcatatccacatatggaccaggaaaggccttgccattttttgtgggtcaaaggcactgggacccttgacatagcccatgcccgtgtcaaacaatacatggtcactcagaattctactaactccttacaattttctgtcttcaggtccctcgcagtggcttatggggtaaattaacttaaggcagtgaaatagcactgtatcagcccagcatccttacctgtaaacctcaggcagcccactgagtggtcttccttatcaccttcaccttcctactctcactcatctatgtctcaggtacgtaagaggccttgagacagctttataacatcacttagccaacatatgtggccatgggaactcgatacctgccttccccaaacagtcttcagattttcctttttctttttcaaattggtctgtttgtctgtctgcccctcctctctttctgtctgtatgtgtgtgtgtgttcccatgtgtgtgcaggtgcatttctgtatgagtgtgttgaggcccaaacttagcaccaggtgacctcctccacaccttcccacctcatattcaggtaaggactctccacctcctcctggctgggtgagcagcaaatgcatacccagtttttacattgattctggggatccccactctactcctcattctgaggttcctccctccctcttttgtagttattcccaaattacaagaagaccgattctgcaacgtcaatgtaaagaaaatgctctcacctcatctctgtgctgggccccaaagagcagggcctgcctctatctactaagtctcaccggtagtagcttcttcactttggatctcttctcccttggctcctgccaccatggataactgagccagcccaagcaggctactgcagagggaggattccatcagcctgcttgtgatttcgactttttctgtgctcagaagcccgtcatctggagttctccctgccagcctggtcggcctgagatcttcctgaaccatcctaaataactgctgagtgtcgaggatcttttaaatgcgacaggacaccaaatttctaaccccttaactttttccatcattaaagtgttggtcttgaaacttcaaaccagactttccccatctttgccttgaacccacagcatgacatcctgccttctaaggtatttcctgagcttccggtaattggagagagaagggggattgggggggggggcgggactgcagtttcctgtaaagcctggtccaacaccttccaggatcaaaacaaaagagaaaaatcctccattttcttgtcttacgcatctaaaatccaaaccagctgttagtgcaggtcgtgaaggcaatgctatcgagtgctgagccctcttgtgattttctgggcttaccacacttatgtcatctaggaagtgattttggctagtccaggcaggttctctattgtcctggacacagtggcagtgattcacagctaagggacttgcaaaactctattactgtgtctttcctccttccttctttctaatgatacagatgggggcagtgtcttcgagtgcagagtactaattcactcaaacatttaataatttgaaattacttcagttctctcattagccgttctccctcggaagatggttcatacctgtaccacttcatctgcggtaaaacatcttgcaccatccctattcttataaactctaggttaatacaacaacaatggaattagcacggccagggaggtggctggctgtgtaaaaagagagaagggtgagccagtaaaagtggttgctatgtaagcccaacaacctgagttaatccctggaaatcatggaaaaggttgaataccatggcatgtcctgtaatcctgacactcctttagtaagatggaacgcagagacaggagaatctgccagaatatcataggacattgagcctggagtattcagagccataggagattctacaagagagaccctgactctagacgaggttgaaggagagaactgactcttaacatgtctaaactacacatatgcgcacacttgcacaaacacacagcaaataaatacaaaggctaaattatcactttcttgaataggtgataaggttatggattcacatagattcctaggagagtgattcgtgtaaataatgcaaagccataacagaatcaacctaacaatttctctttcagatggattattcagttgaagaagtcatccttgggtatttgtgctgaaatggactgaaaacagaagtcaaaacatcatcctagttaacaagaaattattctggtacacacaggaaggtgtaattgagaatgtcatttccaagctgatcatatcacacaattccagtcaattgtgagtctaatcctttgctggtttctggatctgatgctctgctttaacttctgtttgttttgcatctatctatgtatctatgtatctaagtatctatgtatgtatatatgtatctatcatctatctatttgttgaaacaaagtctggctctacagcccaggctcatgatctacctgcctctggatagagtgaggatttgggtttctttaaaacaaaacaaaacaaaacccacaaaaataggaatgtggttttgttttaatcctgggagcaggatatcaggctgcttcagattgaccatagcagctgactatgatttgcctcgtgctttagcagggctgtgattttgccagctgaagatagtttctgcgattgtgtggtattgtatgttgttgggatttctggggacttttcagagggtacataaatgctaggatactgggtgtcatggttggttgctgttggttgaattttgttaagtagtccatgcacaaagaagcaacaataacaaggagaaattagatatcctgatggtaaagatcaaacttgcctcaaggaactggacacccctaatcatcaggaagtagtctaatgataatgtcccccctttctgacctctgaccttattcagggatctctttcctttcctctctatccttttttttttttttttttctcatatctagtgttaggggggttgagagggtggactgaaaaagaacccacaaagtggtaaaaagatatctacatttggcttcctgggtctgggcattaaaactgtgtaccatacatcgggctctgctctacatttgttttgatgcaggtaagatgtttcggataagcacagcgggaggagacacattatgaacttgggatcactacagtgaacttgagtgtgaatggctgcatcacacatcacaactggcagcagagtgtgaacaggaggctaacaaactcccagatgtgatggatactatctacaagagcaaaaataagtcacatttccctctccaagaatctaacccatggggcagagacgaatttttaattaaagaacttgacctgtaaaaacaaattgttcaactggtccctgccaggtccaaacaagaggaattaaatgaagcatagttcttgatttacattgacaatgaaattcgtggatgtgaaggttgtcagagatgctaagattttcatctgacaagacaaaggccttctgcggaacaagggagacagtttaaaaggcaagccacggtcagcatggtggtgtacactccttatcccagcatggaggcagaagaatcagaaatccaaggtgaacttgggctgtgtagccagaacctatctcaaaaatcaaaaagcagctgggtgtggtggcacacacctttaatcccagcactcacaaggcagaggcaggtggatctctgggttccaggctagcctggtttatagcccaggaaagcgagaggctacacagagaaaccctgtctcaaaactgctcccccaccccaaagcaaacatgagacataaagcaattcagaacacccacccaaaacaacaacaatgaaaaagggtgcttaatttcatttgtctaaaccagtggtagacaaatgtcttctacaaagaaccagaaagaaaatactttggcttgtacagaccatatagtctctgtcacagcttttaatccatcccaatgcagaacaaacacaatgtcagacaatgtacaaatgaataagcatgtctatctcccaataaaactttatggatgctgaatcgaattttatgtaacatgcacaggtcacaaaatgttactctttaaaagttttgttttcagccatttaaaaatataaattcttgggcttgggatcaagccctgtacatagataagcaaatggttatctaagatgcacaaagcctgggacttgatccttagcatcacaaaaataaataaaagtaaataaattcttagtattcccagtagcccagagatggagacaactcaaatgcccatcaacggtgggtgcctctatacatgctttctgggcaagtattcagccttggcctgaaggacattgtgctaagtagaataagccagttgaggacaggcagatattgtatggctctgtttccgtgaagcatctcatcacattcatagaagcaagaagtagaatgagacttaccaaaggcttggggcagggtagggttggagggtgaaggttagttactggttacagaattacagttttacaagatgaatgcttcctaacaaagcatgcaggcttcacacaactgaagtagacattttaaacgggtacattttactgctgtattttcaaagctacaattgaaagaggtgaattcttccacttaagcctggcaaatttggttattcttttttccttttttcaaactataattactaaaagagagtcttcttcgctacacagaaacaggcagtagactcccgagacagtccaaatccatgcttcgaagcgtccctagcaaaccctctaaccacaaggagtgggaaggccagctcctgagaggccacccaccagtctgtgaaacgcctgtgaacacactttcaaatggaattcaccaacatttttaaaccctagtccgtaatgcatgctgttttaatgcaaacttggctctcactgctctaaaagaaaaaaatcggtagaaactgttgcttgttcaggctcagtgccggaagggtccttcagtgaacactttccccagagtgggctgcctttccatcggtccgtttggatgtccattcccaaacactaaccccccgaggcaccccaaataacttaagcctcttcaaagtaacaatgactagccactttgtggtttctctccagaatgaccaatgctcaagtggccagtatttacctgttctgttctaattgttttaggttgatttcttttcccactctaaccctgctttcttatctaccttttttttttaacctttttttttttttttttttttttttagtgctggagattgaactcatggctttgtacaagagaggcaagtaatttacccccaagctaaatctctaacgagacctgactatctgatttctagagcttgctttctgagtggctgtataggaatgccacctcccaatctcccccaagagagtggggtaccacttacaaatgacgaacctttcttgacacaacctcccctgaaacccacagttcacctgatggctcactcctgatgataattcgtgattacaggtacccacctgtatagcttcacacggagcagttcatggctggccccccaaaatcttgttctgactactcatcccttcctgtccccaacccctggtgaccagaactttctcactgcgccaatagttctgccttttctgggagaggtgggatcatacagcacgtagccccttcagattagcttctcccaagtggatactttctaaaataaaaagcaacatgtattcctaagtgtgggagcttccgagttggatgataaatctaaatccacactctgcattcagttcacatggacagctggatcatatagggacacagtctgagttttgctgagtgactggagaagccaactagggattttaaatgataatctccaaagtggaaaattagctgtggaaaatcagggtttaatagacagccccctttcccataattcctccttctgtttcacatcttaccttggtccccctccctcctctccccaccaccattgtctcttctcagagcactggcaagcctggtcctcagtgtataaccagcaggttatacacatcagtgattaagcaaaaatgctgcccttgtttaacaaggtgttctgacaggcacctgcagatgtgcgtgtgtggggtaggtattaacatccctgaattcaatctagaacctttaatagtaaccagatactcagaaacaagcaatctttcagagagatagcaaatgctaatgggggggggggtggcaaggaaatgtcagaatgttgtcctgctgacctggagacttggccattggtctgggataagtatgctgtggctagtttgcaaagcaccccttactctcaacgcgattctgttattggggcttccaatcacaccagacacattgaggggagggcttaagggtttcaattagggctttaacgagccatgtactctcctgccaaacgttcaggattgaaaactactggtcagaaagccccaaaggcaggggactggaaggttctggaaggctggggctggaggaactgtgcacagggtttgttaataagagacccattccctcctgcatcctccgagcaatgcccaactctccaatcagagccattgtcctcaggggcggggagtccagtcttgagaccacagggtaccccttcccctgtctcaagccacctggagcgcctaagcagtgcctgtttaaagccacttcactcatctcttttctaagacacaaggctcctagtttgtggctcttaagaaagtattcccaaaagaggatcccaactctaaaactgcctccaaattattactattaatattaattatagtgctgctgttaaatatgccccgacagcatcttaggaagactccatctccctttgtgcacgcgtatgttttttcaccctcatctcctctggtccgcaataaaagcagcccggttcccagagcatccaaagtcctgaaccccactcgnnnnnnnnnnnnnnnnnnnnnnnnnnnnnnnnnnnnnnnnnnnnnnnnnnnnnnnnnnnnnnnnnnnnnnnnnnnnnnnnnnnnnnnnnnnnnnnnnnnnnnnnnnnnnnnnnnnnnnnnnnnnnnnnnnnnnnnnnnnnnnnnnnnnnnnnnnnnnnnnnnnnnnnnnnnnnnnnnnnnnnnnnnnnnnnnnnnnnnnnnnnnnnnnnnnnnnnnnnnnnnnnnnnnnnnnnnnnnnnnnnnnnnnnnnnnnnnnnnnnnnnnnnnnnnnnnnnnnnnnnnnnnnnnnnnnnnnnnnnnnnnnnnnnnnnnnnnnnnnnnnnnnnnnnnnnnnnnnnnnnnnnnnnnnnnnnnnnnnnnnnnnnnnnnnnnnnnnnnnnnnnnnnnnnnnnnnnnnnnnnnnnnnnnnnnnnnnnnnnnnnnnnnnnnnnnnnnnnnnnnnnnnnnnnnnnnnnnnnnnnaaaaaaaaaaagaggagcgagagaaagaaaaaaaaagaggggggaaaatcaggatctcattacaagagcaacagaccgtctgcagacgcctgtcagcatggaaagtcgggggctttcacccggttcctcctagaaatctccccaagaagactcccaaacgctcccccacgtctgggtaggttgcaggactgtttgcctgttgctccagcgcttgcaaagttttcttcgggctattttttttttaatttttcctctttttttttctcctttctccttctttcttttctttggctggtgggggtggggttgtgggcgctgtggggtgagttgtagactgcgttgggggaggatgggggtgcgtccccgcgggggaggatgctgtgcgtcgccaccgccaccgccaccagcgccaccccgggagctcgtgctcgggcctggggtctgcactgcgaagcccggagaaggagacaccctgagtgcaaactcctgtatccctgcagcgaggctccggggctctgggattagggatagtggtcgaagcgggctgcgtggctggaggctggattgtcactgacctccagccggggttgcggtccggatcccttcaggataggcaccgaggcgcgagtgttcggattcaggggagagcacaggggtggagagggagcggaggacttgggccatggagatgtggggcccggggctacgtccactctctctgggcaggtgacccccgcccaggtcaccgccccaggcgcacgcccagtcaaatggacatttaaaagccggccgagtcggctagtccagattcggattggggagatgggccaggcaagggatgaacttgaaactctcagctctttaacttccaactgcctgctggcctgtaatgttactggaactttttttaagggggggggggcttgaaattgggaggcgggagctaaaaatattaaatggtctctgttttgttacgaccgaatcattccgaggataagctgcagttacgcggcgggtgggggtggaagcaagaaaggctatttcagaaactgcaaaaggggctttttagaaggaaaaaaaaaaaaaaaagagtgtcgggagagtttctggcttgtctggaaacggcaagactaattgccgtgcgcttccgctttgaaactggctgcagacagcatcttgaaaatgactcactgaggagctcacaaagaaactgcggcttgctgctgcttctcaggtttatgtatttgtgccttttacagtttcctttgtagtgtttggagggtcccccgccccttccctgccggccccctccagccctccccatctcgaaagcccctcgccgtcctataactccctgcagtgctctgccggaggtggggagggggggcagttgggggggcgtannnnnnnnnnnnnnnnnnnnnnnnnnnnnnnnnnnnnnnnnnnnnnnnnnnnnnnnnnnnnnnnnnctaagtaatgtgtgcacacacacacacacacacacacacacacacacacacacgcaccgactaatcgcattgggagtttccgctactctgcacaggaggggttttgtgcgagccactgtctgcctgcagagctaggcgagtcacagcctttattgacttagaggtgccttctccacccctgccagtctttctaaggcacactctcaaaaaacttggcagtccctttggccattttgggtctcaatcatgctttcctggggtgggggtgggggctgggagagggagagagagagagttgtatgtatgttctgttttgttctctgatgtccaatcaactcttacacaaacacacatgcctgcccaccatcctctcccatctgttcctctgctttgtaggggttgggaagggggacatggctggggggggggggtaggtcaggtcaggctgggaaacctagcatgttccaggcatctatcagtgagaacctaaatcgatttatgagccctattgcccaccaaaatatccactggtctccttccttctctcccatcctgtggcacacatttatttagaaaagggtcagttacgggtttgaatttatgaggattataaaattacagattgtgttaggagggtatgtaggtcagacagttaaggagactgtccataagtgtactaagagcttccagtaatgactgcttgcaaaacccccagagcatgaaaagggatggcctttcaatgccagatatagagcaggccttctctctctctctctctctctctctctctctctctctctctctctctctctccttttaaatgttgactagaaatgtgtagagttactaaaaagggcaaagaatttcagagaaccccactgaaagcacagggcttctttcttgccgaggacatggtgcctctcgtgaggacttccaagatgttaccaagacctctcctttggcaaatctgtcctaaaaaacaacccagccagcccaccctaggtgagtcagtgggccagacttccaagatgcccctcaaacgtttcctagggctaaatgggtggtcagtaaactgctggtgttgagtgtccagtcggatcacaaaactccagctgatggggaaaccttccaggtgctaccatcatcctgcaggaggattccagaaggttgtgaacacttccttctaacccagtgcttctcaacctaacagtgcaaccctggaatacagttccttatgttgtggtgacccccaaccataacattattttttgttgctacttcataactgtaatttttgttactgttatgaatcataatgttaatatctgatatgcgggattatctaatatgtgactcccccagacggtctcgactcacaggttgagaaccaggttctgaacagaaggagggtatcagagtccaagttgttgaagaatcctgagatctgcttctgtggttttcaaccaggaataattttgcttcctacaaggaacacctgcaggggtgctaagtccacctggcagaaaccagggatgctggtattcagccaccagtgtcccagacaactccccatcgataatctgcaagtctcccgtgcttacgccaagcagttatttcaccttaatgatgaggatgataaactctctcaggcattcattcaacaaacggacattaaagtcttcagtggtccctttgacaacatactctttatgtctgtctctgtctttttctctctcttgatccccatccccatcctccaactgtcttcttttctgtgccattgaatgatagaatggcagatgctgacattgtgatgatataactttcatgagttgaatctttgaacttccctcagcaccgagtcttcacacagccagagccgatgctctttagatgggaagagccctgttgggatggggagagtccttgaattttgacgatacctaagcatttacttaaaacctccccctttgtctccttctgaaagaaaccaattaattcaaaactgctaatatacagtaaatgcaaccctgaggtcatacattaaaatttatgcttgtcataactttttggaacttaaatctcttcctgaaattggttttaaaggacttccaggcagtgtgtataaattaaaatcttccttcccagcgctcagatatgggactttgtgcgttctatgctaccaaactatatttatatagatagctttgtcagatgtcacagaaacataacctactggcaagcccaaggcacttaattaaagaattacccacagatatgacttcctggagtagtcttttgttttaaaggtgagttgccccttactaatagagagtttgggtccttgacatgcctaggcaatggcaggatcctctttgcttcccagacctcagactcctcctcgtgcataaaaagcaatgtgttctctgtctgtttgattctgcgctagcggccccttccccagacctccttaactcacctgtgttcatgagcaaaggccctgatgtgcaccatgtggcttcgaatgttacaggcagacatttttctttctttctttctttctttctttctttctttctttctttctttctttctttctttcttttttttgtttttttctttttcgagacagggtttctctgtgtagccctggatgtcctggaactcactctgtagaccaggctggccttgaactcagaaatccgcctgcctctgcctctcaagtgctaggattaaaggtgtgcgccaccaccgcccggcttctggcagacatttttcatgtagtagttggcaaagctcctcttggctttcgcagggtgacttagagccggttacaaccacaccagtcacgagatgtcttctcaaggctactttttctgtttttcttggttgtgaagagtatcacaaattactctaggaaaacaaagaaagccacaacgacaacaataaacatctcccccaaacccccgctgataacattttgttgtatatttttgtagtctttgtaaaatgtgccttgtgtacacagatgtgcaggaacatgtgtgctcgatcgctcggaaggttttatttagagtcacgtcttactttttaaaagagtgcattttcacccagcacccccacagagtgcagtttaatgatgacggctgagattccaagttgccagacagtgagcttatgtttatggagggtgacatgatttcggatgaactggtttggggttttgtcgtttggaatatcttaagaatgctgccctcttgaaagactggggttcctgtgtgctgtgaaatttgggattttgatgagtttctgtatgatttaagaatgagtcatgattggcagtggagtatcgagctgtagtaacaggaagtgagggcacactacacatcagagcagaatgctagaaaaggggagagaatggacgttaaactggaaaaaatataccctaggctgagctagctgtggaggggaagaagggttctcgtagacaatctttgtttcttgctatatctccactttccaaacttttgctgttttaaatttgtttttgtttttttcaagctcaatattactatagcctgtggccagtttgaatcgaggtcattcagctttttgactgacaccatggcaggaataccatgaccactgtcgttctgccactgagggcttagcgctagcaaattaaattacccctgtgtttgtgtgtttagctctccacgaacggatcctgaaggcccccaaagatggaggcctgttctgccttttaattaacagctcttcaaatatttaactctctctgtgattcttttccatgaccagaattagaaaagccttgtattcattcctggaaattcacacaaatgtcaggagctttagaataaactctgccagtggtcacttcagccaaatgtgacttgtgctgtcactaggaatggactctggccactttactgatgtgtagcaatttacatttttctggggagaattactaacctgctttaaaagttaggtaggattcatttataacttagctgagagttttacttgtgtattttaaaagtaataaagatgattggttctggtaccctatttgagttttgagtcaaactaaatgaacttacacactctaagcggctcaaaggcttttagtatttttgagtctgtttgaagctggtggagccacgtgctcccatttagatctgataggaatcacggggtaggtgtaaaatacaattatctagatttattttctcaagactggttaggttaggactctcagcaacagaaagcaaaacgaaccaaccaaacagccaaacaaccaatcaaccaaccaaccaaccaaaaaacaatgtaagaaccttgccatcatgtttgaccttaacgaaagagaacaggtatggctgagcacattgtgtatgcacatctgtggctccagcacttgggccatagaggcaggctaacctctatgagtctgaggccatcctgggctacatagtgtctcaaatttaataaacaaacaaacaaacaaacaaacaaacaaggtcattaacttacatacattttaacacagagatcttgagtataattttatacaaccatgtatctacctcctctgaatgaagaatatttatgtttccatcacttcagaatatcccccccccccccagtattattttttattccagtggggacagtgtcatgattctgccaagcagattcaaaaactccataatgtcttgataaaatgccgcaccacttttatttgattggccaagcataaaccagtaggatatgtggaattcctcatcatgcaggaaaagggagggacatcttctagtttatttgatgtaagaaaaaagtattttaccaatgttataggaaaaataaaagtattgttttaaagctaattgggtccttagggtattatattatcattctgtgcctcagtttccctggctggatggtaatgggctgaaacggaggggcttggttctcacatcccaagccctctagctttttgggggaggacatatttgaccttgtggaaatgtgctaagaatgtttgctgccgccttaggaacagatgtggccgtttaaattccctttggatctcacttgtacctgggttgaattaggaggaccccaaggagaactgtgccacctgaccagcttccctggttttcccctgagctttgggacagagccacaaccttctgcactttcattcttgggggtccagtgactgatgtgagttgggccctgcatactgttgatgtggtcagccacgtcaacatgtggtcctttcctccagggtttactgagccccctgccactgggcatcctcctgagaatctgttcttcagaggatcacaatcaacagccatcctttattaattgttactcatttttgctgctttttagtatacagagtagttggtttcaccatatcgtattcctgcacagggaccactgtaacgttatcaccttcccctttcctgccttccttcatcctcttcaccattagctggtcctccccctaataattcctcttctgctttcttttctctctttccctctgattaagatcctgcttatgaaagaaaacatgatatcttgcctgtctctccattatcttcccttccctcctcctctttccttagctttctttcagttcacctgtcacagctggggaagggtatgctggccccagccttccccctggcctccggagcttctccagaagttttctttccaggttttctcattacccaaattctgactctttgtatccagaggctagacagttttcggtatgtatttctggagactggctacttttcctaattgccctctattaactcttttcccaaactccaagaccaaggatatatgataatacattgtccagacccaagacccaggtcgcttcccagcctgagggatatctgtatatgtgtgtgtgtggcatgataccttcaacatctgtgatgctcatcccacccggggcttgctctgggtccacatctggttttttcatccttgtgtccacccatcactgtgtacaacacccggcagtgggtgaattagaaacaaaagaaagggaagaaggcttatatgcagagcctgggctggctaaagggccacgttgtgcataaacccagccctttactagaaagtgcccccggtgaattactaacaggcaggcctcctggttagatgtctgtgtcacttgccatagttttcatttagacttccaagaagagtgtacgctcagaaatcgggtttgtttgttagtattgaggcaaacttggctctgctgttcagatcagtgttggaccgagaatggctggctaacggcttgaaagactttcctggggagcgctttcttgtcagaattgatcagttctaaagccaccgtagtcctctccggaagattccagttgacaagcttctcccagttgccctggataatccatttggggtcctgcatgttccttggtttgaaaatctttctttccctggaacagctgcgtaagcagtgtttgtaaccttttgaaatcaatgatgtttctgctggagtttagaataatgaaagagatgggctaaagaccagcttgggggtcttttgtttgtttggttttgtttttgacagagcaagactagttatattaactagtttcacctgagttttgccaaagagctctttgctgaggccagtctggtttaaccagagtgtctgaccaagcagcaaatcctctcacttaaaccatgatcttaggaaaaaaagtgaatataacaaaacaagtctcaagattgaccccagggccggctccctagtaggtgtgtggattgacctggagactgcactgcccacatctgtagcttgtcatcttctaaatgtaaatgtgtaaatggtgacatggacactcagagtattcacccaaggaatgctgtaagcaaaaaaaaaaaaaaaaaaaaaaagaggggggtgggttggggtgggggcagtgtgttgatgtcggatgactatctaacacttaaagtaatgccatgcttgtaggcttcactgaaccaggactggagtgtacccctgttatctcctcatcagagttcggaagatttgacttttgaggctgaaatataagcactatgtattgggatttagttttagaaatgaaggagctaggagtggaaggggagtttcggggctgtgcatgtgtgcttgcttaggttgacagtggctgctggagagagcgtctgggcaggatgtgaccttagaaaaagtgaccaaccaaaagcaacatctcctacacaggtgagcgagcctgcctgggtgggatttgagccttccttctgtacctagggtggtgcctgagggaatgttgtttacggagtgaagtttctccacccggaagaaccattgtttcaatataggaagtcagccgagagcctggatttactctgtcattttcaggaaaggagaaagcttagactcccaataatgccctggagtcccatgatgagcatgtaaaggaagcacccggacagtggagtgtgagcacgtgggctcccttagtttccttgtgtgatcatggacttgaactcttagaatccagaattcaggagcattgataaggaagttatttctgccagcgcgcatctctgttctccaagcttcaccttcagaggccctttagaccggaggccattagattccctctgtctctgtctgtctgtctctccccaacccctctgtcttcctcctcttatctctttaaaaaatgtcttttagaactgtgcccgcaaatgctcctaggtaggagtgcatggtcacacctgcactgcatgtccagtgccttagagatggtcttgggcagacacccttcatctttgatggctgaggcaaaggcaatggccaggcagccacttggtatccctaggtcttgctgagttcactttatccaccactttagttttcctgaactttggatacgtgcataaatagagtaatgcacataatactgaaattgccttaaagttagttattttaatcaaattatatatacacacacacacaaccaagatgctggaattaggaaccaaataggatgatacaagtgtcctgtggttcctagaaggttgagagttgggatagtaaggtcagctgggaaaatgcctgcctagccacatgaagccctgggttctatttctagcaccacattaactaggcatggtagctcaggtctataatcccagcgctctgaaagtgaaggcaggaagatcagatgttcaaaatcatcctgggctgaatagttactccaagatcagcctgtgctacaatgagaccctatcttaaaaagaacaatgtagcaagatgatagcagcagcagcagcagcaataaaaacaacaaaatattagatttagcattttgtccttaaggagcaaaaattgtcctgggggtatggctcaatagttaaagtgcttgacttgcaaccaagaaaacctgatttgatccctaggtcccacataaaaacattgggcgtggttgcacttgcttgtaatcttagtgcaggggaggcagagacaggccagtccctggggctctctgaccagacagtcctcagtccagtaagtggatgccattcctaagaatgacctgaggttgccccctggcctctggcacgtgtgtgcatgtgtgttcatgaatactctcagacacagacacacacagatacacgcacacacagacactttaagaactttttgtagaagattataaatttgctatgggattagactatctcactttatttttttttaaaggattattttcttgaggaaagaggaaatataatctaaatccagaacgtggctgctatttttatagctgatatattcatgctgtaaaaagaaacagcatccagttgtgtgtggtatttcagaaaggaccaaccccgtggatggcagatgcctgcatgtgagttcaaggaggtgaaaccacgtggggatgaggacccatgtttgaccctggcgtcatctcttccgtccggtgctttggatggagtgagtggctgggccgctggaagcagtttccaggacaccgttctcttaatgaatttggatgattgatttttgaaaggttttaagaataagacactggagggggcttcggttttgaaaccacacactgtgtattttgcaacagtcttcttagaaataaataccagtgtctatctgccaggcagtggtgggcgcacgcctttgatcccagcactcaggaggcagaggcaggtggatctctgagttagaggctaacctggtctataggacaagtgccagggcagccagggttacacagagaagccctgtcttgaaagaaaacaaaaagccaaccaaacaaaacagcatcttccaagaataccaagttattttaaacctgtcccactaactgtactaagtcacttactgttgcttcttcatgtgtggttttagataaaaggtcatgaagaattgagtggcctctggcttacttttacctcagtgccactgggtttttactgctggaagaaattctctgcatgagaaacgattgctgggtcacatctggcgagacgtgatgtccatgccagaacgtgcaagaggaactcgtgcatgtgggtcagggaagcggatggggccggttgccaccttcccgacttcagatgcaaccaaccctccacacatgtccaccacatgagcaggcattgacacactgaagactctagctgcactgccaaagagcatccgcagaacagactgaggtacgagcatccgtacctggaatgtgcacttcctaaactctgagagagctttgctttgagcatggtactagagctgaatgatcagtgtgccctcgagagtccgcaggcacctcagagtgcgcaggcacccagctcctggtacagataaccactctgtgaggggctctctgtgcttctcaaaaatccaaacacaatgtctccagccacctcctgttcacaaacaccagtagcatgtaactatgttatatgagagaactgtcttaagccacagcagagactagctaatgtcagctctacctgccttcagtctagacactggtgagtgttttactttagcaaaagcaaaagaataataatactgcaagccccctggagctactggaaaatatcggcagttctgaggtgctatttaaaaccattttcatcttattcatatacttgtagacagagacaagaattgccagctgatttctttttctgtacctctttacctaggtaccattaagaaccaagagctttaaaatagttgcagtggagttagtcccaggaggaaggttgctattctaggagagctgtgtttgtctgagatggacttctggttattctatgatggtggtggtggtgatggtgatggttgtggtatggtgtgtgtgtgcctgtgtgcctgtgtatatgcatgagagggggtgatgggtagagagacacccgaccattgagaaattgccttgacttctatggagtagacaagaaagttctaagcttccctggtagacatggcctttcccctttgccagggcttctgtggagggatctggaaggatgtggtcaaggattctggcctattccattccctaggaaactgtagactaatgcatcaccagcttgagaggcagatccccgtgaaaagccgtactttggtgacgatagttaacaacatggagatgttcatatggagactggttccaggagcaaggagagggcatataactgtctccgggaatctctaactgtacgtgttagaggtggccagaccgggtgcatcttgccaggagaagaggaaggcactcagatggttgggtacctacccctctctctctgtctctcaggaaatgcctgactgtctctgcatcagagctaggacactcagcacagctgtgcagacttcccatgcccagaatctcccgaggtcctttaaaaaggaagggctggtgcagaggcgactcatacccaaccacacctgggaccccttccttcctaggcttgcaccgtgtttcctgaccctgctcagcctgtgtgtgcacaggagaaagagggggcagatgaacagggagagatcacttgtaagcagggtgccatccgtggaaaggaacagcagtgggactgagtgactggacttttagctggagtagctgacgtgaccagtttttctaagtgtttcagtttgcacacacacccctgcccccccccacctccccccactcctcccctcctccacaccccatgtttccactgggtggtgctgtaagaattcctacctttttgcctcaggagtttccccttcccagaaagtcgcctctgcaacataatagaaggaagtcctgatttagaaaggtttcacagtttcatcgacacaatgagagagctggaggatgctctggcaggaagcgccccagttgctggatgtggaaaaaccaccatcattgtgtgtcctgcagaagtgttctcagcgtgctcggggcttgtgggttgttttttttttttttttacttctaccagttgcctctttagcacaaagagtgttcaagtttatctgaaagattccagttttctgtctcttagaaggaagattgctttgatttttttttcttctcgtaaaaccatcttcaagtatcaaagtgaataaaccattcctaatcttaaatcaagcatagatgttccagtgtttctccccgaattcacaagattgaatttactaacattataagctagaacatttgggggaaaggtctgccaatccagccaaggtctctgaaatacacggatagaatgctgtgggaaggagtgctcactgctctctacggaagctcagctcaaagaccgctggcaagatttgagtaagataaattgtctgtgtctgtgtgatggaaagtcaccaaggatgctctgggtgccaggtcccttccaggggctgccacacacaggtcagaaactcccaggctgctgctctccccagaaggaacaattctcaggaatcatttctgagtactatgcaaacgtccatggggggtccggtgggggataggtttccacttccgtcttcaggttccataatccttgcgtccacacgtcaaataaaaggaccagtccctccatgtctgagttctggaattcacagaggcttatgtgctgagttttccattaagagccaacctcaagctaggcctggtgacacaggcctgaaatcccagctactcagaaggctgtgacaggtacaaacttgaaccttgcaagttcaaggtcaactcagagtctgtagagaattcaggatcagcctgcaccttactcagattttgactcaaaaatttaaaaagtgaacagagctatcaacagttgttggtccagtgcgactcctagattcaataccccattaaacaacaacaacaacaaaaatcctcttgggtgaaactggcatgtctgtctttctctctgtctctctatccctcgccatcaataatcaatctgtctgtctgtctatttctacctctgttcactgagggaactggccaaaagaaatgtggcaaaatgtcttgtactaatttaatttaattttagtttttgagataggatctctgtgtagcataggctgtcccagaactcactctgtagaccaggctggaactcactgagatctgcctgcctctacttccatgtgccagtaggcccagctcagattgagcaaacagaacccagtccaagtgcctggagtcacagagtggtaaggtcagaaatcaaggacacttcctgacttgatcctgctgagaatgtcactttgtcttttggctaactcccgtcttggccacagagaggtgtaggaagcaggcttctattccagcggctgtcagcctccctaacgctgcgaccctttaatacagctcctcatgttgcggccaccagcaaccacaagatcatttttgttgctacttcctagtgcttttgctaccgttaagaatcataatgtaaatatttgatggtcttaggtgaccccttgttaaagaggctgtggcccacatgttgagaatcgccacgccagcgtgacaatgtacagtgtgattagggacctggacttgagagcagatattcctgagagcagatatattgggggtctgtctgttctgattactgggtccacacatatttgtcttcatgtttttaaggcacggcttcacagtggctgaggatggccgagagtgtaaacttgacatgcatactcaatgcaataaactcaatgatgcatgaatgaccactgaatattagcatttaaagggaaggctgctataggggtgaaagtttggggtttagcctttttctggagaagcccctgaaatctcagcattggcagaggtggagaatgtagagaggggtttctcagactaggactctttttcttttaaaacgatttatttacttttattttatgtacattggtgttttgcctgcttatatgccagtgtgagggtgtcagatcagttggaactggagttagagacaggtgtgagctgccattgtgtgtactgggaattgaacccggatcttctgccagagcagccagtgctcttaactgctgagccatctctgcagcaccccagacctggaatcttgttttggaacttagagatttcctgtagagctttacaaaccctattgatgtgatatgttccaacatacacatgtttatatgtatataaatagacatatacagaatattttcccccaaggagtccccaaaatggtccatgggtccaatacacaaggaagatccttccctgtggttggggtgatgtgtgtactcacatttttagatgtgtgattatatgtcttaggtggaatatatgagcttgttgctgtttaacagttttgagccataagaacagtaatttcatgcccttccacctagtaggtcctgatgctgtgaggaaccgtgacttggaccagccttccgatgaggctggctatttgatgaggtgcatattcacagccccctttcctgttaggcatcaaagcctggcaaggtaaaattcatcaggcagcctgtaaatctctttacccagaatgacttgggttgtgtctggtgttaggaaatcatcttgaattttcactggaggcttgattggattcatgggatcgattgcttgggagaagcccaaatccaagggggccttctaagccacaagcccatgggtgttctttcagagagcagcccggccggccgtcgtgtcaagggttaaaatagaactgacacacagaccgaatgaaaccagagctgcagttacaaagtgggacagatgtgggagggccaggtttcctgtggcccattttccagtttcctgcctgcaacctgcagaagaagaggaagctcagcgctagcaaagtctgagaaccctcggatgggggctgtgccgccagccagaaataagagtcgcggggagagcctggacaataaaaacaatcgcatagaaagtaaatggccaggttctcttccagaaatgtctggaaaggaatggcccttctgtttaaagaaaaacacgccccacatctctggggcgggggtgggatgggggtggggcggctgtacccaccatgcaagaacctctgtgctttatggctctacagctcgactcggctttcaagacatggtcggttttcttagaaccgttggttacctggagtgatttttccacccaagcactgtggttttctaccccatctcctggatttatggatacacagagaggtagccgtagacagcccaggggctgctgcctctgttgggaaatctaagcgactagttggtttctttcttcactctttgctctagctagctgtcacatcacattgtggtctgatgttttcaaataacaaagacaatggaggtgtgtgcgttgaagattccttgcgttctttttttttgtgtgtcgggctacctagagagctgaagggaatggtgcacagagagctcagagggtcagaagatactggaaaaggtggataatgctatttttcccccaagagagcgactgtaaaatgtctgggatctttagcttttgttaaccatccataaagccaaaatacttcaatcccaccagaaagaatttaagattaaaaaaaaatggtagctttatacacttgtttagtgagtgtttgttttcccatcacgtgctgtgttggaatcgcaggggatgctaatgagatgctggctaagaattcctagcacgtttgtgcaagccttgtttcctagaaggcaatattataaggtactcgcgtgagctttgctgcagccggatagcaagcaggatagtattctgagctttccccgggctatcccaattagagttgactagcatcttggaggtacacagaaggtgtgtgcttctgggacgccagatatttatttatcttctaggtggctcaccttttctccaggcccagaaagtacaacttgtaccttgaggaagttctgggacgttgccacgttagagatcaaagaggacccatgagaggctgtctagagagctctgaaaagataggataagatagggctgggttgtgccctgctggggtggggtgggaaatggatgaatttgcggatgttggaggaagtagaatgacccatggacgccatctcaatggaggcaatgtagccatccacttagttttccaaagaaaacacccttgtacgtgagccaccagcaagccagtcaagttgcttttgatttacccacagatgacaaagttccaggagagctgggcagtttgtatacacagtgagttgcaattctgttctggctgagcggccgtcaggtcagtaatttctcccaaaaagttctctcctcagatggaagattcagttttaaaacgtggcaaagtgtcttgcatggtcttagaggataaatcgctaggttgagcagtgcccacttctctttgctgttcctctgtttcttttaaaagacaggaacaagctgtagattgtctacagaagaaaggaaagcacggacattggttaccccacgagaagaactttgaggaacatggacccttggaaggatgtcatacctttgtttttcacttgtgacagctggcaatgactaaaatgcttcctgaaaataaattgtaatagtcttaggctcatctcagaaaaaaaaaaaaatgcaccagaggttctcaacctgggagtcatgacccctttgggggttgaatgaccctttccagaaggccgtcagaaaacacacgtatttatattaccattcgcaacagtagcaaaatgacagttatgaagtagcaacaaagtaattttatggatgggtgtcagcaccgacatgaggaactgttgcagcattaggaaggctgagaaccaaccactgcccaagacaaagacttcagagtttgttggtgttgtgtgttcatgtacttcgcaaattacccttgcatgcctaaaagttgcccgtcctggggtctggcagaccctagatgtattcctgttccttggtttcagtgggtttgtggatagcagtgaacctttcctcattggacaaagagctgcaacccggagaaatgtcagcaagagcttggttttggttttttctccccccacccccctccatttctggatccacacacatcttaagaaaaagacagcatgctatctgagtgtctcctttgtgtgtccttcacacaggaatatcccttgttttcagacagcaggtgtgatagctcacacctttaatcccagcactcagaaggcagaggcaggtggacctcagtgagttcccagtcatcccccatctacatagggtgtgccaggacagctagggctacatagtgagaccctgtcacagatcaaagcaggaagaaagaaaatcagaaggtccttttacctgcttaactgccacctctgtgaaatcccagaagcaaagctgataacgtgcaaagagaagcatcaggtgtggttcagtaggaaaaaaaaggaggagggggaggagaaaagtagaagaaaagaaggagaaggagaaggaggaggaggagnnnnnnnnnnnnnnnnnnnntatgtgttgctcctgtgtgtgtgtgtctgtgtgtgtgtgtgtgtgtgtgtgtgtgagagagagagagagagagagacagagagagagagagagagagagagagagagagagagagagagagagcaagcattggaatattgctacagctgctgcttctgataggaagaagaaaagaagaagaagaagaggaggaggaggaaggaggaggaggaggaggaggaggaggaggaggaggaggaggaggaggaggtggtggtggatttctaagaagcagttcaaatctctggctctggattatgagtctgcagccaactcagaggacatctggcgccacctcgtggcagatggaaggtaacatgtcctccacgttaggaaggaaacagaggggaggatgccagggagacggaacctctggaagtccaaagaccgcttctcaagcaggcaatctcctggctgcaaaagcagccagtctgttccatcttttactttgtggttctgtcctaaggtggggttttttttttcaagcgaagattaggaagaacaacaaacaacaacaacaacaaaaaatctcaggtttacatttgtaaagagctgagtgttgaaaacacagagtgaagatactcacttggagtatacaaaaaatgtctcttcctcatagtaccagtggcccccttgcacttctttcctctgtctgttgccctaaccagccagcttgggttatgtcatccacagacagacttgttagtctagatcctcctccgcccagtgcaacagttctcatctacttgattccctggccttttcctggaacacaagttccatgggagcaacggcatggccaggggcagcatggccagcaggggtcgctctctgctgacccgcccaagttggaggcctctggaattattgtcttatgctagccgggaaggataggtgctgtgctgcctgtaaggatatcagacaacagtcctaacaatgtacacagttacattccaagtcaccttgtaagccgacaagcacactgtggctcaacgttcacctggatgtcgttgactgtattgaagccattgattgcctaaagacaaagcccacagtccatacagtatctgaatgatgcttttgagctgggggggggaggccatctgatgtcacagcagcatctgtgaagagctttccttgtttaagaagtaaaggcagctagtgttttaagtagtacttgctttgtcccggatagtttattagcgaccttgtaatattcaatagtaaccctgcaaggcagggatctgtatcctctataccaccaccatcactttacctgtgaggacatacgtgtagagaaaggtgaatgacacccctaaaaccctacaggcaggcagggcagggcagacgctcagagatgaacacaaagatgctcaagtatcttctcacctgccgagtagccttctgggtatgcacgggcactccttagaggtgtggaaaagaaccctgccctagtcaagccagcagtgtctaggacctggggacactggtcggtggttttatgctgatttttatggaagctaatttacagctttgtttcttatagaggactggctgtgaactaattcttgtccatagatacccagtcgcgtctacaatgcttctttgtttctctcccactctttctttctttttttttttttgtcttcatttatctgtttcactattcctcatctgtaaatgccccattattcagatttttttttttttttttgagacagggtttctctgtgtagccctggctgtcctggaactcactctgtagctcaggctggccttaaactcagaaatcagcctgcctctgcctcccaagtgctgggattaaaggcatgcgtgaccactgcccggctattattcagattttgatgccattataaaatctacctagttcctttgtcttaatagacgaagtgagtagacagtagacttaatagacagtagtgagcaggagaatatctttgacctgcattcactgtagatccgtctggcaactgtgatttttaaccttgtttgaaaattccatttttaaacaaagacatttcttcattttcgctgtctcagcaaggtcttctccgacccctgtacccctgcccaagcccacaagtacatcctgctccttgcccagcttcagtgactttccataacacccgtcttccaatacactgtaacttaattcatcacgcgttttgttgttcacagcctgtctcttccactgacatgtgagctcaatacggacataagcccttttgtttactgatgctagacagcatcttggcataagatagatatgagagagagagagagagagagagagagagagagagagcgctagagaatgtagaggttgatgtttccagttggttatagtataatatatagcataatatataatactatagtatatattatatacatcttatttaaaagaacctacattgatatactcagtatcatagcttttatttttcccttttaatacatttatttattcttgctctgtgtgtgtgtatgtgtgtgtgtgtgcacgcgcacgcacgcacatgcacatgcacgctgcatgggaatatatcttatgacatacatgtgaaggtcagagggccatttgttgggagttgattatcttctttccctatgtggatcttgggactagaactcaggatgccaggctattgagaaaagtgcctttatctgcctcgctgtcttgctggccctgtcttgttttgttttgtgagatgtgaacaggtttcggcaaacatcatctgctacgcgtgaagctagctgttaatttgaattgactgggagaggattggcttttgctattgaatctcataccatcctgagccttttgtacccagctttgccttttatgaggaaggaagacgacagtaaaaagtgtaataaagaaagataggctgtcaacacggctggtctatcagtctgcttcctgcctctttaaaggggggtttttcagatctgatgagccattttattttattttaatcatttaattgacatggtaattgtatgtatttatgaggtgtgatgtgatgttttgatacttgttttctgtgtacaagcaaatcaacaacattagtacattcggtacgtaaacattcacagtccctgtatgatgagacttaacctggtaagacagtctagcagacagtgtgcttgcaggcaagcctggagttttatccctgagaaccaactacatgtagctttcctctgccttccattcgtgtgcgtttatgctatgatgtgcatatgcccctcccctcataatttttttaagggatggcattaaaatacctgataaaaccccacatattcaaaacaagagctaggcagggcaagagaagcatattctaattagcaaacaaacaaaaccagagtatgtcgtgtgttctctttaatatgtggatgctttaaaaaagtgacttcgtagtcaatactaggggctgggaggtgggagggctgggtgaagggggattcgacagcagaagccaatgtatacagctggaggagcaagttctgttttagggacctatacttcacaatagtctattgtttatcttaggaagatctgcaagacagaagtctgaggctccaaaaataaagagagtaaagaagaagccatcatcctgatttgatgggtgcccctttgtgcatgttgacacatcctcaaccaacaaaacccaaaaaacccaaagcggagtggggaagaacatttaaaagcccagactaccagggaatggatgtgggtgcatttgtcacatttctagcattgcgctcaagagttctagtccttggaagctagcaggtctgggcatccagccagatgaatgtcagctgatgacacattgtaacttaaagccggctctgataccaggacattgtatctatgcggtgttacaatatgatacagtctcatggatacactgtatccatataaacacttgctgggatgacagagcccacagcctgtccaagttgcaaggcttttgtgaattcttcctcctggtaagtcccatagtaaactgagtcaagtacagcagtcacggttcttagaacaccccccaccccccaggtacacgagtcattgctctttctggacagtctaaatgacaggtattgacaggtattggggatggaggtggggtgacatgctggatggttgcatatgagaacaactgcaagttacaaaatttgatgtggccatgattaaaatgaacagtagaagtggagtcaaagaaatatagcttgtgcccttgaggggaggagacgagtcctctgttaatggttttagctctatggctccatgtaatgtcatttgataaggggacagggagttagaaccaccttatgcttctgtgacacacccctccctaccagatggcttctaccgtaggactatgagctggctaaaagagaagtatgtctgatattcaccaccgaggaatgtgtggcttgggcttccaacacaaagtagaactttgtgtgactcagtcgtcaaaactgtggcatggaggagggcagagcagtggctggcgtgagcttggaagaagagccagtctgtgctgggtgggacgctttccgcacatgaagcctgagcccccagacacctccagggagcacagttgctcactgcaactctgagtgatcctgctgcagtttgccacctcagggactgggctctgtcctaagagttgttgggtgactctgaggtccttatcttccaccctggccttctgtgggtccatttcctgtattccagaaatgtgggcgatcctgaagctgattgccccatcaccaccaaaggcctcttccctgcctgccctttcatgcctccttgagctcccaagggcatcctagtgaagggaggaacaaatatgtgtgatgttgtagcagtcagctttagctatggtgatgctttgtaacaaacagtcccaagcgtccttggctcactgtggtatttattttacttctgcttcttcagactgaacctgtgccaggctttgatcaaattgaggtaaattctatgtatctcatcgcttcaacccagtatttcactgactagttcaagatacatagctaagcccaactctcagtgtgctgaggatatagggacttgcttcagtgcggctctggctgcctggccccttaaaggagtgaagctgggaagagagaggcaggctgagcacttcccctctctgcagaactccaaactggctggcatctctctgcctctccagtaaggctcctctgagtgaccactaaatttcaaagatctttgaaaaactcactgccagaagatttggctggagacacccatgaatttgaaacgtgtgtggcttatttgagctcattaggagctggagccataatgctggcacgtccttccaggagccctttcagagctcaggagtcgctggtgtggtttgaagtcagcagtaacagggctgactcttacagacccagtgactgctgtggtgaagggtgatctctttaaggataccccctttaaagagttataaataaaacatcccgtggggtttttgtagcacgttcttagtctggattgtctttaacagagacacccaggtggcacccacggtgctcagaggagcaacaggattctttcttctggctgggtctgtgaggaagcagggagggaatgcttgttaggggtgactggggggtggtggtggcggggttcatacttcaatgggatgttgctatcagaatcccaaacctgcttctgtggtggtgtggtagaacacagggtccgtgctggccaagcgctcaccactgagcaatactcctgccccgtgggacctacctgaagatgcagaaagatgtcaggcagtttgaagtctgtccaaagatagttgcctgcctctctctggctcctaggccacttagaagctgctttatgaagagcaatgagaataggtgctgagggagactcactgtagaaaactctcctcgtggccattattctgccttccagtcatctttgttgctgtactcatcgttgtcaccgtgggctgtccctaacagaccccaatgtctccttgccacagatggagtttcctcatcctgacaggcttgtctccgcctcacggcttggcttttgtgtgtcttgatgtagaacccccaaactccagcttgagatctttgctgagcctcctagacccagcttccaaatctcagctctgtttgcccaggtcaaaacacccacagtgttcgctctcaccagctatcctggaggaaggcttttcctaatgatatggatgttagtaaaataaatgggtaaggctggcaacctggctcagtgggtctaaaggtgcctgccagcaagtctgactccctgagttcaatccccaggactggaaggaaagaatggacgtctgcaagttgtcctttgaccttcatgcccaagccatgctttgtatgggtgcacacacactcaataaataagtgtaatagaacaaaagggtgatttcttgtgaatactactcaagtgatcaaaattcagatcatgacagtccagtgatcccatctgaactgcgtctgtatggctgagcagagtccatcagggcctaagaagtagcaagcagcatgtcaggaggaaggaacagcagagttcatgctacaggcaaagatgaaggataacattgttttatggtatttcctctcctggtgggaaaaacacttcctgccggtgtgcttgaaactggggcttgggcgactatatgacaagtgcttaggaaactgaaggactcctccttcagttggcgacaactgattctttaaccagcgtctactgactccatatctgctctatgcaagccctgtcctgggttctgagatggctgaccgtgtaaagagtaactgagttcccctccctgcaaagcagggctggctatattgggtgaaaggacagtttaaccaggagatgctatctatactttcatgaccctaggcccctgtgtgacttcactaagccctagcagacactcatggccacacttcagcaagtgtgactgaccaagatgcagttgatgtggtgggtgggaattagatggagctagccaatgggaacttaccacacaggtgttcattcctttagtcagttttctctaagtagctcccagcacagtgtggtctccgctggtttgtgattggtgaatttcaggacctcggggcactgccattgtgttcctgcatcggggctgctcataactgtgcaaccagaaaacctgtgtgtggctaggcagtccattgggggtggggtagaaagtactttctcttaagctctgtggagcagagcccccgcgcagcgcctgagctgcagacccgctctgacctgcctgcctcttgcccacctcccaggtatggagagtgcaatcacgctgtggcagttcctcttgcacttgctgctggaccagaaacatgagcacctcatctgctggacatcgaacgatggcgagttcaagctcctcaaggcagaagaagtggccaagctgtggggcctccgcaagaacaagaccaacatgaactacgacaagctgagcagagcgctgagatactattacgacaaggtaaagcaagccttggcatcatgggagtggggggtggtggtgggggggcagggagggctcacctctcttagttcactgaggaggagcctgggctgtgcatccaatcagaaaacagaagcggagactaggaggcagctcagttagtgaagagcttgccctacaggcacaggatctgaagttaatctctgaagcccagtgcaaaggcatggtgtggtggaatatgcttggtatcccagagccagacaagcagagaccggaggatctgtgggtgcctaatttccaagttctcggcacgtagagaccctgttttcaaaaaaaaaaatgtctacacatgaacacatacatgtacatgaacatgaacacatgtgtgtacaagcaaatcacagaaaacacatgaaaatggaggcaatccatacctttaatgttgagataaaaacaaattgctgaggttttcccatcccatgggaacccttggtatgttcctgaggctcagtttttgtaccctcccccgctttcatatgtaatttgctgaagaccgggcatctactggcatcaggctggcagcaggggtaagatgtcaactggctctggggacaataagaattacagtctgagctgggcatggtggagcacacctttaatcccagcactcgggaggcagaggcaggtggatctctgaattcgaggccagcctggtctacagagtgagttccaggatggccagggctacattgaggaaaccctaaaagcttgaaaaaaaaaaaacaaaaaacaagacaaacaaaaatgaattacagtcttcaaagtctgtctgttctttctggtcaggagttcggtcagaaggtcctttccagggaaatagtagtttgggggttgctgtattttaccacttgtgtgctggggattgtgtcctggggccttgtgcgtgctaggcaagttttccaacactgagttacacttccaaccctggacacaatattactaccacggggcacttcagcatctctgtttgtgaaatgggagacatagcaattccacagtcgggatctctatgaggattcactgaactactgtgcgctaagtacttagatctgtgcttggcctgtgacatttggcttattagtaactcctccaattagaaacaaagccagtctcatttttacatcatgggagtgaggcacagagtgctataactaaagaaaaagtatacttgttttatgtataatggatgttttacttgcatgcgttatacataacttgcatgcagtacccatggaggccagaagagggcgttggattccccctaagactggaatcacagcagttgtgagctgccatgagggagctgggaattgaactggctcttctggaggagcagccggtgctcttaaccattaagctgcctctccggctcctagagtactttttaaggtgaatcacagcaaggacaattggaatgagtttaatttatgtcttgcaaattagtttgtatgcttggtagggcaaaacttgttctatttaggataaatctatcaggccggtaattattggccatttctgtttgaacccatgcttgccgactacttaacctgatggacgaaaaggtttagaatcctagaaacccaagggaacttttgttctgggttcattactcttatggaaaggtgaatcttaaagtgatttaaatattagttccggatctatatttagtgccttctgtctgcaaacctctttggaattgaggacacaaggattacacgtttcaggaaatgaagacgtcattaattataaagggctcctttctgtgctcctaatagcatgcgattatgtcattgcggcgctaaaggtgcttcccattagcacggcaattaattaatcccgacttaatgcagtcctacgaagatgtaaaggcacttctcagctaattgcactgtccggaagccaagcagatggcgtctagctttgcgttttgttcccaagttctgtgttctgccatgagaattgagggccctgcaggaaaacagtctgtcttgcctgctggcagagagcccagaaacgtggcctttctattgttttaaatcaaggtgtcaaagaaaagagggcttgctcctgggcctgggactagagtcatctcttcaagtcctgggcactgaacctgagcgcttgtcccgtcagcatgaagggatctgtgtcctaggcaggggattgattgttagtggctgacagcctttgtggagacaagcctgtgatctctggagtgagcaacttcaggttggtgcgggtcggagggagagacagacagtaaagcaactcccccacaagcagagggccctgagctcatggaacccctgaagaaatgctgggcatgatggttcatgattattcacgatggtaattcctgcgctgagcagggcagacacaggtagatcctgagggctaccgaccagctagcctagcctaataggcgagctccaggccaaagagagaccctgtcacaaaggatgttcctatcacaaaggtgttcctaaagatgacgtctgaagtcctctggcctctacatgcatgcgcatacttgtacacatacacacatgcacacacacacacacacatgttcccatgtatctgcacacacatatacacagaagtacaacagacatactcaaaagcatacctacatatgcacacatgtaccacacaagtacaattcacatacattgacaagtacacacatatgtacacaaacacatgtatatacaagtacaatatacattcacacgaacacacacatacacctacacacaagtataatccatatatacagaaacacatgcatgtatacacacacagcttttttaaacaagcagtttcatagctgttagtctgttaggagtctagggctctgtcctgggcacttcctgttctctttagacgagatggcactcccattaggacaggtcctgcaccagttttcctatatgaaacagaacattcagatttggttgggagacacttaagcctatgcagccagtgggtggcagggcccggggacccacctgtcctgtgctgttccttaagacacaaaccttcactgctgtcttggaacgtctgagatcaggtatgatgcccatacgctgttctaaggtcaggagtttttattatcaagggttttaatactgaaacaggtccaaacagttgtcaccgtagactccgcatttgcctgttttctgttgctattacaaaacacaccaggctgggcgtataaagaaaggagttctggagacacagaagcacagcagtggctctggtaaagggtccccttggccgtggtgtcataacaggaggatggcgtcctgccgggagcatgtgagaggagactgaggtggggtttgctgttttacaacaacccactctcaaacgatccatccctgaaagagcatctctcccacaccctcagtgacataatacatgatcacatgacacactccccagccctaaaaggtacagtattgccacactgaggacttgggaactctggggacacactccagccatggccgacagcagagtcgcaatacagttagaaaaggaaagaagagggggaggagggaagagaaggggaggatggtgaaagggaaaagagaagggaggaacagaagagccaagaggcaaacgcaggaagacagtggccactgtggcattaagatcatctattttgcattttttttctggccaacgcttccagctttgccagccttgccagccttgcactctggtgagctgcatcggtcaaactggtttaaacgagtttaactctaccgacattaggctggcaatcatggccgacataaatgtctgacttctcactagaagggcacgcttggctcagagcctctatggctatgaagcccttgggtcacgagggcctgggtgtgatgtcctgctctgtttcacaggcagatccaggctggccccttctgcttgtcagtgtgacagtcatcgacaccctcctccctcacactcagcctgtgagcgggatagctctatgactgtctcgctctgcaagctgtggtaattttgtctgctgccttctatagcgtcctttccctggcggctgaaaatgtgcatcctttggtttgtcctaatagggaagtttctctgcccgaaaagacaagcctgcgaatagcattatttttatatggtatatgttgtatttttagcttgttccagcatattaaaagtgggcagaggagaaatgtgtaaaaaaaaaaaaaagctatacaacaagacacggagggaaaatagtttatgtgttcatgacatctggtagggtgaagggctctactcagtgtcccttcaaaacatgtgccccccctccccccgccagcccacagactgtaacagagaggtgggcatagtgtggcctttggactagatatttgggttagaatccagctgtgggagaagcaatctctctgggccttagcctccttttaaaatgtatttatttatttattcgacatatttgtatatgtttgtttttgtgtgcacacatgtatgggtgcatgtggaagccaacagtcaacgtcaggtctccgctgtacgttttgagtcagggtctctcagtgagcatcagggaccctcctgaccctgcctccccagcactgagactgcaaacacacaccagagatcagagctgaggtcggccctctggcttacatcagaagcactttactgactgggccgtttctccagcatccccgtacccttatttttttctgcgaactgaggattgggtccaaggccctcacatgctggcaagtacactcttcttgttaggtacactgaagatgacagcaaactcaattcaagggcccacggtgaatagtctcaggggggcctgcacccctttgacacagtgcccactactggaaagatatgaagccttggccagagtcgtaatgtgggtgatcgtgtttctctaccgctagttttaaaactttgggtgaatgcagagaaggaaaatcaacctttgtaccaacccttgggatgggtgtggagatgggaagatggaccccctttgtcctgctgtgcaatggtctgagagtggccagcaacttttgccagttaactttttctacacaggctgttctgaaaattctcccacatttcagtgcccttcctgtccctctgggtcagagccagcgtactcccctgtgcactaagagggcatgaacgtggcgcccactcccctgtgcacttagagtacatgaacgcggcatccacttcctggtgccctttagagattttggattcaggactatggaggttggagggcagctgtttcacttccactatcacaaaggtcagtctctgcagctcctccccttccggatcacgtgaggatctggagttgaggatgctcagtactcggcagtactcagcagcctatgtggcatcaatgctcaggaatgcacgccattttaccatccatgtttgtgaatattaatgcgttgggtaacaggctggttatttagaggtcttccattgtgataggaaatattaaaaaatggcaccaccccgtgctggagcaagacaccagcaggcaggctggcctgttctcatctcgtggagactctgactgagagctctgaaatctctccacctcagctctctaagttcccactggcgggtcgttgccacaccagtcccatacttcaaaactctcacggccttttgtggtgcacttttggcaaacccacgtttttgcagcggtaccttttctctagaaaacccagtcgagcctctgcttgaaggaaaacaccacacaaacttagttcagaatcaatggtaactcaatcgctgggcgcatcaactagaatcctaatcttgttaagccttattaagtctaaatcctccagtggcaaatcctggcggattcaccatcaaaactgggagacacttgtagctatatatcttgacctttcactgtccccgtccaaaaagcctccctctccccaactcctgcctactctcttcctctatccaaccaggaagtcccgcctactcgcccagtgattggttcctttattcactggggatggttcacaagaagtcaccagagtaagagactcattcctggttccaggcaacccttcctgggaaagcagaattagcatcaaaatataaacagcaccagggccatcctcaacactcccccctcccctccccgaaccacacgttactattattatttattgtttagattgggtctcgccatgcagctctacaacaaacataacgctgtgacagggatgacacttagactcaatagcacgtgtgtcacactgtgtctctgacaccaagggctttaagaggtcactgaggctgagaggaaaactgtgcctgagggctccaattctggagtggccacagcgtctgcccgcacatctctggattccctcatggtcacatgcattatcaatggaaaatctggggtggggtgggggggcgtcagggattgcaacgatgagctccaacaaaagcccacccagagcttttgaagaggctactgggcagacctcagtagcattccaggcggggggctgtgggggccacccagtccagagagcagtgtgctttacttctgggagatagggtagatgggtgagggctgagaggcccctggccagaaactctcaggcattgagagaccactgagtcttgggcagtagaaggcagaggtaggagagggaccagggctctgggtggtactcaccttccagggatagcttgctttctctgatgtgaatgactctgaacgaccgtcagctcagctctgatgagttgaagggtttagtaggctccccccacccccaattagttttaaaccatcacaccagaaaggtagacttgatgatgtaatccgaaggatgtctttcggagattttgttagtaagctgactttttattccttcacgatactgggtatgcttggttttgaaatcaaggaaggaggaagagactggtgaacagtcaacgtagctgtccccctacccccatggatgtttgacgtgcgtgtatgtctgtatacctggacccagaagagggcattagtccctgggactggagttacagatggttttggagtgccatgtaggtgctgggaattaatcccattcctttagaaaaactcagtcagtactcttaagcaccgagccacctctccagctccaccccttcacgacttaacagctcttgggtgttcatagcttggcacggacaagatccttttctgtcatctctgtccccatgccctcaagtccctcagccatttctttgaaaatgtctctcccactccttgcatggtttggcaactctgggcctggggacagacatgtaaatcattcccatgcttcaaattatagaacgtgctagcagtgatggggtgcccggccttccagaggagggaggaaggagggtagagacagagagaagatttctgggggtcaagatacttgttgatcaggagctcctgggctgaacctgagttcggctggtgccaggctgggagcccttaggaaggaacgccaagtggcgaacagcagtgtgggcagatgggaggtgtgagcgtttgacctttccaagtgcagaatatttatttagggaaagaggttgagactgggagagaagcgtggggcagcatctcgtctcgaaattggcactttctcgagagagccagcaaagtgtggaaagcaagaaagagccatggttagatttgaatgtttggataataaaaaccgcacatcccccccccccccatgctttttggcatcggtggcttcatgctctgacgccaccactctgatccttttggccagttactgagaaagcgtggtccacactgagcagactggccgcgccatgacatcagaaccagggcctgcagcgcccctccccctccagcaaccccggggacagggaaggaaagtgtcactgcctggcaatcttgcaggtgcagctgctcatgggaagctgacgacatcgacctgggctgctacagacggagacccggaagcttacttaatccttacccttttccatccaacagacctattgtctctgctgttggcaacgagcattcttcccaggaggaggctggaaactttgccagctcccttctcagccgcagatgaaactggcagtgggatgaacgtccttcccttccgtctccacagcaacctctcagctgatcctcgcaggggtaccgcgggatctttacctaattggagggaaattaggggagagcagtcgagacagagtcaccggctccaaatcccaggaagtcgaacccatcaccttcttagcttaattgggtaatttgttttaaatggggtatgcaatcacgctgagaaaatgttagtattaataacgtgtatctgaagtcagctgtctgggctgaaaagccttggctccggtaggatcctttaatgtcccccaataattttttgagaagataaaatgatctatcttcagagtggagaccggatgcgtccagcaggtgctcctaccctggaacttcttcgaacgcccagctgagctgttgtcacagtgcttctgcctggccctaggcctgtgtatgcagagcccgagccctctgctgggtgtctctttgtaccacgtcagccgctcagagtgttagaggacaacagatggcaccagggcttttgtccagaggccaagggtgtaaccaggacttccctgcacgaacttggccctggaagctacctggagacctgcttggtagctgaactccttcccggtggagggcttctaagctgtccaccttgtcccaggagatggcaaccagcataaggtggcaggccgtgggagtgcgaaggggtcggaggcgtaatttgggggtgcttcctgtcttgcacatggttctgagccggtgtccctgaagccctccacattcctccaaatagggtggttgctaagaaacgggatgaggcagtcttgagagcacagttaacacggggctgctgcatggtactcagctgcttaggctcccacagccctgccaagtcgctgcatcaggcccttgcccttgcccacactgagtcccccttggcaggctcccgcattcctgctccgggctcttagctgcgggaaaatttagggattgtgtagacaaactgacataaaaccgccaacattcacatcacacctcccaccgcccaccaactgccagctgctcctctgggcggcctcttcccactcccctcacaggcacagctcttaccccagatggtaaggccaggagggaagctcacgtgtatggggcatgctgtgtgtgactcagggctaggcagcgaacatttgttaactcctaaggcatctggccttgtggtcagggatggacccattctagagacagagatactgagtctcaggcacatgggggttaaatagcgcacccaagatcaaacagctgcttggagtcaagcattcatcttagaaatttggaccttggctgcgtagtttgtgcagattgctggaggcccaggttggagtctttatccttcatacggtgtcctatggctgatcacaatctcttatgtaggccaagagaaggagaggccccaacattggaaagattgttctgagccccgagtgttaggtaaggtgctctgtgctagctgtgaatgggaggtgttttgttggttggtcgccccagagaacacgcgcacttcctgaagggagacaagctgagggctggagagatgaagcagacagagtttgaagccagtctcatgtatatagtgagtttgaaaccctgttgagagagaaaagagggagagagacagacagacagacacagagagacagagacagacagagacagaaacagtcagaaaagagacataggagacaggaaggtatgagacaggcaggtgtgcccctcctgtatgtttttgtaccaccgtaaccccccagtggccctggggaaaccccaaactctccttatcatctggcctccctctactggttctgaacatcctaccttttagcttcctcattagccctgcctaccttgcctcccggctccaggccacatctgctgctgaactctggctgtaccttgccagcccctgcttggtatctgccttccctgctccaggccggctcctgtctctgtctctggttactacatctactttactgcccacttccacccctcccccacatttttttttcttaacaccactatagttagtctctgcagtgcctgctgtggtagcttcctgtaactgtagaactgtagaatgtatgtatgaggagctagcagtcatcctccttagcataggaggaaatctgtcactatgaaaagccagcactggaaaggcctgaagaaaccaccttgccccactggctgcagctctaacaagcaaggatcccaaaaggagagagagaacacttttattcttattattttcttatttcttattattattattattattgctcggggcttgtcttagtgtgccttcaatggctgtaataaagcaccgtgaccgagagcagcttgaggagaaaagggtttatttctgtcatgaagggaaggctgggtagtaaccaggatgcaggagctgatgcagaggccatgcagtaagctctgcctactgccttgcttcctgtgacttgctcagcctgcttttctctaccactcaggacttcctgcccatgggtggcaccgcccacagtgggctgggccctcccacatcaatcattaatcaagagaatgccctccagattttcaataggcaatcggatggaggcgttttctcaattaaggtccctttgtcctagatgactctagcttgtgtcaaatggacaaaaaaataaaccaggacagggccagagactgagcccaaggctctgtctccaatatggaatgtcaaaaatccatacagcaaagacagggtaggagtgtatttctgtccacttggggcgctgatgtccccgtgatgactcgcatcattagagctggccactcaaaatggagaaccattgcaattattccccaacccagcccagaaaggcttatgctggcagaacagtcttacggttcaatttattgaggacaaacactcttggaggaatgtttaaaggagccagggtaaaattagagctgaacccagcaagcggcagctgcaaagagagcaggggagaaagatgccctcagcatccagctcgagtctcctagggaagggtgtcctgccagaccagcaagaagaggagttcctcgtttgcagcaccctctgggtggcacagtgaccgctcaggcgagtctgaggagccccgccgctgccaagtggccgcatttggtgagctggttcacactgcagttgactaatgccagaaaacaaagaaatcttaacccaaaccatgagaaaacttcgaggctggcagctggtggggcaggtcagctcttaggagccaaacttagggtgtgttattcttagaagtttgggatggtgtgtgtgtgtgtgtgtgtgtgtgtgtgtgctccaaacttaagatattgagacaatgggtgttccagctctgcctagcctggtgcctaggaccagcatccagcactgaaggcatgctaggccttcctgagggccactgctgagcggggcaactttaagaagcaccccactcacaaaggctgctctaacagataaccccagacttggtagctcaaagtaacagaattttagtgtcccccaggaagccaaaaatccaaagtgagctgtctgctgggcccctggatggcttcaaggaagattaccaccacctcccatcccccaagccctggtagctcccagcagtccttggtgttccatagctgtatccctcattctccgcctgtctttacatgtgtgttttttctttcttgagtggccctcttgtcctcttataggacactagtcgtttgtacttcgcgcttaccctgagtctcaacatcccttggccaatttcatctgcagagatctcatttccaaataaggtcacattctgagtttctgagggggcatgagttcttggggggaataccgttcaaccacactgtgggagtagagaaggctgtcttgttaaaagtagctcaggtgggtggggtcaaggagcctttcagaagtgctccctccttaggggcaaaggtgactcaaccttgcctgaaccatttagggctgactctatccctgttagagcccctgagagcccacaagccccaggcagagatggggcagggcctacactgctcacacacagtaacacttgggggcttaccggactcactctggttctgtttttacagagcctggatacttccataggaaagtttctcttggggtttgtgggtagtttgctggctaacggacagggtgggcatgcgtcctgtgggtatcatattctaacttcggagaggggaccctttgggatccgtgtcaggagaatgagtcagcctccagtctggacgtgacctcagatggtgaacttctgtagggtgttggctgggaagccagtgacttggagacatgccacccttgctgctagactgtgggaactcagctcaaagctttgggtccctcatctgtaaaatgggcgtttgagtggtgtgaggcttcctcaaagattttagtgtgaggtgccagctaaggaattctgattgccccacagcagaataatagagcagtctgttataatgatcgccgttggccatgcagaatccagctgtgcccagtcttgtttcaaggactctgtgagcaaagtacagatgcatatgagcctctaagaggaaactatctcatgagctattcttctttctattttagaggtggcaaactgaggctatgctaagtagaaaggctaggacttgaactcaggtctgacataccaatgttatttcatgtaatgctggtccatccgtgctggtcttcgctgtgctggtcacaaagccacaccaggccatgtgtagtccatgatcgttttgtgtcactctttttaggtggtataccatttacaggttggttgttgatggctagtcaagtttgggattatagtgtcccagtgcttcatgccagggtgtcccatcaaagcaagtgcctccctgccccagggataggcaaaatgggcagggatgtttgtggttataggaagtaagcctcctggaagggagacagaaggagtcattcttcagtaaggaccttacttccttagcaggaacccagttcctaggccacacagccagccccaccactgctttggaatgcaaaagccctgggttctgttacattagtaacagcctgtggacccagggcagttgccttctagaagggggtgtggtcattgagcagaaatgtttcgggactagctgtggctacagtccagtttaggcttcaggtacagttaccagaggcacgtgacccaggagacacatgacccagaagacatgtgacttgactcagttccaaatggacaggtaacacgttgtaaatacgtaccgcatagaaaatgcagattaaagaaaatgctataatcactcttacatttcattatccatcttgattaacttctttcttttaagcatgaatttatatatctatatattatgtatatatgtatacatatgtatgtttatgccaaaaagatatatacatatctgcaaaaattaacattattccattgagatgatggggccatcccatgggtactataatttttcacctaaggtatatgtaaagacataagcaggtcaaaacactactgttctctgaaataatgacaggacacccattctatggctgccctaatatttaattcgcctctctgtggcggaggattagatcaaacctccctgtctacacggtgactcctgacagctccatctttgcagcagctgggtggtgtgtcccttgtaaggtggctgtgttcctggcaggcagcagcccgcttgctgtgttcctatgtagcgtttgctctgagaagatgctccatggaaacccgtcatcctgtgtctgccggcactcaagctctggttccctgtgccaggggtctcggtgacaggccctggggccagcagcctccagtgagcccctcaggagccacagccaccaccaagaagccaggctttgtgtccttgtctggcagcatgttccctccttcaagaggcttcatgcagcagttggcattgtctgggtgtctggttctcatctgtaactctgcacgggacctgaggtgcagtgtctctgctacaggctgtgagccccatctttgtgaatccccagagtcctcagtttagcaatggatccctgagggccactgctcttgtcccctgcccccagccctgaagatttaataattgggtggtgtgaggttttcttcgtggtgaatgtcaaatgctggctatgttcagcgttctataccataaacctcacatctctttcttgtctgggtccaactaaatcaaacatcgtgtttcctctgcttggttgagatatacaaaccagatgtaatctgcctgctgaaccatgggccgtttaactcagaaatgtggaaaaaaaaaaaaaaaaaccaaaaaacccaaaacactagaatatgtgcagttatctaggaggttcatattgtctattaaactgctagccaggccaagagcaggtagtgataatggattaatgctggctaaatggggacagaaaataaggacaataatgctaaagctgagaaatgatactggcttttcatgtgtggatttattgggtatctggttacaagatgaggacttaaccccagcaaagccttgcaagagtatcaagttgatatttctgggaaaggtcctccgatattgtcgcctttcccagctgtgctctcaggacaaggctgagaaaagccccagctggtacaggaagcttctgtgtctttccctccaggctgacatacatctctcagggctgagctcagggcacgaccgtggcaaggtcagaaggcaaaaaggctgcaattccagggagcccttggaagatggagcgttagggagctggatcaggaaaaaggatgagaaactcactgggaaaatgagagttggctaagaagtcagtctgagcacatgaaagccagacatggcgcctgaggtcaacactgaagtgccagcccaggaaagcacgttccacgcgtacatggtgggcatgtactgacacacatgtcaacacacatgaagttctagaagctctcagaggagctgtgacattttaggggtatctatgtagatagcatctatgtagaaggttttagcttaaatatgccatggggtgctgggtggggtggcacatgtctttaattctagcccccgagaggcagagacaggctgctctctcttgagttccaggtctacacagtgagtcccagactggctagataataagacactgtctcagaaaaaaaaaagtggtggaagagggggtggaaagactaagaggcagagtttagaaaacattgctgctcaagtgtctcctgggcatggccgatatacctgagtaacggtaatctacattctgattaaatggtctctttcctttctctttcctttgtcttctttttccttctttccttcctccttctctccccttcctccccttctcccttctctctcctctccttccccttacccctctccctccttccatccttccttccttccactcctttctaggcttccttttctttttagctttctgagacagtttcactgtgcagcccaggctggtctcaagcctcccatccttctaccccagcctccagagtgctaggattacaggtgccagcacaccagcccagacgggtattttccactccacacatttcatataggcgatctgatatatagtctttaaaattacttagcacaatgactcctccatccctgttgtagcatgtctctgcccttcctgctttttgggggttgcgtaatactccattctaagtctggctcacagtttcctgtcctatgtcagctgtgagtcaggacccagcatgctgctctccatctgtgactggcttttaaaccccaaccagttttttgaggaaggacttaaagtgcttttcaaatatattttttaaaagtatgtctgtatgcctgtttgagtctgtgttccatgtgtgggtgtccaaggaagtcagaagagggcatcagatcctctggaattggagttacaggcagttgtgagccacccaacacgggtgctagcaacctgacttagatcttcccaaagagccatctatgcccttagccactgagcaatcttgttagacaagatttttgttataaaactgttatttttataacagtctctaattacttgttagctaactcacaaatctagtaatcatctctctgatccagtcatttaaaaaaattagtttgtgggactctgcaacagtttatctggtccttctgtgtagttatttgggctcaaccaattcactcaacttagatgggtattccaagtggttgagaagaaaaaaaagttttctgccaaaccggaaagtattacaagctataagtaagatcaaatgtaatatatagaatataaatataaagacccggaagttttagcagaggaagctccacagcgcatactcctttatggcgggaatggctttgggtcatgcaggccctggattccctgatctgatcttttcctgcggggagctgggtttcctggcatggcttctacccaggcttggtactctttcagtagagactctgctcccagcagcaggtggaaccttttggcttccccattcctctgaagatttgccagcatggggtgacgtcagctagagtcaccatgggaccagagtcacaggatttggtgggatgagttgcagcctggaaccccagcatacccaccagccatgggactgctcaaccaggaccaatctgccctgttccttggcacagatacacttgtgtgctttgctagacaaggtctctctctggggcgcatgtggtggggtttcctcacatgcctcttataaaatcctgccccaagaatttcttcttgaaaatcttagtaacatggcaacctggttctctcctgttgtagcaaaggatgggaaaatgtagtaaggtagcaagcgaaaacctaacaggtcagagttagaacaagccatgagcacccaaggaaggtcaggaattacagagacctctttatcggggtactactgtgctttcctccccactgtgtggaagtgtagaaaggctttagtgccagtagatcttggtggtctgtggctatggctccagctccatgcttgccttggcagtggaaggatgctaccctcttccctccactggggctgctgaaggatttatacaccagattcctggacttgtggggcattcaatccataaagggcttctccctcaaatgattttttttttttacaaactttagaaggatgagtttgtagagaagcctacagggatctttctcatagaataatgctggctttttgagccagagggaagccatgtttttctccccagagtacccaggactccgagtcaaccatagggtgagacctgtagcaagcatttgccagacagacctagaactaggtaggctctacagggactactcccacagctcaattacccttaagaacagcatagcctgccacgtgagacccactttctcatgggctgagaaaactcttgccttcatagcgattttcatgttccatttatatcatgctgctggagggatgaggacttaactgaagagccagaagaagacaccagcaactaagaatatgaaccaaatgccataaataaccaagcaggcgacttcgttttctccagtggctttcatgccagaaatggctgcctggctgaagcaaacgttggttgcgttgctgggtggcggtaacttacatttcccagatgttctctagcagagtgcttgcttgttagtatttcactgtagtctctcggttcccagaggcgggtaagacagtcccgtgttagcgtgaagtcaatctcccttggcccttcttgcttaaccttggccatgtgcgtcactgcagtactcaaagtttatctcctacttcttagaatttttctttttgcatgtgttatgtggcgtgcacgcatgtgtgggtatacgtggtacatgggtacacacttggccatgtgtgtgtagccacaagactggcatcagatgtcttcctcactcactctccactttacttgctgagacaggaacccttgctgaacccagagctcatggattcagaatggtctagctagccatcctagatatctagcttgtcctagacatccatccccctccccccttttacatgggtgctgatgatccgaagttcgcgggcctcatgcatgtgatctattcgctaggcgctctccccagctctctcttctaattgcacaacaagaacgataaagcctgcttgtaggattactgtgcaaatgacatgtgctacggtctgaatcatcccagccctgcagttaagtgctagctcagtggtagcttttgctattacaaaatcgtcacagacaatagatgagaaaggcaccacaggctggagacctcacccctcctcctgggtcaacaggaccagagtgtaacagtgaaccttcagtctctgacgtcactccttgtaggcaccctgtgggcatcaggaatatggtggcgctttggctgctatcatttgtggttccaggggccccctccttccatgtcactggctcaccccttctaaatgtctgggttttttttttgttttttgttttttgttttttttgttttgcattcacagaacatcatcaagaaagtgatcgggcagaagtttgtgtacaagttcgtctctttcccggatatcctgaaaatggatcctcacgcggtagagatcagccgggagagcctcctgctgcaggacggcgactgtaaggtgtccccggaaggccgagaggtccacaggcacggcttgtcctccctcaaaagtgccagccgcaacgagtacctccactcgggcctctactcgtccttcaccatcaactccctgcagaacgctccagaggccttcaaggccatcaagacggagaagctggaggagccctgtgatgacagcccccctgtggaagaagtcaggactgtgatcaggtttgtgaccaataaaaccgacaagcacatcaccaggcctgtgatgtccctgccttccacatccgagaccgctgcggcagcggcatccgctttcctggcctcatctgtctcagccaagatctcctctttaatgttgccaaatgctgccagcgtttcgtctgcgtcaccctcttcatctcggtccccatccctgtcccccgactctcccctcccttctgaacacagaagcctcttcctggaggcagcctgccatgagtcggattctctggagcccctgaatctgtcatcgggctccaaaaccaagtctccatctcttcccccaaaaggcaaaaaacccaaaggcttggaaatctctgcaccccaactgttgctctccggcaccgacatcggctccatcgccctcaacagcccagccctcccctcaggatccctcactccagccttcttcaccgcacaggtgagcgctattcccgggtcctagctggatgcagggagagccacccctgttctccttgggagagatcccttggccagtgtcgcaacaccactgcatatgctgagagagaggcacacatgcggaaaggcttgctatcctggtaacagagggatattaccagagtaaccatgtggggagacctggggcatttaggccttaggaagtttttaaggcatattatttttggaggcactcataagccatgtgcttcctgataagaaaaatcatgttcacagattaaagtcagtataaagctgtgtgggtcatggtgacctttaacaagaaacacaagggtgacatgcagaaggaaagtccctaccaaaagcagggctgctgtggggaagctcaggtcccatggggagagaagggaaaattcatggggtgtgtaagtcttagctgctgggagcccctgggaaaggtggcctttttcccttcagaagtgtcacagtggtgtctggttcagctgccgggcagacaggttgggtggttccagatcaaagcagaagcaagctagtggtagaaggtggcagcgttgggctagattctgcttcgtaggtgtgggaaagtgggtatctgctttctgggtgatgctctatagtaacaacacattaggacggtgggcatgctaccctactcagccagctccaactggcaggcgtcattgtcctggagctttgaggctccatgccagattatgctgcaggtggcctggaattcccagctctgcctctgtccttgtcatagctgtccctgtcaactcccaacagtagccaccaaattcttcccatgtgccagacacctgctccacatcacccaccttgccacctgtgtcatagcagcttccctccccccagcctctgtgtagatactcttgccattacaactgcctggctgaggtggctggggttcagaggtgaagtgccttgacctggatccaaagctgtaagtcggaaggatgagtttggagccactttgcatccagcatccatccactctgaagctaaagtctctgccatcccttggggagaagacccggccgctcttaccctgacaacagtccgtggggtgtgcagaccagcggccagcaattctttgctactttgctttctttgccaggcttcccaggggtcacgtggcagcttatttttgtgaagtgacttgaggaactgtgctcatttctgaggagaggcccaggactccggtaataggttggaatgggcacatacacactcccaaattagcattccctaacaaagcagggctgccaggcaacaggcgagaaacctgcctctcaagtagcagctcaggcaagtaagaagagtgagagctgccaggcagagtccgggccttagtgtttaagactgtaaggctgagagtggtccaaagtcaggccaaggtcatccccggtttcggcgtctgtgttctctgtgagcctgcatccccttctctgagcagagtggggccgacaccaaccctgtctatttcaaggaaaattgctaccgtggctttggtcctagataccgtgaactcagtgggggcctgggatggcagggcaggggataggaggagagggaccttgacctgagagagggatcctaacatgtggacagagagttaatccccagagacagaacctaccagagtggcctaaaacctagagagaatgcttaggaagctggacttctgggacagagggcctgtgccctcaggcacatgggggtcaggctgacaggatacaactttcattgagtgactactcaatgaaaggaaatccaatggggcccaggctttgagagacagagagagagagagagagagagagagagagagagagagagaaagagagagagagagagagaggagacacagagagacacagagagagacagagacagagagagagacagatagagagacagagacagagtcatagagagtgagtgagcttggaaagaggtgtcacacagttagtaaaagaggctgcttagggacatagtgtaacctcaggagctaaatgccaccagagactacatgcacctggaatggtgctctgctcctatgggctgtgggtagtcaactgagagggagagaagggcaaagatctggtaaaactcagcctcctttcagccatcagtggtttaactctgaccagacaggccactaaggggttaatcacaacaagcttcctgttctacaggattaggctatgcttgaagtcggtataagatttagatcagtagtaaagctccctgcccccgccccagggcgtcctccagaagctgacccatccactcttagctctcccactcacccttagtgttcccttctggggggcggggctcagaaacagaatgagcactcctaagggagtgctcacttcagagagagagagagagagagaggagagaggtgtgctctactaacccagtcccctgtaaatgaggcgccttgacaagacatgtcacatgatcactgtcctttcccacatgtgtcatggggtctacattcagatttgaacattctgtcttcaattcgatgtgcagaaagccagaacaaatgtgcctctctcacagtgtcagagccgcctcccgtcaggaacactggcgaagccgctgacaggagctgcaaagagcggaggacatgactcttggtgctaagtttatgataaatagtgtccgggcagggacttctccaacaaggggctggaagactcaagcaaaagtcagctaggtacagagaaaaatgatggcgtcagagctcagccacggaggtcccatctgaatgttgctgaaaagcaaggcgcttgcttgtccccgttggcacaggctaccgaatgttaggcagaggggaaggagctggggtgtgaagccctcctggcctctagccaggcaccttggcagccgaggtggcagctgaaactcctgactcctctgcatgctggtttcatctgtccctcttcctgccacatcccatctgtgtcccgttgctcctgtccccccaaggtgaagttaattcggaatccaaggcattgtatttctcatttctgccaagactcgtgttcatctcacctgtgctgtccaagatgctgaaatctgagctgtttcagcactgggcacgcatctccatcagagtctgagtatgtgcgcctcaggctgtttgctcagcagcctgggattagtggctgagtggagacagcctgctcggtttgaaatgctgaagcctacttcctctattctggggtagcggagacagctctgaggccaagtcagaaaagtgggagtctggagcagtgtaggagaacctacagagtgcgagcatcctgtccccctacaccccacttctggtgtggtttccatcttcctgtctcttgccattatcatcaaaagaaaaacattttcccccctctcccttctctccagggttgttcaacttccttcttcttctgttgacctttccccagacaggcctccatctctgaccatgatgacctttcctccaggcagagaacttccttgtaggtctctgcagtacaggctaggatggttcttggctaccaagttgtaggttgccccagagaaacaataaagggagtgccttttctccttgcgccctggggtcccatgctgccccctctcctctcttcttctagtgactactcaatgggtcatccatctcttctggtctgcctccatcactctctctcttatttattgtgtatgtgatgtgggctagtgtgcacatatggaggtcagaggacaacttgtaggagttggttctctccttccaccatgtgagtcccacagataaaactctgacttggtggcaagtgcctttacccctggcccagctattgaaaataatgttgaactctggggcgccatttttatggactccgttggcctctgtgccacttttaaggtatatgtgtaagggcttctccttcactcttcctgaagtcccaatggtttcctagtgtctccagcacccactcaagacatcaccaaagacatcttctcactgccactgggcaggccacacccagtctcttctctgcctcctttctaatcagttcacgtggagctagtcactgaacacccaggcacttgcttgctgcctcagggataccaagattagtatataaatgtggttctggttctcatgagcttacagctgctgcccggaaataaagaataggggtcaaatataatttctggtcatgaaaactgcccgagaagttgagacatggtttgataggaaattaacaacttctagaggaataagccaagtggaacacggatgcctcgtgagagttagtaaatgaccactgaacataaatttttgcaagacatgaaaaggatgggagaagtgatctattttacaaccttacactgcacataaattttttcaagacatgaaaaagatgggagaagtgacctattttacaaccttaggacctatccctgctgaagtacacacatacatgcacacatgcacacaagacagttacatcctacagaggagacctgagcagcacaaacaagtacgtttggctcagttcctgaaacctgacgggagcactccccacccccttcccgtgtaagctgccagggttggcactaggggcacaagcctgggtggtagagtcccggaagctaggaggcacaaacggaatgttaaggaagaagggatgaacttgtccagaggagtgaaatgttgagagtggctatggaaggggcagtcacagttgggtgaggggctgagggagtggcagagatctttctggcatctccgtgcaggaacacagtgggctaggaagagcgtgagataaggacaggtctagaggaagagttggagtttagttagatgggatgggattaaggcagcagtggaaacactggaagggcatgtgggacagtatgaactgtgtggtacaagtcaccctgacagcatagatacagaaggggacactgtattcagttaggataccttgcaacactccagctaatggacagggaagatgccaggctctaactgacacatccagaggagttggatctgtgagaaatttagagaccgtcagccacaggccttagtgactaacttgaggggcgagtgagagatgaataggaggatgatgggaaggagccgggcgtggtggcgcacacctttagtcccagcactcgggaggcagaggcaggcagatttctgagttcgaggccagcctggtctacagagtgagttctaggacagccagggctacacagagaaaccctgtctcagaaaacaaaacaaaacaaaacaaacaaacaaacaaacaaacaacaaaaacaacaacaacaaagggtgaggggaagaaaagggtatagatctgaaccatggtaaatcagggaagctatgctacatccggccaccaacatgagggaatgttaacaaccctgggaactgtggctggggagggagggaggttaaggagttgtaaatctatgaatctctctgtgataagcccaggacacataatgccaagcaggagggttctcagagggaagtgacgatgtgttgtaagtctatgggatttagcattgtggctaaggaggccgtccccccccccccccgaaaatgaacggatttttttgaatgaagtgttgtagagtgactacatggaattgtatcctggataggggatgtgaggcaggtagactggtccaggtgacttgtggaatgtcatggtggtaagctgactggatctaaatgctgcccagaaggaagtagagagatagattgaaaatgagtccaaggaaggtagtgtttctgtcttggtgcctgggatgctgagtagtaggtagggccatgtgtgccagaaatcatgtcttattttgttcttgcttctgcaaatattttcggtctcagtaagtaagtatgtatatgtgtgtgtgtgtgagtgtgtgtgtgtgtgtgtgtgtgtgtgtgtaatatatatatatatacacacacactgacataaactgctgatggcactcgtcaacagaaacagaagtcttagaagaggtggatttgaaaaatgagttcagttttgaacatgcaggtcatttcaggagaagatgaatgaaaaataaagaaataaaaggaagagaacacggtcactcctgatggatggaggttttttttttttttttttacattttgtaaatgtagagaaaacaggcagaaagaagagtccaggccgaacctggcccgcagacaaaatgaccatgagaggagagatggggagggagagaggagccgctgaccaagagaggcaatcgggagaccagtgttgccaaactgactgagttagaacaggaatcagactggagggtgaaggctagggaagatgggaagtgaagcccaggccctgggagggaggggcttagggcaggggacgggcgaaaaatgctgggaggagccacaggtactgagtgagacttgtcctgggtttgagaccttcgccccttcttagaattgggaacaaaacacccctggaaggagttacagagacaaagtttggagctgagacgaaaggatggaccatccagagactgccccacccggggatccatcccataatcagccaccaaacacagacactattgcatacgccagcaagattttgctgaaaggaccctgatatagctctctcttgtgaggctatgccagtgcctagcaaacacagaagtggatgctcacagtcagctattggctggaacacagggcccccaatggaggagctagagaaagtacccaaggagctaaagggatctgcagccctataggtggaacaacaatatgaactaaccagtactcccagagctcgtgtctctagttggccatcgttgggaagagaggccccttggtcttgcaaactttatatgccccagtacaggggaacaccaaggccaagaagtgggagtgggtgggtaggggagtgggtgggggagggtataggggacttttgggatagcatttgaaatgtaaatgaagaaaatacctaataaaaagttgggggaaaaaaaagaagtcagacccgaggaaggcgggcacggagttgaaaagttcttcagctcatcgagcactgggggttgagaacaacgaacaaaccctccaacggccatgaaaagaggaaccagaaggatgtgcacagtatgagacagaatatatttaatgttaaggggtgaaagggttccatagtattctaaagattcagcaaaaatcaaagaaatcatatcggcctgagggtagactgggggtctgcttccaggtggtggcatttctgacgggcagagagagacaggagtagaaaaggttggtgcagacaacacacagctgcaacacatctggatgtgagtcagctgctctcgttaaaggtcacaggtatacactctctaggcgacccagaattaagtggatttgaatggggaggaagagaaaggagatcctagtgggaaagcccttcttgcgcgtcttttcactgacatcaggaacaactgtagccatttgttaagccaggcattcccaggctccccaacagccccgaaaagcctgccctttacaggcggtcctccctccaggtcaggcagacacaccttggaggctctgcaatgtcctgagataacccaggcaaagctctttaggaagttccccttccaagttcccaaacagtccttcctttaaggttgcaggatctccggcgagaactgcaattggaggaggagtgaatgaagtcatttcacaatgtttatttgcatatattatagaaggcatttcaaatgtattaaccatgagaaacagaaggcccctgcattctatgtgcatcctgtattccttggaaacaaatgtgcaagcgcctcagatccagaggggatgtaaacgatagatcctgcactttacatatttcccagacgtgtgagtttgtggccttggatgagaaaatggtagctgccctttctggtttagaagactgtgcctgccgactttgagaagaacctgagagcactgaccctggttattaactgttaataacactgtggtttgaacctggctctaaagtacctcaaagcacctgggtctgcggactggggcctaacctacccatacaagttggattcccagaactttttagcacccagttgagaattcctcatgaatggataaattctatttaatgagtatgtctggtacattttatatttattactgatttacaaaatgacctgagtctcttagacttgacatctttgtgtattggtcatatatatacattatatatatacacattatccatacttttatataatatgtaaatatctatttatattgtatgctgtaatatatataaggtaaataatatataaaataatgtgtatattactatataaaactaacataatatatagtaatatattaagagtatcatttgaattacatgtccttgcagcaaccctgcaatagcatacattttccttgcccccagttgacagattaagattgagaaccagagaggctgggctgttcgtccgaggttgtctagctaatgagcagaggttctgaacatgggaaccctgtcagagctcatgcttacccatttattttaaaccatgaggccagctggcctagcacacttgtgaaattgcctccaactaggaaaaaaaaatggatcactaactcaaaacacgtatttatcctagtaacctcgtaggccattcaatatgtagaaggaaatgccatggaaccaaagactcaaagaacttggtttaaatctgtttaccagtcagcacttcggctggaagaccactggatgtttgtctctctttcccgctcaacagagcaaacctttcaatttaggtttaagctcaaatgcatttgataattacagaggctgccggggccagttctaggaaaaaataacacggtggcatccagcatgatgcaatctttaatgctggcgcctttgctgtgttcttacacaaagagtcttattgaggggctcctctagtcaccagaggtgcagacaccctgggccagggagtttgcctctgctgagaagaaaagccgtgcagatttactggctgggacggcttgtttctcctgccctttagctggcttgtgggccaggcctcctgccgagtgcgggcaagcaaatgccagtccgtcacttctaagaaacgctgcattctggctccacagccctactttcccattgccagggcgatggattcctcccagccccacgtccagagtgaagtccacaagatcagctcagggcttctgaacaagcggctgcaagccatgctcatagaatttcaattattacagggctgttgataatggggcatgatgcccaagatgatcctttttacaagcgtgtggcccgtgggcgggggtgggggggtgttgtaaactttgggtgtgatcgctgtccactgtggctaaacagtttgataagaaacgaagccccccttccagggatcctattcagtctatacatttgtctactgggagcagggggaagggacagaaggaactgtttgacaagttgctacaaacctgacttttccaaccagaatgtagcttgcctaagaactgcacataaaattagtactgagaattaagctactcctagtcatgtggagagaactaaagttgcccagttttcccgagaaggcgaggcttggttctcacacactgaccactccgctgctttttggtcatggctggtgttaggtgacccccaatcaagagctgcctgttgccttgtcttctagacaccaagtggactgtttctggcctcgagtccgctgctgcccagcatacacttctggagcagccttagtcctgtcgccccactgagtcctgccaggctgcaagggccgaacacacttttccaggtaagtgtctgcaaatgagcttttaaacgcgagtcatctaacggatggcttttctctaaattccacaaaagctctctctgacggtaccttctgccactgagctaccaagttaaaagtttccaaggggaattcctaaggattgggttgaaagtcattttagagacagacatttcttttctctgaggcagagaagaggttcttctatcaggaatgcacacatggattctttaagggttctggatacttccacgtgactaggaaaactggaaattgactgcaggaaatgatttaaaattaaaacatgatttttataaaagctcaataagagactttaaaacaggaacccaactagtcaatagattcacatgaaaaacactgaaaaaaatagaaacagtgaacagtttttccaaactggagtagaaacgttacccgcatcattctacagattataatcaggcttgaattatgtaacaaaatactgtgcaacatatggttaaagaatgatgaagctgagccgggcagtggtggtgcacgcctttaatcccagcacttgggaggcagaggcaggtggatttccgagttcgaggccagcctggtctacaaagtgagttccaggacaccagggctacacagagaaaccctgtctcgaaaaaagaataatgaagccctccctgagttaggtgaacacattcattatccattcttcttctggaattttccaggagctttactcagtatcccatggagatcagtatctcctgagtctcaaagattgctactcaccaacagggcattactgtcttgaggatgtgaatccaggcagggcaggaatgaagcaaaggtagacgccttgctagctccgagctcctctctagcttggtctacccagcctgcttcccttggcctaggatgctcaccccaaactggctgtcgctccttattcccacggtccttaacattttacattaggactacccattgatctggcaagtggacctcccccccaaaaaaaaaacccctcaaaaccataacctgttcactgtgctgtctcccagcttctagcacatcaatggtcacacacatgtcagtcattactgatagcctagtgacaagatgcctaagcacacatgccaataaaagatgtgatgagctccaggctgtcctctaagctggtcactctgcttagcaaggctagtatttgctgagcacctctctgcaagaacaccatgtctacacaccaggatttacgagctctgtgggaggatggagcagcttcggaggtttagattgctatcctatgcttctggtttcctggcaggcttggagtagggtgtcatggtgggactactccctggagtaattgagtttccctctctccctggccctgagtcccagcccagctcacttctgctcagacacagtgaacatgttggtggctaccattttatcctcaagtggcacagtctagtagaagtgtagtgggagggagctgtctgaatacatcgcccctgtgggcaggatcgcatgactatggagtctaacatggagcttctgcagagctcagtgaatatctgaaaaacaaacagcttctcatgtctatgggttttgcgagttctgtcatctgattggtacagaggttaaagatcttccaggaaagccacaaggaaccagtggaactttgtttctattccagtattcccaacagtaaagagagttcatttccacagtgggttgacagccaggatctctgggagctgggagaagtccataccacatagccagtggttctgcgaagccagcatgcatcagggttgcatggatattgtgtcaagtaaagatgctaggcccacccgggggcttctgattcatggggtctcaggcacggtctgataaaacagtcacacttctgataatgttctaggaaacattaggaaccacattctgagagccaaccgctgtagactaggggttcctaatttacatttagaattctgcagactactgcatacaaaggctgtctgcaaagagggtctattctaatttctgtaaacagatctgttttcaatccaagagccattcaaaaaccagccggggaggttgaaagggggccacagcttagcttggatggctgagaggttgcatggcctggagttcacaagtgatggctggatctatgtgcaaagggaaacaaccctgtccttttaaaaatattattaccctgcataaaaaaagagcaagtggtcatataaaagttggaggtggcagttttaaaaatggcaaacaataaacatcctcagaggaatgagatttccaatgaaaaataataggacatcgactgaaatggatttctgggaatacagattaccactgagccccatcaaaatgaataaaaacgtaagtctcatttacatacaccggattttggtaaatgaaagaaaaaatcataacctgcagcacattttgagcagagtgggcatgtgtcctgtgtgagctttggaaaagcaaaccaaaatccttagggagggagttggtggagctaaggcattgctacgcagatctcctgagacaatgatctgcttgtctgtctatcttagaggaagagtgatgggcacagggtcatacactgtagatctggctagcttggagcttactttgtagcccaggctgaccttaaactcacggtagtcctcctgcctcagcctcctgaatgtggggatgatgggtgtgcaccagcctacctaaaaccatgcttatagcagactagagcagatatggcagaatttcagcagagagagaagacgacgcactaccctttctggaagaggttatgttttctatttgcaaagtgttttagaaaagagagagaggtatctaaggcactggccgagcgtgaatctagagcctgatctacaaacacactggggcatacctcacaggcaggtacatgtggaaaaagggtagaggagactcggtttccaactgagaatgtgctcgatagaacattttagcttgacacacttttatagctgtggtgggagcaaagccaatgaacgttctgtggggggaggggggaaccaagccaatcaggacaagtatggcaaaggagtgcacagagtgggcagcaatccatcctaacatatggaaaaagctgacactaaagatgattctttcataggcaccagtaaaatggggggcagggggagagcgcgcgtgcgcttctgcagttcacctgaagtcacttcacgagtggggcttggcttagaaaggtttaagtgcatgcagatagatctaggaactcgacagaaacaaagtcccccaaagctccaggaaagacaagaagcccctacatatgccagttaccattaaatcaattaaaagaggaactgggccgtttagtatagctggtgattaaaaatttgctcttacttaggagctatgaccttgagctagtcagaacctccccgagttgtttgtctcacttacaaagtggtgataacaaagcttactttatactcttagtgacccaatgaaacagcggcccccgagaggccaaggcgttcagatgtgttaccgaaatagtttaggggaaaaagtatgtactcattcgacaaatatttattgtacttctcgcatgtgccaggctctgccgtttgatatttagtgctcaggtttaatatttagctttcctggactaaacagggattaagctacaggaggacctgggggggggggcgtccactggccacattgtgtcttcggcagtgcagaactggagctgtgagtggacagtcacgtatgacaaggatgctcttgctcacccttcttcgtacgggatcacagctgaagtatctgtcccacttaggaaatccagcgctttcgttcggctagctaccaccttagttaccaacaacacagcaatctcactgtttgcctgtgcaacggcgacctaatgcactgataattagatcagggaaaagcactctcaaacctccaggaaagaataagatcatctttcttttagaaaaatgcacagaggccaggaccacacatctccgggcgctgggatagtgctgagccatgcgacaatggatgctggaatcaggctcagctcctgtccacagagcagtcagtactgttaagggctaggctgccgtgtccagcttcccggtcctcgtttccaacaagagcggacaggcgtctctgttgtgctgtgggaaccagacagcaaatttcaaaatgtgagattactgacccatatgtaaaggatcttggtttccagttttaccccttgatagttagaaaatcagcaaactagcttagaacctttaaaaaaaaaatagcagtagactcaacttcactgcacatgcgaaggacaggttaggacctttggcacacagaataggggcattttctgggcccctctctgttgctctaggtaacctttgtaaagcaactcagcagccaactcccatcactgggctcagggaacatccacgggtgggtctgtctatgcattaaaggcaagcaagctcccgaatggctttgtcacagttactaaatgctccctgttccttccagttccccacactgctcaacggtcacatgccggtgccgctccccagtctggacagagctccatccccagttctgctgtcccccagctctcagaaatcctgatgatgggccaccaactgtcactgtcatcaactaaggactcagaacagatgacggatgatgccagtttgtccccatgggctagtttacctgtgtcatgagaaggacattgtgaaacctggttcatttggtttgcacttttcgtaacatggataatctagatgtatgttagcattttaaaacaaaagttttgtctttttatatatatatatatatatattcagctctctataaaagtctgtttcgcattcagtgaattttaatgtttgtgtttttttttaatcttgttagctctggagtgttgaacactgccagggaggagcctttcttaatgttttcaatgtaactaatgaggatgtgaagccttttattgctttaactctacatatgctgaactccgcttgcatacacgatgtaaccagctgtgccttcctttgcatttagtgttatatgtacatgaatttatgtatttctagtattgagaggaactgtttgaaggacaccttggcatccaactgctctctgtagagggttattttctcacgtagacacgttcaagtgaacctccatcgcggtaagaactgccttaggacctcttcggaactgaaatccagtaatgtccaagtgatgggtttttatataagaatgaacgaagccatatttagacaataaacattgtttaaagaacatgttccaaagtgcacttttttaaaagaagaactttgagagaccaagccgctcagccgtttgtagaagcctttctacttcctgcagaagtctggaatgctaaggctccgttaagttcacaccagccaaactctcaaggggactttccaggtttgtatttaattttgagactagccctgctctcttcatttcctacaaccacaaccatctggtatctttgtcactactgggagttaaggtttctttagattcctggcatgacaattaatatttaaaacctaatgttttagggctgaggatatagctccatagaatgtgtaacctgcatgtgttgaggctgtgggtataaaccccagtaacctgtctccctgtctctccccaaaaagggcgtggtgggaaacaaactaagaatgttttggaagatgcttacagatggtgaattcaaacaaagaaatgtttatatactaccagccatgtatagagatatttcctgtgtgtagatataatttttgatggattaaatccaatgcattactaagagctggaggaactgaaggccttgcttctgaggatgagcactcaagagccaccgctttcggtagtaatgatgatgagaataaagggactctgagaaaggaagacttgtcaggatctccctctgaaccggatgcagcagctcctcagatgctccgcaaggaaggcttcacgtgctgagtatggcttccggctgtgacgcgagcagcctctcatctggtgagaccctgaaggcagcacacctgtgcttaaggggaagttctactgtaacactctgaaggcaaggcactttaaattcaagatcaggtgagctgaaacaccactcatctataagtattaaacaaacaaacaaacaaacaactgcaatgtgcctctacagactagatactaaatagaggattataagggggttaaaaaaacaaagctcgtgcaaaaaatttgaattttaaacaatctaaacttatgtttagatacttacacattgagacttaactaccgaagttgactttctttctaaggggcgtgtgtctttactaaggggagaaaaaaacctctgactgtaaagccatggagacagctccaagcccataaatagatgccctgccactccctcacggcgaagaataaatgtgtactaaaataaaaaggagctggttcaggagactgtaattaccgaacacagtgtcagagctgggaggggctttgagagtgctggcttccagctgttctctggtcaaggcaggcacataggacaggggtggtgggggtggagaagctggcctggagctgcctggggtcatagcatccactgagggaagagtaagagagcctcagaacgtaaggaaacgtaaggctggaatgtttaaaatggctagatgaggatgcatttgatgtgcaagagtcttaagaagaaactaaagggactgatgtgcagggatctcaacaagatgaccttctgtcgacctttaaactataaacgctggttggaaatgttcctatgactgtaagtctgcctgttggttccttttcttccaactaccatgattctcctgtggacccagatgctggcatgaggactgtagaatggagaacgacagcctctctgccttctgtgtttttaacaggagaaattcagccggaacggctctcttttctatgcttgcgtcatcagtgtttgactgctgaggctgaggttggagctctagaacctcactgtgggagctgaactccgtccctgcgcacagctttcctacggctgcagggcttcctccgctgccacacgggtgtcgtttttactgtaatactgttttgctgaataaatactttgtaataaaagagtgtttggattcgagggtgtttgttcccttccatttacttacagtgactcaaataccgcttcttctgtgtcaacaagatggataaatataagttcctatctctacatatggcacatcaaatgctttacatacgcatgaggattatagcgcagtagacagtacttacctagcacatgtgagactctagagcccactacagtacaccccaccacacacaccccaccacacacaccccaccacacacaccccaccacacacaccccaccacacataccaccacacaccccaccacacacaccccaccacacacaccccaccacacaccccaccacacacaccccaccacacataccaccacacaccccaccacacacaccccaccacacaccccaccacacacaccccaccacacacaccccaccacacaccccaccacacacaccccaccacacaccccccaacacacaccccaccacacacaccccaacacacaccccaccacacacaccccgacacacaccccaccacacaccccaccacacacaccccaccacacacaccctaccacacaccccaccacataccccaccacacaccccaccactgaggatgaactgggggagtagtaaaatgggtttgaaatggtctcctgaccttaagacatggggctgcaaagactgcttggcgagtaagcgagcatgaggacccggacactcacatgcaacatagggcatgactgtgcatggacctataagtccagccctgtgggtgttagggactggtctgaggcctgcaggccaccagtctagctgaaatgcagaggcctagaagtgagaccctgtctgaaagaaataaggaagattgctgagtgggactgctgatgtcatctagtctgcgcctgggcactgcacacaaacacaacaccaccaccaccaccaccaccaccaccaccaccaccacctccatcaaagttctgtcagttgttctacacagaggtaagaaaatgaggaaaaggagaagctaatatttccttttacccattttgttgacacagggtcatatgaactacagactggttggcaaaggcgattctttgttttatttccaatgatctcagtgcagtcaccaggtgggttggttcacaagactggtgtgtgtggtgtgtgtgtgtgtgtgtgtatgtgtgtgtgtgtgtaggaaggaagaaatagcagataaccagagacccagactgatgttcaatgtcactacagtttgaaaagggacacgaattcatagctagataggatatatttgtcggtgtgatagggaattattcacatactgaagaaacatctgaaaaccaactgtgactcccggaagcactgcagaaagcttctacccaagatgataggatgccgtgtgtggtcctgtgtcctttgttttaatcttcaggcatgacatctctgcatctggagtcccttctttggcccccaatacaggactgactctgagttctggtacccacttccaaatgactctggaacctaaggcccattttcattccatcacatgataggtttagttactggtgggaactacttctaaactacttcacacctgctcagcatccctcactgctccaagtccagagcactcacacagccctacgagggaagtgctattatacataattttacaagtaagggaactgagaccaactgtagttaaataactgactcaaagaaactcagctggagtccagagctccaactccaagcacacagctctatgagagaagtactattatacataattttacaagggaactgagaccaactctagttaaatcactgactcaaacagctagtcagttttcaaaattacactttgattgcagaggccatggatgttggtcaatatgcttaaaagataaagtcttttaagtttaagaactagtaatctacgcctttacattgtaccatgcacacaccattgttgccggggagattcccagtaattatagtgtgctctgcctggacttctcctgtacttattcctagtcctgtgtgagatctcttgctatcccctcccctgtgtgtgtgtgtgtgtgtgtgtgtgtgtgtgtgtgtgtgtgtgtgtgtgtgtgtgtgtgtaggggggcagaggtagaacaacttgattatgagttcttaggtttttgttttgttttgttttgttttttttttggtttttcgagacagggtttctctgtttagccctggctgtcctggaactcactttgtagaccaggctggcctcaaactcagaactctgcctgcctctgcctctgagttcttgggtttttaacaatataacgtaagtggtgggttttacttacaaacaaggatttcttcactcttatgtctttatttagtccaagacatagtaattctccccttcacagggcttatgagttattgagtgatgataaaaagtgattaagtattatcatattctgaagtacatggacaacagacaggagggcagtaaaactggaggacttataagccagtctgtggtggggtagggtacagggaaggacttccagaagaatcagccaagactcaagcagaggcaagagaagagaacatttgggtaactcgggatcaaagagtaaatcatggtaggagacagcaatgtggaataattagtagcaataaaacataagttctaaaagaatggcacagagtggggggagttccaggtagctaagaagacctgaaagaatggctggctgggggtctggaaaagccaaacagctggaatgcttccaaggcaatctttctaatgagttccagtgtttccagaaaaaacaaaagacacatgagcaccattccacgatgaccctatagcctacaccaccaccatttcactgagttagtatgcaatcgcccaggaggaaacggaaagatggcagtaagtaagaactgtccctacagctgcggaaggggccggagtgtttctaactcttcgctagcactgttccgggaatccagtctgcactaagagtccatgtcctgttcacagcccagaggaaaacctttcagacgcagagctttctgcacccagaggtgctaagaccaggtgctcatcagctccatcttcacccacgctcccacatagcccaggcaaccctgcattaacacctcagtagggacagcaccacagttgctatgaaagacttgtttgtctgtctttctcacaagtgtacactttagtctgtcaagtggtagctttaaaagaatgttagtttcccaataaattaatttctcttagggagaagccaggaatgaaaaggccttccaaccatcgtaggtcaagtcttacattcttttcacatcaacgtagttttataatcagttaatttacttatatgcttcccattttggatggacagatgttgtcagtagttttcttaggttagaagtagaaactcttgactaggaatgatggtaacaaacctcctgacatgcaagtccatggtctgaacttagcattagaaaactttacagaaggaaaacatggatgtcattgtgtgtaaaggaacacattaaacacgtttaattctaccaagcttgtgagcttgtattggcattttgaatgaatgaaaatgtaaaataaacaaagaattgacttaggaatctagattagaatatttaaaaactagagccactgacagaataatagaaagggatgatatttggggataaatctcttaaaaccacacaaactcaaaataatatttgtaatatattattaaaacaactacacatacacatgagaaaggaaggaaatcaagatggtctactataaaaaaataaactaaatacaaaacagtgcggtattcggagacttaagacaatatcctaagccacttcacataactgaaggggaggatgcggccttcactccatctcagatggcagcaatgctaacacgaaatcattgagacagatgctgtgagcagagagcacaggccacacccatcatgaattcaggcaaaaattctcaacaaaatactagcaaactggacttagcagcatgtttaaagaattacaacttaaacatccttaatatgaaatctaaaaggcactgacacctgaaaatttcagagtaacaatgatcaaaacatttttagattttgaagcattttagacttcgtagttttgaagcagggatgttcaactaccacaggctatgcaaatatcccaaactgggggcaaaagaaaaatcccttgaaatctgagatgcttttagtcccaaatgatttcataaggggattaaactttaattcatcaccaagtgggactctttcaagaaatgcagtgctgatgtcatacaaaaatcaaggtaataaacaaagaaaacagcatgatcatcaaaaacgacagcaaaaaagttctagaagataaagccaacaaaccccccccccccgccttaataaacacacgcagtaacctagcaaccagggaagctccttaaacatagggctgtatacacacccactgctggttacacggggtggtgaacggctgaaagcttttccccaagaccagcaacacaagttactggccttcattcactactcaataatactggaggtctaaagactaattatgaaatgggagggggggagtaaaggacagagaagagaagaaaaggcatccagattataaatgaaaaagtcaaactatttcttcctgctgatgatgtaattttatatgtagaagatcataaagaatggaccaaaaaaaaaaaactttaaaaaggcaacaaattcaataaagttggaggttacaagatcaaaacaaaaaaatcatctgtacttccaagcactagcaatgaaaaacaaacaaacagaaatgaagaaaattatcccgcttgcaccagcagcaaaaaatacttaggagtaaactcaagcatggaggggaaaacttttatgtaaaaactactaacgctgctgagaacagttaaagataatctaaataaacaaaggactccctgaactcaaggaccaggaaaagtgttgttaagagagagagagtacccacctgtggagacaggacttaaaagtcagggcagtcctcactgtgaccccaccctgggcttcctgctggtcttttgtggaactaggaactgagtgaaaagtgatatttaaatgtcagcctccctgggcatctacaagtgaaagctgtcagagagcaggaggaagcaactgaaaagcacgtgctttgtaagggcagattgggaatccatgtaacaaagcaaccttattggttttttgtttgtttgttttgttttgttttttttccgactcaagcatgtgtgcacaccaatgttcacagtctttacactgctcagtcacagtggaacatcaccccgccatcgagagaaactctgaaaataggatgttgaaagaaataagccaaactggtatggctgcaaggacagaaagtatctagactaggaaaattcatacatacagagagtaaattaatagttctgagaagcttggcgggaggagtggaatattttactaagttcaacttctgaaaaaggaagacaattctggaaataaatcaaggtcactgtcatgttgtgaatgcagttaatatcgtaaagagggtcatgagtctgaaagatagattagaacgtagtaaatattctttcaaactaagctgataaaatgcctgagtgaaggaccctggatgtgctgtttgattgatatagcacctcttaccttcagaattcttgtcagtttaaggggcttctgagagttccaggttcagtctttccaagttttaagtctcctctctgcagtttccaggatcaggataaggctgaaacgtcaacaaacaaaagcaacccatgcacatttcttaaccgtaagaccctagaccccctagaaagaattttaaataatgcctgtatattctttatatgtacgaatcaagcttactgacaaactaaggccaatctgcaaatcaaattaacaaatctgatacttcataagtaaagaataatatctcaggagatcccataagagactaaccaaacggtcggcacaaacctaacgtggctgtcactttcagcacagtgacatcttgtcacctgacaatgataacccagaaggaggatgaccccagtgtgcacagctttcttccccaataaagaacagtgactccacaaaaatcacattttatataacacagagatttagttattataaatttcaaaacaaatgaaggaattttcacataatatttataaccttcaaagtacaatattaatacatgtctgtcagttagaaataacagcagttaggctacagggcttaacataaaaccagctgacaactgtgaaagcagcagtggtccaatattcaccattacatatgaatctgtttcttccagaactttctttttttttaaaaaaaaattaaaatttcagtattgtgaaatattaaaataacatccccaaacatgccacaatcactattcacaaataaagttaaaatgaaatatacaaaaactcacttaatactgttaaataacaaacaataaactacaggatttcctgaacagaaatgagaggaccctgaatgtttacagtgaatggcaggacaaaaattaagttataactattttcatgatataaggcaaacacatgaccattgcaaactataaccaattaagatttatagttgtaagatgcactaaccaatagtccttaacaatgagcgcaaatgcctaagacacgattaccaacaccaagtgtctgtgatgttcaaggagatgcataattcaagttacactgttagtgtctctgatgagcagataatacccacaacactaaagcagtcctctgggttcttctttctcatttctaattcatcgtggctccatttaaagacacagcacagctttcagctcattccaagtgaacgttattgaaacacacacagtccccaaatgaaagaaacggtccctcaaaatgaagtatcctctaataagagaaatgtgcttatgatgaacagcggcaaggcccttcctgtttgaatgactcatgtggctaaattttaactaaaagcacagtgagaaagagctaaccaagtgtaggagcatacacatatgcagacatttctaagaggaggaataggtaaaaataaataactccgtgttttagtttattggtatttgacatgagaacccaaaatgtctgctactcatttgcttgcatcaaccctcacattgcttgcatcaaccctcacattgcttgcatcaaccctcacattgcatgctcccaaaacacactgtgctgaccacctctcagcctggcttttggccaatgcgcctaagaaatgatatgtagcacggacttcgagtgttcacgatggctcacttattctactgctaagcaaagctaaaatatacattccaggaaacactgcagtttaatcttttaaaaaacaaacaaacaaacaaacaaacaacaacaaaatgcagcagtcaaacaatttgtgaggagaaacagatgcgttcacatataataaagccactgcaacttcttcaggcattcaactgttgtgttaaataaacagacagtagttatttagcagcaatgattccgcaaataaataatgcactgtgtttctcagtccggcacaaatctgcagctacagttacattgatagctgtaacctactggctctactggcggagaagaccttaaaaccaactgtacaaaaaaaaaaattgtcacactgtgacaacaaatataaaaacaatctgtaggtctgaaataaaaagactccactgggaagaggacagtgctgacacacggagttcccaagtccagcacaagaaatgactgccttcagctctgagtccatggctgataagaaaggctggagctgggcttgagaccaagttaccagacttaaaagagcatgctctgtcttctgttcttcccatgtcctaaaatataaagtcattttatgaggcagttcaaaggtcaggttttttttaatcccacatacagtatttggtgactctaggaagctaacgttcccaccagcaaacgctaacattccacggttagtgatcggctgtcttaagtgccctctgtgttgacggggtcagtctacagcgtctaggcttccaagtgatgaagctgatgactaggcatgcacaggctgcgtcttctgccttgggcaccagggatggcgtgtgcagaggtcaagccaggccacttgggaaaggtctctgccatctgtagctttcaggatccctgacttgactgaatcacatttctctctgaagatttactgaggtgcccccatcatacacaacagcaagtatgtgcaattctaaacatacagagttgtgggatgcactgtacattggtttgtttgtttgtttgttacatcaataattttactgatcaatttatcaacccaaagcttggttccacgcaaaaaaattcatgagcgacatgtgaaatggtttatgacaaacacacctgtctctggataggaagagtttcgaaaacc

SEQ ID NO: 674 - DNA, 2534 bp, Mus musculus
aaaaaaaaaaagaggagcgagagaaagaaaaaaaaagaggggggaaaatcaggatctcattacaagagcaacagaccgtctgcagacgcctgtcagcatggaaagtcgggggctttcacccggttcctcctagaaatctccccaagaagactcccaaacgctcccccacgtctgggtatggagagtgcaatcacgctgtggcagttcctcttgcacttgctgctggaccagaaacatgagcacctcatctgctggacatcgaacgatggcgagttcaagctcctcaaggcagaagaagtggccaagctgtggggcctccgcaagaacaagaccaacatgaactacgacaagctgagcagagcgctgagatactattacgacaagaacatcatcaagaaagtgatcgggcagaagtttgtgtacaagttcgtctctttcccggatatcctgaaaatggatcctcacgcggtagagatcagccgggagagcctcctgctgcaggacggcgactgtaaggtgtccccggaaggccgagaggtccacaggcacggcttgtcctccctcaaaagtgccagccgcaacgagtacctccactcgggcctctactcgtccttcaccatcaactccctgcagaacgctccagaggccttcaaggccatcaagacggagaagctggaggagccctgtgatgacagcccccctgtggaagaagtcaggactgtgatcaggtttgtgaccaataaaaccgacaagcacatcaccaggcctgtgatgtccctgccttccacatccgagaccgctgcggcagcggcatccgctttcctggcctcatctgtctcagccaagatctcctctttaatgttgccaaatgctgccagcgtttcgtctgcgtcaccctcttcatctcggtccccatccctgtcccccgactctcccctcccttctgaacacagaagcctcttcctggaggcagcctgccatgagtcggattctctggagcccctgaatctgtcatcgggctccaaaaccaagtctccatctcttcccccaaaaggcaaaaaacccaaaggcttggaaatctctgcaccccaactgttgctctccggcaccgacatcggctccatcgccctcaacagcccagccctcccctcaggatccctcactccagccttcttcaccgcacagacaccaagtggactgtttctggcctcgagtccgctgctgcccagcatacacttctggagcagccttagtcctgtcgccccactgagtcctgccaggctgcaagggccgaacacacttttccagttccccacactgctcaacggtcacatgccggtgccgctccccagtctggacagagctccatccccagttctgctgtcccccagctctcagaaatcctgatgatgggccaccaactgtcactgtcatcaactaaggactcagaacagatgacggatgatgccagtttgtccccatgggctagtttacctgtgtcatgagaaggacattgtgaaacctggttcatttggtttgcacttttcgtaacatggataatctagatgtatgttagcattttaaaacaaaagttttgtctttttatatatatatatatatatattcagctctctataaaagtctgtttcgcattcagtgaattttaatgtttgtgtttttttttaatcttgttagctctggagtgttgaacactgccagggaggagcctttcttaatgttttcaatgtaactaatgaggatgtgaagccttttattgctttaactctacatatgctgaactccgcttgcatacacgatgtaaccagctgtgccttcctttgcatttagtgttatatgtacatgaatttatgtatttctagtattgagaggaactgtttgaaggacaccttggcatccaactgctctctgtagagggttattttctcacgtagacacgttcaagtgaacctccatcgcggtaagaactgccttaggacctcttcggaactgaaatccagtaatgtccaagtgatgggtttttatataagaatgaacgaagccatatttagacaataaacattgtttaaagaacatgttccaaagtgcacttttttaaaagaagaactttgagagaccaagccgctcagccgtttgtagaagcctttctacttcctgcagaagtctggaatgctaaggctccgttaagttcacaccagccaaactctcaaggggactttccaggtttgtatttaattttgagactagccctgctctcttcatttcctacaaccacaaccatctggtatctttgtcactactgggagttaaggtttctttagattcctggcatgacaattaatatttaaaacctaatgttttagggctgaggatatagctccatagaatgtgtaacctgcatgtgttgaggctgtgggtataaaccccagtaacctgtctccctgtctctccccaaaaagggcgtggtgggaaacaaactaagaatgttttggaagatgcttacagatggtgaattc

SEQ ID NO: 675 - protein, 460 aa, Mus musculus
KKKKRSKKKKEGGKSGSHYKSNRPSADACQHGKSGAFTRFLLEISPRRLPNAPPRLGMESAITLWQFLLHLLLDQKHEHLICWTSNDGEFKLLKAEEVAKLWGLRKNKTNMNYDKLSRALRYYYDKNIIKKVIGQKFVYKFVSFPDILKMDPHAVEISRESLLLQDGDCKVSPEGREVHRHGLSSLKSASRNEYLHSGSSFTINSLQNAPEAFKAIKTEKLEEPCDDSPPVEEVRTVIRFVTNKTDKHIWVMSLPSTSETAAAAASAFLASSVSAKISSLMLPNAASVSSDSSSRSPSLSPDSPLPSEHRSLFLEAACHESDSLEPLNLSSGSKTKSPSLPPKGKKPKGLEISAPQLLLSGTDIGSIALNSPALPSGSLTPAFFTAQTPSGLFLASSPLLPSIHFWSSLSPVAPLSPARLQGPNTLFQFPTLLNGHMPVPLPSLDRAPSPVLLSPSSQKS

SEQ ID NO: 676 - DNA, 93544 bp, Homo sapiens
ggtccatgccacctttaagagctataacactcactgcgaaggtccgcagcttcattcttgaagtcagcgagaccacgaacccactggtaggaaccaactctgaacacactggcatctgaatgtttgtgttccccaaaaattcatatgttgaaattctaacccccaaggtgatggtattgggagagaggttttcaggggtgattaggttatgagaataaagccctcatgaatggggttagtaccttaggaaaggggcctagacccctcactccttctgccgtgtgaggacacagcaggaaggtgccatctatgaaccagaaattgggcctccaccagacaccaagtctgtcagcaccttgatcttggacttcctagactccagaaccataagaaacaaatgtctggtgttgaattaagccacccagtttatggtattttgtgatagcagccccaacagactaagacagcgacctaaagcagagaaccacccaggaccttctcagcatgtcagagtcttagacacactctagtccaagccctcagcacacagttttataggcaaagaggctgaatctcaggtgattcaagttcatggtagaaccaggagtccgatccagtttccctgactctgctttctgagtgcttctctttattttcttgtggtcctctattgtcatacagcaaagaatagcggaaaggatttggatttagatcagaaaacctggattttagttccaactccatcacttgttaaccgtgtgaccttgagcccataaatctcttaacatctctgttcgtcacttgtatcaaacataaaacgggattaataatatcagggatcaatggcttaatctatttaatggcacttttttagactgtggcattatatgtattttctaataattattattttttctccttaagtatccatggcatttattcaagaaatgtgtattgctgtggagagaaaggggtatgagtggattaccaagtctcaccctcctaagagtatccagtgtcatgatgcttccaggaagagatgcttccagggagaggatgcttcttttcctttcaccccagtacctgcttctaacctcagtaccctcacagtggcctacagaagtcactcaatttaaagcgaattcaatagcatgacagattttacctccaaaccaccatgtatggctcccaaaaacagcctgcagaacagcgtttctcttctctcccatcttgggttacattggtagctaaatcggcctgtgggtacacatgaggccctaagaccacagatgccccagttaggacattgttcaatctctccctgctcatatggaaattcaatacccactccttaccatcaacactcttctccagttgtttctcaagagtgccaaggtggggtctcacacgacctggctggggttttaggagcccaataaatggtttccctcttccctgtccaatttcagaatcaattgagaggtatacccaggagccagactgatggagatcaaaatgatagtcttatgagacaaaagctaaattggatgatacccttccaactgcaggcacaatgggttcgtttgtcattttgcccccaagaccgagtttgcctacctaggctaagccaaaagactgcaggcatccccctagcagggagaactgagaccatgtgttcctgagacaagctggctccgaaagaggagagaggaggaagctgagccaagcatgccagtttcttctcctaaacttgccagttagagaacctacctctgccgttcctactggaaatgcctccagacagagacaggagggaataaggggtcagggggctggggaatcctacatttccagaacatgtttgttcatattctgtgctttctggcttcctcatttggggccccccctcatgcctgcagggaccatcaggttccatgccaatgtggagaaaatgccctcttcatctctgtgctggcccccaaagggaagacatgcctgtgttcagaatttcctgaagtttcacaggaaacagcttctttttcttgattttttaccgcaactcccctttggctccagccttcccagacaaagcctatcaacccatgcaaatagattcttgaggagaaggaattttacgcttgtgccttggagcttctacttgttctgaagaccctactctacaatcatccttgcacttagtgtcatggtcctggtcttccctttgctgctctcaaattatttttagggatttttaaaaaatgtgatcatgaatctccaatgacttagctttttccacccttaaggagttggtcttgaaaggcccgaccacctcttccccatctttgccatcaatgcacagcgtgacatcctgcccttcacagtatttcctgagcttcctgtaactgtctgatgctgcccgatttaaaaaaaaaaaagactgcagtttcctacaaagccttgtccaacaccttctaggatcaaaacaaaagataaaatacttgattttcttgatctacacgtttaaaatccaaaacagttgtttgcacaggaactctgggcatcattgaaagggaaagggccaaagaccatttgtacctttctgagcatgtcagatttatagcatgtacgaagtgattttgaccggcagctggttggtacacattctcatttgtattcatcctgaaaactatggcaatgtctcaccgtttcaggagttgtgacactttaccactacatatttaccctcccttcctttctaaaggtacgatgtggattcagggtgggtgtgagggtacagggtgttactgaatttcgatcattttttaaatttaaaactctgaagcttggaatcagttttaattccccccgaatgtcattaattcttcttcttcatgattgttcacatatctcaattagtatggtataacatcatttacaaaactgtattttacatcatttcttctattatggactgattgattcaacaaaaatttttagcactttcttggcaggtgttagggatatagagacgggaatgcatagtggagcgagtcatagaaataagtctaagctgtaaagttcaaacacggttctgtgggggatgtaggagaaatgggccatacatttcatctggtgaatcttggaagacttcttggaggagctgaggtttaagccatgtctaaagaatgagtaagacatttacaagggtttcatgaagagagagggtgtctggatggaaatatggagacatagagtttcctgggctcaacctcagactccaagaggtgaggtcctggagcacatggttctgatgtgtaaccagggttgggaaccagcagacaaaggctcaagtctgttcagagaccagattgcagagaaaatcttgaaatgccatctcagtgtctgggacagtgagcaccagctattctccacctctttggaagaccgaataaggggaattaaatgaagcatgagcgtttggttttctttgaagctgaggttcctggacgtgaagtgcattaaagacacgtaagatttttacgtgatgtggcaagcaagggccttgtctggaatgagaaagaaaatgcagttaaaaatccaaaccaaaaaacagcacagaatctcttttgcctacaccagcagttgacaaactttttctataaagagccagaaagtaaatatcttcagctttatgggccatatggtctctgtcacaactactcaagcatgctgttatagtgcaaaaacagtgttagacaatatgtaaataaatgaatgtggctgtgttccaataaaactttacttagggacactaaatttggatttcacataattttcacatgttacaaaatattatccttcttttggcttgttttcaaacatttaaaaatgtagattcttattactcacaatggccaagaggtagaagcaacccaaatgtccaaaacaaatgaatggataaataaaatgtggtatgcacaaacaatgggatagtatctagttctaaaaaggaaggaaggccaggtgcagtggctcatgcctgtaatcccagcacttagggaggatgaggtgggaggattgcttgtgtctaagagttcaagaccagcctgggcaacatagcaagatgccatctctacaaaaaataaaaaattagccaggtgtggtggtgggcacctgtagtcccatttacttgggaggtggaggagggacgatcacttgagcctgggaggtcgaggctgcagtgagctgtgatcatgccactgcagtactgcctgggtgacagagcaagaccctgtctcaataataataataataatcataataaaataaaaagaaaggaaatcctgtcgcatgatcaatacggatgatcactgaggacattatgctaagtgaaataagccagtcacaaaaagataaatattgtacagttccatttatgcaaagtatctagtcaaactcatagaaacaaaaagtagaatgatggttgccaagggctggggaagggaaagatgggggctcgtgtttaatggggatagagtttcagtttcataagatgaaaaaattctggaggtgagcttcacaaccacatgaatctacttaacgctacagaattaattatacacttaaaaataggatggtaaatttgattttttttaaccacaattaaaaataaaaaagaaaaggcaaatacttcttcactcaaaagtcatacagaaacaggcagtgggttctgtggactgactgcagtttgccaagctctgccccatgagtggcctgtgtgagggcaaaaaagacggtccaagtcaatatttctcaaatgtccctctgaaatacctctaacaacacaaaagggagaccgcagactccaacagggggctgcctacaagtctatacaactcttttaaatacgcttttaaatgaacatttaagaatcttagtccataacacgttattttaatgtaaaattggcattcagtggaaacatcagtaaaaactgacacttgttccagcccagagaaggtgagtgatttagtcaaggtcccatagttagaacaagtcaggtatgggactggattcccaaattcctgattccaaatgtacacattccaccagagtggtctgtcttaccatcaggctttggctgttcattcccagccctacctcctagccccccagtattgaagcagtcttcgaaggtagtgatggcaaacccttttgagcttctatcagaaattcagcaattcataagcttcgaacattatttattccgcttggtttactgtaaattttagtttggtttattgtaaaactaattttcttctcccgctctgttttctcatccatctgtaatttttttctttacttttgatagcatcccattctgttatacgttgtaggatgttgaagtgtagaagtgggagtgtgtcagtcctaagcagaggttttaagaagcatcacgtttccactcacccccacttgagctccaactctccttgagaaccacgtctgaagtggtgtctgttcctttagcctggtcctagaaatgagaagccgacatgcattcagcctgcagactggagccaagcccagccaagcccagccaacctagactcacttgttgccataagctactaagttttggagttgtttgttacgtgatattatcccagcagaagctgactaaaacaccccttcttttggaaccaggctttgatgaatattattattttttgagacttagccctcttccattcttcatactgcctctccctgaccctgcctgtgtaccttccagaacatcactatctctcattcctcaaacacacagattttgcatatcatctctggtggaatctcagctgttctttttaaagctgagagagtctcacttgtttcttggccagccaaaatatatgaccctgggctctgtcacttgctataaagggctcctaaagaactcttacttgaaatcttctcagtcctaactcctcgctgttttaaaacaaaagcatagaaagcggagtgtggatcatgcaatagcagataccacatcttttggctgctttttttttttttttttttttttttcttgagacagggtctcgctctgttgcccaggctggaatgcagtggtgtgaccacggctcactgcagcctagacctcctgagctctggtgatcctcccacctcagcttcctgagtagctggggtagttggggtcacagacatgcaccaccatgcctggctgatttttgtatttttttgtagagagatggagtttcgccatgttgcccaggcgggtcttgaactcctgggttcaagtgattcgcctgctgcggcctcccaaaatgctgggattataggcatgagccacctcccctggccttggctgctttttgatagtgggaaggaaagcatggaaaacaaatagcagctttctcttagaatgcaaagaacagaagctgccgacacctgaaaataaaagctatgccctgtgctttgaggaagaccagagtcagctctgaatcacccatgcatgtgaggagctgagagtagtcgtgtggacaatccaaaataccagagaaacttatcaggatttcatatgggctgggaaaccctaaagctgcccaaaagtgtgtcagaagtgttttagatgaggtatttcttcaaaacaataaaactggttgacaaaaacatgctcccttacatgttaggattctacaaagatttattgtgcaaaaataaaagcataaaaatcactgaattaaaatgtttggctttgaatatactttttttaaaaaacagacttcatatacttcatatgtttgtgtatgtattttttatttttttaagaaacagggttgaacaggtgcgctggctcacacatgtaatcccagcacttttgggaggccgaggtgggcagatcacgaggtcaggggttcgagaccagcctgaccaacatggtgaaaccccgtctctactaaaaatacaaaaattagccaggcatggtggtgcgtgtctgtaatccgagctactcaggaggctgaggcaggagaattgcttgaacccgggaggtggaggttgcagtgagcagagatcgcaccattgtgctccagcctgggtgacagagtgagattctgtctcaaaaaaaaaaaaaaaaaaaaaagagaaaaagaaacagggtctcactttgttgcccaggctggagtgtgaactcttgggctcaagcgatcctcctgccttggcctcctgagtagctggtattataggtgagagtagtatcaccacacctggcccctagactatttttcactattttttttaagtgatttatttttttaaatttttttgagacacaatttcactctgtcacccaggctggagtgcagtggcttgatcttggctcactgcaaactccacatcccaggttcaagcaattctcgtgcctcagcctcctgagtagctggaattacaggcatctgccaccatacctggctaagttttgtattattagtagagatgggggttcaccatgttgaccaggctggtctcgaacttctgacctcaggtgatccatccacctcggcctcccaaagtgttgggattacaggcgtgagccactatgcccaaccctaaagtgattttagactcacagcaaaactgagaaggaggcacagcggtttcccatatacctcctgccctgacacgtgtacagcttccccaatcatcaacatcccccaccagagtggtacctttgttgtaattgaatctacattgacacatcactatcacccaaagtccatggtttacattagagttcattcttggtgttgtatattctgtgggtcttaacaaatgtgtccaccattatagtatcataccgagtagtagtttccttgccctctgtgctcctcctgtccacccctccctccctgctaacccctgacaaccactgatcttttttactatctccatagtgccttttacaaaatgtcatatagtttggaatcatacagaacatagccttttcagaccggtttctttcaggcatatatctcctaaagcaaagcaacatgagttcttaactgtgtggatttttttttttccctgaggataataagtttacattctctcagtccaacagctggatcatatagggacaccataggtgttctactgagtgacagaagaagatgactggggattaaaacaataataccctaattggaaaattagctgtgggaaatcaggggttgataagcagccctcttttccatatcttctccttctgccccactctcctaccgtgcccccaccctacaccccacgggtttcccactccttctcagaggtctggagggcattctcccaccctttccagtggactacccacaggagccctgaagcaaatgcccaaaggaaattcctatcacctgtgtgctctgataggcacttggagctgggatgtggtactaatcagtaaaacataccccgtgccctttagcagctcacagttgatggcagtgagaaatttgtaaacaaaataatctttcaggagagactgcaaaactagaaacaaacgtagtggaggaactcttagaatgtggtccttttgaaaggactcacacccggcccccagagaatctgacttaattggcctgggttgagtatattgttggagagtgtcaaaacactccccaggtgattctgacattagccggggcccggaaccacccccgacctactgaatctgggactccaggagaggcccagccactagtggtttaacaagccccttgggtcaagtttgaaaaccaggggtctgggctgctaagtggcggcatgggaatggaaggttctggaaggtgagcagtgaggttggggcgcaggcctgggaagggagaggctcttcaacagccatcccccccaaccttgtctcagcctagggcaatgggcaggctctcccatcagagcctggcctgagccctcagaggcaggacctccttgagggatgtggaggtgtgaagaccagttctgagaccacagaggctcccttcaagcctcagtctctgaccctgcgggcattatttccatgacttccagtgttgtggctccttatcctttccccacaggctcgccccccaactgagggctggcttttttatttttttgagacggagtttcgctggttgcccaggttggagtgcaatggggcgatctcagctcactgcaacctctgcctcccaggttcaagcgattctctcgcctcagcctgccaagtagctgggattatagggacccaccaccacacctggctgtttttgttgttgttgttttggtatttttagtacagacggggattcgccgtgttggccaggctggtctcgaactcctgaccttaggtgatccatccgccttggcctcccaaagtgctcagattacaggcgtgagccagcacgcccggccgagggctggcttttaaaacaccgaaaacccagacaggaacggtgtccatctccaaccccagacggaaactgtgcccgcacccacaagaaaagcagtcctttgcccagagcaaccaaaccctgaaccccactctcgattcccctctgccccccaactcttccatcccagcggatgggaaacagcgagtccagccgcctccccacctcgggacccccctcccgggccaactgcgcagggcacgaccccgtcgtggtgccccgcgcgctcgacccccaggggttgaggtgaggagggatccccggtgtcccgggaagcgcggcggcttctgcgggttgcgggcggacccccctccccgtggggaggggctgcggccgcgcggagtcgccgcgggtcggaggctcctccccggggtggccgcgcaggaagcggggcgggtgggggcggtgcggggcgcgcacggggccggggcggcgggggaggcgcgggcctgggcggccagccccggcgcacagccgcggccggggcgcgcggcgcggggcggaaaagcctgtttacacagactgcacaccgcctggggaataatgcagtaaaggaagtgagccggctcggcctgactgctccaacttcctgctctcacacacaccagaggggaaaaaaaaagaggagcgagagaaagaaaaaaagggggaaaaatcaggatctcattacaagagccacagaccgtctgcagacgcctgtcagcatggaaagtcgggggctttcgcccgggtcctcctagaaattccccccgaagaagactcccccacatctgggtaggtaacagggcttctgcctgttgctcggacacttaaaaagtttgtttgggggtgttttctttttttctttcttttcttgggcgcggtgggggtggggcggggggcgccgcggggtgggctgcgggccggggtgggggtggcggtgcgtccgcgcgggagggccggccgcggggagggggcgccgcggatgctcctgcgcccgcgtcgctgccaccgccgtcgcccgagctcgcgccgggcccggggctgcggggaccctgcgcccgcggctcccctccctggggctgcgctgcgaccccagaggaaggggcgccgggcgtgcaaccctgggagctcgcccagggccccgctgcaggcagcgcggggagcgggggacggcgagacttcgggtccctgggaagaaccgtggcaggagcaggctgagtgcctggaggctggaccaccgccgaccttccagctgggaccgcagtcaggctcccctcgagtgggcaaagtgcactggtgctcggatccagggaggaagacagggatggagagggcggtggaggacatgggtcgcgaaggtgtggggctgggggctgcgtccactctcgcttggcaggtgacccccgcccaggtcaccgccccaggcgcacgccccatcggacatttaaaagccggtggtctctattgggcatggttttggagaaggaccaggcaagaaatgatcttggggccccttccactccccatccctgtttaccttcgaactcaacgttggcctgtgacgctactgtaacttttggggaggcgggattaagattttggagtagttaaaaagcaaaaataaaaggtcttggttttgttatcttttctgaaccgaatcatcctagggacaagctgcagttaggcggcgggtggaggtggaagcaagaaatgttatttcagaaactgcaaaaggggctttttagaaagaaaaaaaaacgagtgtcgggagagtttctggcttgtctggaaacggcaagactaattgccatgcgcttccgctttgaaactggcagcagacagcatcttgaaaatgactcactagaggagctcacaaagaaactgtggtttgctccttcttaggtttatgtatttgtgccttttacagtttcctttgtagtgttcgaggggtcccccgccccttccccgccagccccctcccaccctccctcatttgaaagcccctggccggtctttaactacccccaccccagtcctccagcctgggggtggcggggaaaggggaggctgagttgtttttggagttggctgcggagagggttaaagggattctgctgctgcagggggaaaaagttccttgaattttccactggctgctgcaggaagagagagcccccttagtcattgctaagtaatgtctgcacacacaccaactaatctcattaggagtttccgctgctcggcacaggaggggttttgtgcagccactgtcagcctgggagcccggcgctggggaaggagacaagttatggctttatttacttaggggtgcagccgcccaacgagccttttcaggacatgtcttgaaaactttgaagtcactttggccattttggatttcagatttgcaggtttttctttcccgcgtgtgtatgtgtgttgagaggtggggggagataagcagctcacacacacccatcttctccatctgtgcttgtctttgggggtggggggggtgtggagcatgttccaggcatctattcatgagccgaaatcgatttgtgagccttacaaaataccctctgatctctttttctttctctctcgccatggcacccatttatttggaaaaggtcagttaggagtttcaatttatgaggatgataaaattacaaattgtgttaggagggcacatgggtcaggcagttaaggagactgtccataagtgttcttagagtttccagtaatgatcctgcctagaaacccccctgagtttgaaaagtgatggcctttctatgccaaatatagcaaaggccttctgccctctaaaagtgtttttttttttttttttttaatttaaatgttgcgtagaaatgtgtggcgttactaaaaagggtcaaaaggaacctgattggaatgatggggcccctttattgacaaagacatgttgcttttaaggtgttggcagttcttttacggtggcaaagttgtcctaaaaacagcccaaacagcccgaccggggtatgagtcagtggacatgagtacaggatgtccctaatgctatgccttcacagagtaggtgctcaataaattgtagcattgaaagctgtgagtaggctaacaaaacttataataggtaagaaaaaagacttacgagatctcatacattttgcatgagtgttccttaagaatggaggttgtaaactctctccagagtacatttcctttaaataaaaaagggagtatttagaattcctccttctaagtaattatttgggacacataggttcatttacgttagtggttcacaactaggagtaattttacctcccaggagacatttggcaatgtctggagatgtttttggttgttataactaagggggtgcattggcttctggagggtagacgccaggggtgctgctaaccagtcaacaatgcacaagaaagaattttttttgcccaaaatgtctatagtggattgagaaaaatcttatttactttaatgatgatgaagatgatgaaagctctttaacacgcattcagtcaacaaataggacatttaaaagtcatcatctgtaattttggccacatacataacatagcattcatgaattttctctttctctttttggtcagtaacatgcaataatagagtgacatacggatggtgaccttgtgatggtgtaccctttatgtcctgaattaggccatccatctctgaaactctgcaagtatagcatcttcatgcacttggtaccaatgctgttgagaccagaatggcagtagtccagataggggagagcagtgatttgccagctccatttgagttttgaagttaacctaaacatttattaaagacctcctctttttcttatataaaaaattaaataagtcaaaagtgctaatatacagtacatgtaactctgaggtcatatattaaaatttatatttgtaataactttttggaacttgaatcttttcctgaaattggttttaaaggacttccaggcagtgtatgtaaattaaaatattcccttcttagctgtcagatattggattttgtgtgttctgtgggacccaattatatttatatatctatctgattcagaagaccagtatggtgctgtgaaatgttgcaaaacatgacctgatgacaacccaaaacacttcatagaaaactatccaagaatgtgacttcctggagtagagtcttttttcactgagggtgagttgctgcttactaatcgttagttttgttgccttccaattctaaggaatgactcagtcatctccatgtttcccagacctggacttcctcatgaaactttatttttttaattgtttatgttgccagggctggccttgcactcctgggctcaagtgatgctcccaactcagcctccgcagtagctggggttacaggtgtgaacctctgtaccagctgtctcattaaagtttaaaagaaatgggctgtctgtccattctggctttgttctggctgtagagcccagatgactgtcttctgaccctttcctaaggttctgtacataaatacgcagatgagaggggaaggggactccatttttgttagattttcttgtatgtttcaggcaaaagttttttatgtcctggttatctttaattcctctttgcctgtatagatcgacttataacacactttgagaccatgctagcagaatagtatcttctaaaggttggttgttttttttcctattgtaaaaaatattaatgtgaattgccttacaaagatacagaaaactgctataaaaaaatagacatctcccataattccactgtttaccttttgatgtgtaattgttcagttttttaaaaaaatgcatatgtgtgtctatgtatatccacacatgcacataccatttttaattgaaagcacactgtacttactgttttataacttttttcacttaacatgtaacacattttaataattagtactgagaccgaaattatcacatagagcttctatttattgatctaataaatgtgttggctcaaccatggattgacataatttcttcatagacttgttcagtgttttttgtcctctgtggttcaagtaatgttctaagaatgctgccctcttgaaagactgagttcctatgtgctgtgaaattttggattttgatgagtttctctgtgatttaaggatgagtcatgatttgcagtagaatatcaagatgtagtaacaggaagtacagggcactacacatcaaaatagaatgttaaatgatgaagagaaaccaggttaaactgaaaatataccttgaaattatccaactatgaagggagaggaaggtgtgttttgtacattttaacaactcctattactgtttcattttctatcagtggagtttccaaactttgaagttggtgttttaaattgatttttagctcaagattgctgttgttcatagccactttgaattgaggtcattcagccttttgattgaaaccatggcagtgagaccatgaaaactctagttttgccacttatagagcagccccagtaaataaaattagctgtgtgtgtgtgtgtgtgtgtgtgtgtgtgtgtgtgtgaccttctgtgaaattctaaatgtcttcaaaaatggtagattactcagtcttttaaataactattctgtgcagaaattcaactccccatggttcctgcctgaaaccaaaataaaaattgcctttcatccattactggagatttacatatatgtcagcagttttaaagtaaactttgaactagtcatttcaataaattgtgatttggtttgaattcccactaggaataaagtcattgactactttattgctatgtattaatttacatttcctggaaagtactacttttttctaagaattaaataagattataacatggctttacttgtatatttttaaagaaatttagacaatgttatattagtgtattctaatttgaattagactgaaatgaatttactcacacactctaaaacaaggatctatttatgacacatagtgtcataaatatgcttaaagtttctatagctaagaacaatttctgaatatccatgtgtaatatgggagtgatgggataggtataaaacacttatctagataccttctctttttattttttaaattgatataaatgtacatatttatggggtacatagtgattttttacatatatatcatgtatagtaattagatcgaggtaattagatccatcatctcaaatgtttatgatttatttgtgttgggaacatccattatcttccttctagttaattgaaactatatagtattataggcatcctgcagtgctatagaacacgagaacttactcctcctgttggagaccttctcttaagactgatgaagctagggctcctgtactccaagcaatagagtaaagaaaacgaggctcttggtatcttcccctctctcttttttttaagttgaggtatgatttacatatattaaaatgcgcagatcttaagtgttattgtatacatacatgtaaccctacccaaagagacaatatttccatgtccccaagtgttttttggcttatgtatttagagacagagcctggttctgtcacccaggctggagtgcactggcactgtcatagctcagtgcagcctcaaactccagggctcaggtgatcctcctgcctcagtctcccaagcagataggactgcaggtgtgcaccaccacacctggctaattttttttttctttttgagacagtgtctggctctgttgcccaggctggagtgcagtggtgcaagcttggcgcactgcaacctccgcctcctgtgtctaagcaattctcatgcctcagcctcccaagtagctggtatcataggcatatgccaccatgcctggctaatttttgtatttttaatagagacgggcttttgccatattggccaggctggtctcaaactcctggcctcaagagatctgcctgtctccacctccaaagggctgggattaacaggagtgagccaccatgcctggcctctggctaatttttttattttttgtagaaatggggtctcattatccctggccatttacaaaattctgttacggcaatttcatgattctaccatatagattcttaaacttcagaataccttgataaaatattgtggtattttatttaatctgcttagttaaaaataaatcagaatgtgtagatttcctcatcatacagtaagaggaaaaagaaaaatcctttctgtattacctgatatccgcaaaatatttaaccaaaagtaatatgtgtgctttaggaaaaatgtattacctgaagactaattgggatgagaggatattagtaaatcttcccagacctcagtttctttagcctgatggtaaagtagttgaagtggaggctgggtgcagtggctcacatgtgtcatcccagcattttgggaggctgaagcaggcagatcacttgagcccaggagtctgagatcaacctgggcaacatagtgagaccccatctctgccaaaaattagctagacgtggtggtgcgtgccagtagtcccagctacccgggaggtcaaggctgcagtgaaccatgattgcgccactacactccagcctgggtaacagagtgaaaccctgtctcaaaaaaaaaaaaaaaaaaaaagggattgaagtggagaagctgagatatactccctttcaagtcggaagccctatttgtgtactgctatatttggaggaaaggtcttgactcctaagagttgtgaaagtgtgatatgaacttcttgctgtcatctccagacatctgacttatagacatatgcaggaatttaaacaaacagctattttgtggtggaaaagggggatctccataagtttccccttgaattccattttggccccttattgaataaggaacactccagtggaaggccagtattagctgccatgcttcctttcctcctagtcttttgaggtttgtgacaggcagcactgatttctaatgacccacagccacctcattcttggggacatcagtgactgtctgagttggtgctctgtagcaccagataagagtttggtcacctggtgaaattcctcctccttccttctgatagtctttgaaagtgctgtctgcccccactgctgtatcttgagggttcttacattcctctgcacccgctctgatcccttctctccccaggagctagaacaatcctttcaaaacacagatctgaccaggtcattcttctactgaaaaatcttctagtgacttcagcttaggataaagaccaaaacccctaactcaagctgcaagatgtgatttgggccagcaaactgacttttcctcagttcctcaaatgcttaaggtgtcctctgccctctgtccactgggtctttgtcaatactgacagaattttccccccgacccctctatttttcagactccatgcctaaccaatttgtaggcgtcttttagttcacactcagctccaccatgttttcttggggaagcctttcctgtcacctagagtagatctccctcagtcatctgctcctggccttcagagcccttaccacaagcttttttttttttttttttttgagagatggagtcttagcctgttgcccaggctggagtgcagtggcaccatcttgggtcactgcaacctccaccatgtgggttcaagagattctactgcctcaacctcccaagtagctggaattacaggcttgtgccaccacaccttgctaatttttgtgtttttattagagacagggtttcgccatgttggccaggctgatctcaaactcctggcctcaactgatccgcctgcctcggcctcccaaagtgctgggattacaagtgtgagccaccatgcctggccaccacaggctttatttacaggttgcctcattacctgaattctctctctccaaattcttgttacccaaacacaggaacatgagatggagtctcgctccgtcgcccagtctggagtgcagtgatctcagctcactgcaacctctgcctcctgggttcaagtgattcttctgcctcagcctcccaagtagctgggactacaggcatgcgccaccccacctggctaatttttgtatttttagtagagacggggtttcaccatgctggccaggctggtctcgaactcctgacctcgtgatccacccgcctcagcttcccaaagtgctgggattacaggcatgagccaccatacctggccaggaactagacagttttagagacatctttctgaaatagggctggtgcccctcattattcattaatgctattttctccaaaacccgggaaccaaatagatgtgatagcatggcatccctcatgatctgaagttactgtccgtaactgcggtcccattcgatttggatattgggggatgcctgcacgtgtctgtgtcatgtgctgcatgtctgcggtgccatcagtctgtgagctccctctgggcctgcgtccgtttttctcatcctttgtattatctcagcactttgtacaatacctggcactcaatgaattaaaaataatctgaagcgggggttggggggagcttgtcaatatagccccaccttgttttgcccttggacttgataaagccgtttgttgctatgcatatgtccatctcttttctagacaatgagttacttggatgaataggcagatctcttggttaaaccataaagacaggctgggcgcggtggctcacatctgtaatcccagcactttgagaggccgaggcgggcagatcacttgaggttagaagttcgataccagcctggccaacatggtgaaacccaatctctactaaaaatacaaaaattagccgagtgcggtggcgcatgcctgtaatcctagctacttgggaggctgaggcaggagaatcgcttgaacccgggaggtgaagctttcagtgagccgagattgtgccattacactccagcctgggcaacagagcgagactgtgtctcaaaatgaaaacccataaagacagccaaaaagctcctctatgccacttcccatacttcttgtttagacttgcaagaaaagtggatatatagaaatgaggttagtttgctagtatcctggaggacagggtttggctctattgttggtatcagtgttactatactgagagtggtcggttaacagtaaagttattcgtgggataggatatgttgaaagaatctcaatgtaaagtgtttttttttatagaattaatcattgtagagcaaccatcattagtcctttattaaagacttcagttgatcaggttttcgtagttcccttggataaccagtttttaatcctgtaagatccacagttcagggtccttctttacttatagaaaacctgtgtgtgtagcttccatctatacctttttgaaattaatgatgtttctgattgagtttggaaataacaaaagattctgcttacgtgattatgaagacttgattgactaaacacccaaacgggggaggactaggtctcctaataaatttcagctgggttttgccaaggagcaatttgttgataggtcaaaccttgactaagcggaatgtatgattaaggagatttttctccttgcacgtaattgtcagaatagagagattacatcaacaacagcagcagcagcagcaacatcaaaataagcccgaaattattctagggtagctgcaggaattctctgtgggaatcaacagtaggagttctcctctgcttgcacctgtaggttgtcatcatcctcagagttaatgatcctgaggctcaggaagatcatactattctattaagccagaaaaggaggtgtaaatgttagaatgattccctaacactaaaagttaacaatatttctctggttaacgctcattgaactggaaatgtcacttcccctcttcatccccttattggagtttggaaggctcgcctttagaggctcagatgcaaatccttgttggagttgattcacagatgaaagggctatgccctggaaggtgaggagtgtgtatgcgcctttacggatgtgggctgcaagagggaggtctgtgtctgagagaatgggacaataggtgacttcagttggtgctgctcctctttgcagagtcactacccatgtaggattgaagccctggttctgtgagagggtaggagcataagtgaatgtttactaaccgtctccacccttgaagaatcattgtttcacaacgagaagtcaggagagaacctagatttattacagaatttgcaggaaagaagaaagcatagattcctgatcacctcagcacatcccattatgaacatacagagaggggaccaaaccatttagtattatctttgggactgtgtgtgaggtgcagtacctcagtttccttgtatgatcttgaaaccctctggcaactagaattcgtgagcactgggaggcaatttatttctgctaacattcctgtagattttttcaagccccagctactgatcatttagaccagagggcattggatggtttcttttctttttttcttttagagacagcatcttgctctgtcacccaggccggagtgcagtggcacaatcatagctcactgcagcctcgagctcctgggctcacgtgatcttcccacctcagcctccctctgtaatccactgggattacaggcttgagccactacacccagctcttcttttcttttttgaaaaagcagtttagaacaaatgccttgaaatgctccaagtgacacccgagtgagggttagaactgattaaactccgggcagagagatgttatcatatctttgctgcatgcatagcccagtgcaaaaatgcccatagatggactgacttcatcttagatagttgaggcaaaaacagaagagccagtcagccacttggcgtttctgtcctcacttaattcacccctttagttgctgtaccattaattctcgatgctggattggtgacaaatgaagtaatctgaagagtgttaaaattttctttaagtgtattactttaatgacaaaactatatgctgcttgaaggcatcttgaatcagatgacccaagtgtactgtgaattctcaaaggattgggggtcacggctctcaaataagctcgttgccctgctttgatttcaatcagagctgaaccacaagaacagcatcttccttcagcctctgccacatcctttgtgtgttttttttaaacctaaatattaaagcctagtagtttgtctttcagaaaggagaaactttaaaaccttgatgtagatcagacgtgcaccagatgattcaaatattttacctaatgaaaggggcaattttctttttctttctcttctttctctttcccttttatttatttatttttttttttgagacagagtctcactctgttgtccaggctggagcgcagtggcgcgatctcggctcaccacaacttccgcctcccaggttaaagcgattctcctgcctcagcctcccaagcagctggaactataggtgtgcgccaccatgcccagctaatttttgtatttttagtagagatgttggccaggctggtcttgaacacctcacctcgtgatctgcctgccttggcctcccaaagtgcagggatgacaggtgtgagccacgattttctttcacaagggaaaaaaaagatcctctaaagcaggatctggctgttattttgtacagttaatatattcacgctgaacaattattggaagagcaggtagagtaataagttgtatatgacatttcaaaaagggactgcccaagccagtggatggcagatgcccatgtgggaattaagggcagcgaggatgctttggggtacagattgatgtttgatgttaatgccaccaacagccagtctcttccatcagatgcttttggtggtctttgcataacaccattctctggacatgaatgaatgaacggttggtctgcccctcgatgacagttttaatgttattttgctcatttattcagtgcatcttgatggttaatttaaaaatctatttgaaatatgaggcattatgagaagactgttaagttttgaaatcactcactgtcttatttttgcaagttttggaaataacagtacccaccaggaacaccaagctgttttaaaatgtgttccacttacagttgtttgtctacaagtcgggtttggtttaaacagacattgaatgagaggtgagagggctgtgcttgtacttttaccttaacaccactgtgtttttacttcctgttaaaattaactttattagaggtgctgtatacttagaatccctctgcatttggcaccataaccatcatatgcagctagacttgatgtccattgtacaaaaatgtgagcgagacataggcatgtggggagggtaaagctattcaagggctagtgactacctttgtgacttcagatgcagttaaaatcccacacacatgtccaccacatgagcaggtgatgatatgttgaagactgcagagtcactgttttttatagttctcttccaaagcgaatgtattaccataccagatttatgtataaatgtttatgcctggaatttgcatttcctaaaccatgaaagagttttgttgagaagagcacgaaggaaaaacagtgaaactaaccagttccttgcttcaggaaccacctctgtaaggcagctctttgtgcttctcaaaaacctctaaagatgttgatggtgatccctcggtcatgaataccagtaactcataaccatttttgcaagaatactgtatagagtgggacccaaagactgggtaatgtcagtattatccaactaaaccttgacatgttttggcaaatgttaaacttcagaaaaagaaagaaaagatgaataatgcaattaaccctttgtataataaattatcagcaattcaaatatgctgtaaagtgttaacactgattgtatcctctaaatagtgtctagctcagccaactgttatcctttgccatatctgtgtaccatttaaaagagggattaaaaatagtttcagtggatttactctacgaagggagaaaggtaacttttccaggtaggctgatgttagagggcagttttttgttttttgtttttttttgagacagagtctcgctctgttgccatgttggagtgcagtggcatgatcttggctcactgtaacctccgcctcccagctcctagcgattctcctgcctcagcctcctgagtagttgggattataggcgcccgccaccactcccacctaagttttgtattttcagtagagacggggtttcgccatgttggccaggctggtctggaactcctgacctcaggtgatccacccaccccggcctcccaaattgctgggattacaggcgttagccactgcacccagccagagggcaggtttttttagtgacttaaccatccagaaatgattaagtttactttgttattttaaattctatagagaagataagaaagttcgcagttttcctgagaagagcatgcaatggcgtctctccttctccaggccactgccagggctttctgtgaaggagctggaagggagagggtcaagagttcttgttgcttcatccagttcccaagaaaattatagcctgatgtgtcatgcattgtgagaagcaggcactggtgaggagagacgagttttggtggaggcagtaaatgaagtgcaaccagatttaaatgacctccaaggagcctatgagatgcactgtggccttggtaggacaggggagcagaagtcatgctcacaccagagggagttttgcagggactggagaaaggagctgcaaggggaggaagaggctctataactctctccaagatagaaccagggaggtagaatggctgtgcagatgttggaggtcccgggccaggtgcagctgggccagggaaaggggaaggtgcacagatggttgggcacctctctgccaggaaacactcattgctgcatcaggactggggtgcccagcacagctgtgcagacttcccggtccccaggatcccttggggatccttctgagaggaaggggtgatgtcacagcccacacctgaccccacctgggaccccttcctccccagggttgcaccatccttcctgaccctgccgtggtgcagcgtgtgtgcacacgtgcaaaacagagacagggcagacgtgatgttaaaggccatttgtaagcacaacagattgcaggatgccatcgatgcaaaaagagtttgagagaggagctaacacatgagattttcttttattaaacatattttatcttgcttttttttttgtaatgtttccactgggtggtgctgcaggaattcctaccttttgccttggatctacccttcccagaaagacgcctctaaagcataataggaggaagtcctgatttagaaagattttacagtttcaacacaatagaagagttggaggatgctctggcaggaaatgtttcagtttctggatgtggaaaaaccgccatcattttgtatccatgcaaaaaggttctcattgcactgggtaaatactttcgactttcatcagcttcttctttagcacagaaaatctttcaagtttatcagaaagattagggtttcattctagtggaagtggtctgtaagatttcctttattttgatttttgtaacaccatcttaaagtaagtaaataaacattttcttacattgacaaccatagatttaagaaaatacttctgtcaaggctgtctttaaagctgaagacattgttccatccttattataaagatcatttatacagtgtactgatcaaaaggattacatatttttactttcaaatactttcaagaagtcttttagtttgatagtatgtaaaggataagactgactttaccccttctacagaggagaaggttgaaatacagaagttaacatccctgctgtagctcacacgactttttctccttttttttttttttcctacatttgaccaaggcacagaagatcacacaactttttaaggttttggctgcaatgaggatttgtttatcttgacctcccccaactttttttctgttgtacacaggattgaattgtattgatattaatagtacaaaaatttggggaaaagattttccattcaagcaaaggcctctgaaacataagaatcaaaagtagtatgagggtcggggggccagatgcccactggggatttgagagctcattaatttaaagctcaaactgaaagacagtttgtaagatcctagtaagtttcactgactgcggaacagcctgtttttttcggggcatgttgtggtcctccatgaaatcctaaacactgctttcttagaacctgaaacaggcttccctagaggtgtttctttttaaaggaaagttttggaggcactgctgggtactagggaccttgccagatcctgtcatgcacggtttccctgggattccagcctgtccctattcacacttgaagtgcttctcatgattcgtttcgtgatgtgaggtgcatgcatgtttggggcccctcttgggctaggctagctcacttctgtttcctctgactttcatcctgttccaccgccctgcgcgcgggcgcacacacacacacacacacacacacacacacacacacacacaccccgagtgggaggtccaggggcaccgacttccagaacacgcagcttctcaacggcccacttgtatcgagagccacccttgcttatttagtgttgggtgaaccttgaacctatttaaaccacgatacagatctttgaaaggagggcactggttaacaaaatggtggatggggtggattcaaagattctttcttgaaacaacccaactggagcagctggagacacagatgaggcaacaccagaaatgaacaaggaaatgtcctgatttgattcctagtaggaatgtatttcccacgcattacaatgagacgtttcccttagcagcagtgaagtgtgcatatgagaaaagaagcctctactgggggcatatgcgcgttgattaagaacctggactttggagccagatgcccctggatatgaggctctgttggcccattttacccatgtggccatgagtgtcttatttcacctttcgaagtcatagttcctcgtgggcacagccaactgagagtattaaatttagacagcatgtataaagcactcagcacaattcctggtacatagtaagtggtcatcaaatttaattgcactaaaaagaaaagctcctatgtaataaagtaatggatttctttaggtatgggcgctgttcttcagaattccatgggatctcagcattgctggtggtggaggatatattaatagctaacgttttcttagaacagtgctcttaatttgaaatttataagttatttttagagttttataaatcctggtgaaattatgtgtattttgtatagctgtatatttttcctagagaattttagattgtcagaaaggtccatggaccaaatatgtgaagaggaaactgccctggggatgtcattgtgtgttgtgtgtgtgtgtgtgtgtgtgtgtgtgtgtgtatcagttttatgtatgtgaatatattttaggttgaatatatgagattgctggtatttaactagttttgatctctaaaaagaataatttcttacagttcaacttaatagttgtgatattatgaaacaatttgaaatatatcacaatgtgatatttataatgaaatatgattgtagcttatttttgtacgttatttatcaaagcctagcaagttaaaattcatcaggcagccttggaccactagtaaccatatttacctaaaataacttgtgcttttccattgaccttaatcacaggaaatacaaaataaaaacttttctgtgtccagtattatgaaacagtctttaattttcattgtggatttattaatagctttattacatctaatgaatcatttttctgatccaaatgactactgtttaggagaatctgcttagtattttttccctgttgaattcacaatgttaattactttggggaggaacaaaaattctgagttttcttgggcgataagaacctcagtgttgtttcagaaggcagagttgggctgcagtactgaaggttaaaacagagctaaaacacaagacaaaatgaaaccagagctgcagtgacaaagtgggacagatgtaggaggccaggtttcctgtggcccattttccagtttcctgcctgcaacctgcagaagaagaggaagctgaatgttaccaagtatgagaactgcgggacgtgcttcaagctagaattaagagaatgcaaacaacacaggcaacaaaaacaattgcaaagaaagtgaatgttcaggttttagtccaaaaatgtctgggaaggaacagcccatctgtttaaagaaaaagcattgtcagcagagcttgtccttccatgtgagactctgagggggcctagggactgcctcaggttgtaggaacctctgttttttatagccccactcatctttcaagacatggtctgctgttttaatacagaaggttacctgaaaagattttccctgcaattcccaggacttctaaatctgtttcctggggatgttgttataggggggaggtggatgtggttaaccaagcagctctaatgaacggcagcctcaatttgggaaggccgggtgaccagttggctgctttgatctaggaggcttatattcctttaaccacccaataaaatttttgtctgatgttttcaaagaagagattaaatgaagatgtgtgtgtgttgaagactgcatagtgcacactctgtgtggctaccggtgagccacgtggcgggatacaggactcaaagaagatcacactggagaagggagtgagttcatctttctcgcgggggagggggaagcaaaataaaattattttttctaggctctttagctcattttggaagagtctgtgaagtcagatcttacaatacccatcttagagaaatcgagagccaaagaaattgtgattcattacacaccttttaattgagtacctattgtttgtcaggggctgtgttggaagtgctgggtaatgcaagtgaaatgatggctaaaaataaatagctgtttatgtgttgtggaaggcttcatataaagcatatacgaagggggcatagaaaccttgttgaaggtttaaaacatatataagcctttggcgcagtgccatgctttttccacacaccatctcatttaaattgccttgctgctttgtgctacagagaaatagggtgtgcttctgggacaatcagttatttctttaccctgcagattgaccacctcttcttctctaagcccagaaagaacaaactctataccaggaatcttaaaaagttttggactgttagggatcaagaggtacccacacgaggcagccttggatggaaataggcccttttctgtcttactgtgggcccgctctgaaaatgtaggataacatagggctgggttgtatggtggttattagggtggggtgcggtgaattctgtgggaaaaagtcgaatggttgtaagacattttctcagccagtgttaacgaagccatcatttactactcacccatataaaagtcactgacaaaccaattgagttacttctaatttagccagagacagcatagttccagaaggaaagaggggtgttcctacacacagtaaattgcatatgttgttatttcagtggttgtcagtgatttcctctgaaaaatctctctttttttttgttttgtttttgagacaggttcatgctctgttgcccaggctggggtgcagtgatgtgatcacagctcactgcagcctcaaactcctgggcttaagtgatcctcctgcctcagctccccaagtagctgggactacaggtatgtgtcaccacatccagctaacttttgtgttttttgtggggatgggggtctcatgttgcccaggctggtcttgaactcctaggcacaaactgtcctccctcctcggtctcccaaagtgctgggattacagacatgtaatccgttcattaaaaacccagtaatccttgcattgtgctagatattacattgtgctagatataacatgtacaggcatgtaatcccagcaacctttctctttcccaagatggaagagttatttaaaaaacattgcagactgggccagacacggtggctcacgcttataatcccagcactttgggaggccgaggtgggtggatcacctgaggtcaggagtttgagaccaccctggcgaacatgctgaaaccctgtctctactaaaaatacaaaaatgagccggaggcagtggtgtgcgcctgtagtcccagctactcgggaggctgaggcacgagaatcacttgaacctgggaggcggagcttgcagtgaaccgagatcacaccactgtgctccagcctgggcgacagagcaagactctgtctcaaaaaacaaaacaaaacaaacaaacaaaaaaaaaaacagcaaaaaccattgcagactgtaaagagtaagtaaataggtgagcaatacctacttttgtttaccttttttaaaatgaacaatttgtagatattcacagaatgcaaatacttgttaataaatgaaaagcttgggagacatgaagttggcctcatgccttttttatacacagtgataatgatcaaaataatttaaatgtcctttgaaaataaatttaatagtcttccaactcacagaaataataaaaaacttcagaacttgtataagtttttttttcaaatattatccttatttacttaataccttacacttactctgtgctgagttattgcagatccctaataatataaaatgttgtcttccagttctttgactgaggtacagggttcattttctataatgaaatggctactaccctttgtcttagacaatgatagtatcatgacatggaaatgcatagcagatactggcagaggagttgaactcagcagaattttcagtaagaagtgttcaaatccatcttcatttctctaaccatgcaaaatttaacaaacgaaaaaagacatgggtacctcatgagcacctattttgtttattccttacccagaagtttttctccttttcttgggctctcattgccttttttttttttttaagttgcctcgtttcttatttcccaccacatagaagcttaagaaaatcaaagctaattctgccccctcaactcccacctcagtaaaaatgaaacaaggaacatgcaaagggaagtgctaggttgccatcagtagaaagaagaacaaataagtgggcatttcgacttctaagaatggaggcaaaaacctcatactttgcataaggggtctgtgcggcccttgctcacattaagacgtcgggcgccaccttgtggccgacaggaaggaggtcagcttccaagaagaggccagtagcttttcggtgacagaggcaggaggcagctgggacacctgaagctgggatcgtgtcatgtgacctgacagctctcacgtaggcggaggcgggcacagcgtaatgagaatgatcaatatttctgtcaatagcatctttctttttgaggctccgtcggattaaagaatgaatcaaagttaaataaaaacatgggaaagactaaagagggacataaaaccttttttttttttttttttaaagagagatggtctcgctctgtcacccaggctggagtgcagtggtgcaatcacagctcactgcagcctctacttcccaggcttaggcgatcctctcacctcagcctcttgagtagctgggtggacaggcgcggaccaccagacacagctaatttttgtattttttgtagagatggggtcttactcttgcccaggctggtctcgaattcctgggctcaagcgatccacccacctcggcctcccaaagtgccaggattacaggcgtgagctatcacgcctagcctcaaaactgttttcataactgcattctttaagtgcaaaaagctgaaaacagaataagggcagaaaataatcactcagagtctgcaaaaatgtccctcccctctgtgccagaggtcaagcgttttactctcggcctctctactctgtgtcttttgccctgaccagcccgtgaatgccctcctgtagggccccatctgcagcggctatgagcggtgttgtcatcattgtcccttggcttgtcatttagaacatctttctttcttcgctatctgacccaacagctctcatgtacttgactctccttcctgctccagagaaaccacatagatgggagccgaatgtaccccagggaaggagagagccccagggaccctctttgctgaggtcacacagcttggaggcctcagggtcagcatttaaaccagtgtttgttaagctggagtcggagaatcagtgccctagcatctgagttttctgcaagcatttacgattttttgtgctttcatatttgatgatagactacaaaacagaagcatactccaagtcaccttataaaccacagtcgccatgtggctgaagagtctccctggatttcagtgcctgtgtggggctcattgcctaatggacaaagagcccaggtgggtgctgtagctacacaatgccttctagcctggtgaaggccatgtgactccacagcaagctctgtgaggaggattccctgtagcttaaaaggtaattgtagttaacatttaaatagcacttactttgccccaggtgtagtttaagtgcattattagtaacttctgtaactcttacaacaaccctgtatgatatgatacttttatcatatcagtcccattttacctatgaggatactgaggcacagaaaggttaagtaacttccccaaagtcccacaaccagacaggacgagtctttgctgttgaacccagagagtcaggtgccagaatctgcgcttaccttccaaatagacaaaagtgcttcactagcacctgctttgagttatagaaaatagctaaacagctggatgcgatggctcatgcctgtaatcccagcactttgagaggctgaggcaggagagttgcttcaggccaggagttggagactcctgagcaacatacagagatggtctccacaaaaaattaagaaatgagcagggcgtggtggcacatacctgtagcccaagctacttgggagctagagatgggaggattgtttgaccccaggaggctgaggctgcagtgagccaagatcgtgccactgcactccagcctggctgacagagtgagacctagtcgaaaagaaaagaattatgcttcagtgaaaaactgcattcttgactctagagaagactccctccggatgatgtgattctgattttttggaaggtattttacaacgttgttgactataggtaactgatcatgaaataattctcgtctatagacagccaaattctgtcttacagagtgccattgactcccacccctagttttgcctccatttaagcatttatttcaatgttcttcttctataaatgcctctattattcagatgcttttttgaactcattataacgtctgcctggttccctactgaattatgagtgaaataaaatctcgaacgtgttcattttgatatctgtatgagagccatgatttaaccctcttttgaaaattattttttaacaaaccaattcctcagctgggcacagtggctcacacctgtaatcccagcactttgggaggccgaggcgggcagatcacctgaggtcaggagatcgagaccatcttggccaacatggtgaaaccctgtctccactaaaaatacaaaaaaattagctgggcgtggtggtgcgcacctgtggtcccagctacttggaaggctgaggcaggagaatcgcttgaacccgggaggcagaggttgcagtgagccgagatcgcaccactgcactccagcctgagggacaaagagagacgccgtctcaaaaaaaaaaaaaaaaaaaaaaatcatttgtcaacactgagaacgaaaatcacttttcctcctcctcctttaaaggaggtatgcatatgattcacgtttgacaagctgctctaaatcatctaacttcactctaccatggcagatcacagctctgcattacaaagggaaaggagttggggcaagtaacaggtggttttgccctctggagtaggagtgggtggacctcagccccctgtgaccatggtcctggtcagtgctggtagaaatggtgagagaccagccagagacgggaaggccctgcaggctgcaaggttgaggtgaggtcagaggaatccagaaagtatcagatgtgaagggggcacctcttcctgtaagagcagcaatgcctttaaaagcagactgatgggcctcagtatgaaagcacagagttcgattctgcaaaaagaatggcattaaaatacctgataaaattttgtacattcaaaataaggtctgataaggacgggaataatagactggggactccaaaagtggggagagagggagggagtgagggctgccagattacctgttgggtgcagtgttcgctatttgggtggtgggtatgctagaagcccaatccccgccattatgcagtatacccatgtaacaaacatgcatgtataccccctgaatcttaaaaaagtgggggtctaggcaggggaaagataagcattttttttttttttttttgagacagagtctcgctctgtcacctaggctggagtgtagtggcgcgatcttgcctcactgcaagctccacctcctgggttcacgccattctcctgccttagcctcccgagtagctgggaccacaggcgcccgccaccacgcctggctaattttttgtatttttagtagagacagggtttcactgtgttagccgggatggtctcgatctcctgaccttgtgatccgcccgcctcggcctcgcaaagtgctgggattacaggcgtgagccaccgcgcccggccaagataagcattttctcattagataaagggaatttttaaaaaaagatttctagcatgccttttatgtgttctacatttttgaagctcagagtggtgggaaatcagctaagtaaagttaggcagatgaaacattttaacttagagcaggcctccatgtgcataataatctatcaaacataaatctcaagtaccaccactttttcaattgttgatttaataaaagccacagtgtactgtctgaattactcacattccttaaagtggcatccagataaatgggctttattgtacctgcctgttaagacattggacttcattaaggattctaggtatcaaggaattaatttagaaaaaaaaatcgtttaaattttttttccggtgagagagatactcatatagatgagtttacgaaaatctgtagtgttagcggttattggaagggcgtacctcccagcatgatggtacaaagtctgtgttttccaacaccccagagggcaaaatttccaactggcagaggcgcagtggaatgtacagtgtgattgtatgtgaaaatagttgtgtaaattatgaaacttgatctcatagttaaactacgtcgagtggaacgaaaacaatatggagagcgctgtggcagctggtggcccactgcccacctgtccccctacccaaacctctgccacagacaaccacgcattttcatcatgcagatggctctggccagagaggatggtgggtcccagagctgcctgggggctccacgataccccagagtgacttctgagcgtagacaggagtgactgatctttgtagatgcaatgataagctcacaggaaagtagtttttcgacttagctctgagtaatgtctggctgcgatttccaccgggaaggctacatgactgcccagtcatcgaaactggtggatccaccaggttgaaggagtggctcaagagagcgcgagaagaggagaacgaggccctcagcacggggcgaggctgggcatgcctcagacaggagaggctggagcccttagtcacctccgccggagcagtgttgcgcatagcaacccctctgagtaatcctctgatgatcccctgtgcctgcagctgccacccaagctctgcagcttggttgaactgtgggggcatttctgtgattcctagtgaacagctcttgccttctctaggcgagttcctttattccagaaatctgggaggccctgaagcagtaggtccccatccccaccactgctcctctgcctgttccctttctactctttcacctgtcctttttgtcctttttctttctttctctccttctacctttgcctgaggttatggccatagcacccatggctgccacttagcccatgtgtggcctctgagtaaaaatgtgatcagctgatccctccacacctagtagcatactttttcgtgattttttttttttttttttttttgagatggagtttcgctcttgttgtccaggctggagtgcagtggcgcgatcttggcttactgcaacctctgcctcctgggttcaagctattctcctgcctcagcctcccaagtagctgtgattataagcgcgggccaccacgcccagctggttttttgtatttttagtagagatgggatttcatcatgttggccaggctggtcttgaactcctcctgacctcaggtaatccacctgcctcagcctcccaaagtgctgggattacaggcgtgagccaccacagccggcctttctcatgattttgaacacaagctctagagcataaagataacagcaccccagcaaagggagaattttttttttaaacaaagacatcatgtattttaatagtcagcttttgctgcagtggtgctgtgtaaccagttgccccaagatcactggcttacagtggcatttatttttctcacaagtcagtgtcacggatgctgcttcagatgatgggcgggtggggcttggcttcggactttgggttgagttcaggtcacctccatgtgtctcattctggggcagcagcttcctggcagcatagcacaggaggaaaagtgccaacttatgatgcctccaagaccccagctcggcaatgggatgctgtcactttcccgtgtcagtctcctggccaaatgcaatcacatggcaaagccccaatgtcagcactcctcccacagccactccagtgcagggctacacagtcacctaaggagagggcagttgagaacatttaacaagtctgccatatgggttctcataagtcatgcccagaacatggtctctgacacatggggttggattgcaatgaaaagtgattctgtgatgcacaagaagctccgaggaggccaggcaggtggaaatgctaagtgtagtaaaatacatggatagatgtttctgctgccctcctgtcccattcggaacgtgatgtcagttaaaagtggggggtggcggtggccgaccactttcccacctggcatgtgagcagaggccccacagtcccttccctgcagacctccaaacccaccggcagccttctgccctcaggagcagattcatctgagcaggcacttaaagtttcaaagatatgttaaagctgactgactgacatgtttggccaagaaaatctcaagaatttgcgacaactgttagccgttcttagtgccagtgaagagaagaaagttgtggctcatatccaagtcatcagaagggtggttcataggaggagttgggactcgtcagctgccatgcatcccagcaaagtgggggcttgcaagatttgtgagatgcagaggtggttttgacccagcagtgaaatgactgtcttacagaccattgtggttaatactgatttctgtaaagaatatcccctttaaagagccctaaataaaatgccctgtgggtaattggagagcactcctagtctactttcctttaattgagaggagttgtggggttgacaatattggtacaaataaccctccccaaggcaattattctggcttccaggtctcccagagctgccccctgggttgcggtcactccaggttcagtcccctgccccccgcccaccaggacttcagtgtctccctcctatccaaggggatgatccctagctctctgtgccactcacaacagttgatccgtggcaaagcttttgaggccagtctaaccacctttttttaaatgtaatgaggattgataacacaaatggattattattattattactacttagaatcaatacctattgtcatgaaagtcctcaaaggcctgaaattgagaaactgcccaggagtggggaaaaatttccttgagaaggccccatttgagctgggtcacaatggatgagaaagagttcaccaggctccaaagctaaggaacagcattttagccagaagaaatagcatttaaaaagttcacaaaaggataacattgtatatataggtttttgtctcttcatgggagaaattgcttttcccatctgtgcatctgtgatggtgggctttgacctgcagcatggtgagtgccgggaaagggaaggtctctgcaattggcagtgattgttcggtttcacaagcatccacggactgggcagctttgagcattgtatgggttatcagagtgctggcaatacaaaataatccagcaaagtcctttcctcgtgaagctcatcacagtaggaaaggcagttacacttagacatataccacaaccacaggagagatattccaggcacctgtataaagtatggggtccagcattttagttagagaccgactatattagttctttctcacattgctatagagaaataccccagactgtataatttataaagaaaagcggtttaatgggctcacagttctgcaggctgtacaggaagcatgatgctggcatctgctgggtttctggggaggcctcaggaaacctgcaatcatggcagaaggcaaaaggggagcaggcgtgtcacatggccggagcaagagcaagaaagcgagggtcaaggtgccacacactgttaaatgaccagatctcatgagaactcagtcactaactcaaggatggtaccaagggagatggtgctaaaccattcatgagaaatccacccttaggatccagtcacttcccaccaggccccacctccaacgttggggattacaattcaacatgagatttgggcggggcacacatccaaactatatcacggacccacaaagaaattgatgggatgggcgggaatagacacttgtgttaagtggggaatggtttgaatggggactcattctgcaagtggtcatgtcattaatcattgttctgcatcattccccatgcatcgctgtcactcgtggggacatgtggtgaatagaggaggatcacagggcctccctgtatttctgaattgtggctccttacagaaatgcagccaggaagctcctggttcagagtggccccttgagatggaagtgaaagctactttttattaggttcactgggggaaggaggggacagctgagttgcccattctgaagccccctctctcctcgccaagtttggtcggcatcgtgaccagcagctctgacctggcctcctctccctgcaggtatggagagtgcaatcacgctgtggcagttcctgttgcagttgctgctggatcagaaacatgagcatttgatctgctggacctcgaacgatggtgaattcaagctcctcaaagcagaagaagtggccaagctgtggggactccgaaaaaacaaaacaaatatgaactatgataagctgagcagagccctgcgatactattatgacaaggtaaacccttgaccttgcatggggccgtcttggggagggtggaatcccctctgcgtagttcactgatgaaagaaaataatagcgtgctatgaatcaagttagaaaataaaataggggcagtgcataccttctttttggagaaaagctgtgctgtagggattttccccaccctctggacgccctttggatattactgagggtcacattttgtttcttctgcattttcgtctgagtttgctgaagaactttgctcacaatacaaatgagatgcaggcaggctctggggctttcctcatgttgaattgcttgaatgacacaatgcgtgttaaaatccggaaagtctgtttatcctgtctggtttgtggttcaattaaagggacctttcctggaaggtggtagctttggcagattattttttaacaattcagtgcctcagtatcctcgtttataaaacaggaatcagcataggaataataataggaataggaatcctgtctcaggattgtggtgatgaccgaccgagccattacatgtaagtacttagaacgctgctaataggagtaggaatcctgtctcaggattgtgatgaccaaccgagccattacgtgtaagtacttagaacactgctaataggagtaggaatcctgtctcaggattgtggtgatgaccgaccgagccattacatataagtacttagaacactgcttggtatgtggtgcttgcaacttcatgggaaacttccctaattggaagaaaaaacatgttcatttttaagtcatagagatgaggcagagtgccttgataagtgataatatagcgtagttgccaaaaccaggacagttggagtgagttttaatgcatttctggaaaagcagttttaatgtgcttgctagggcaaaattattgctgtttaggagaaccatttcaggccttaattgttagccatttcagtttgaatctgttgttgctgaatatttagcctctaagacataaaggcatagagccatgataatggtaagcttttgttctggttttattgttcatattaaaaggtgaattaaaaactgatttaaatattagttcctgatctatatttagggtatgccgtctgccaacccctttggaattcaagacataaggattatacgtttcaggaagtagagacatcattaattataaagtgttcctttatgtgatcgtaattgcacgtgattgtgtcattgaaatgctaaaggtgctctcctttaatgtagcaattaattaatcctgacttactgcagagtcctactaagatataaaagcacttcttgcaaattgcactgtctgaaagcctcgcagatggcttattgttttgcgtgttttcccaggttctaaattctgcagtgggaactggggccgctgaaggaaaacactcccgttgcctgctggcagagtgcctaaaagctgggctttgagactcaaaaagcattttcattgttttcaatcaaggtatcaaaaaaagaagtcctccctctgtgtctgggacttgactcatctcttccctggcctgggcctgggggcttaagggttgtgtctctttagcatgaagggttgtcctgggctggaaatgactgctcacaaaattagcaaagccattcctgtttagactatatcttatctcccttgggcagattttaaaatctctagagagagcagtttcatagccttcagtcaacaagtatgttctggcactttctgtcagacgtctaaggtgctgtgctgagcacttcttccccttgtctcctttaaactttacaacaaccccatagacaggtgctgctgtcatcatcctccttatacacatgagaacgtggaggcttggatgagaaacctgcccaggtgcacacagccagtgagcagcagagcccggatttgaacccagctggtccacccaggttcccagccaaaaggcacacacacaccctgccttctgggccattcatttcctttgcctttgagtgtcttgagttccaggtaggcagtcaggctgtccaaagggtattacaacctaagaagttttgtttattaccaagagcctcaagctgggcatagtgcctcacacctaatcccagcactttgggaggctgaggcaggaggatcacttgagtccaggagtctgagaccagcctgggcaacatggtgagaccctgtcacaacaaagaattaaaaattagccgagtgtggaagtgcatgcctgtagtctcagctacttgggaggctgaggtgggaggatcatttgagcctgggagtttgagactgcagtgagctctgattgcaccactgcactccagcttgggcaatagagggagatcctgtctcttaaaaagaaaaaaaaaaggaaagaaacaaattcagtactgaaaaatcccagcaaacgatgtgtatcaggtagagcccaaggtcaggagtccaggtggctggtgtggcctgcctgcctgcactgcccctttctctcttgccaggcagagcatgggggctggccacatgacctttgagcagccccaggcatcaagctggagctggcagtaagggcaggagcagcctcctatcctgttgtatcatgtagactttggccaccagaagaaattgctccatgtctttccttctacagatatacctgtccacatgcacacacacacacaagtatacacatacacacctgtccacatgcacacagagatgtccacatgtgcacacccatgcccacatgcacacacagatgtccacatgtccacacagatgtccacatgtgcacacccatgcccacatgcacacacagatgtccacatgcacacacacatatgcccacatgcacacaggcacacacacccacttgcacatacatatccacatgcacacgtggccactgccatatgcacagacatgtgcacacgcatacatgtacatgtgcacgcatggctggttaattcttgcttataaaatgctctcaagtgatgagcaagacggaaagttagactcttaatacagtttaaaaagaaaagaaggagagggggaggaagataagaagaaaagagatggttgagggaaatggaggggagaggaaaaaaagaggggatggagaaggaggaagaagaggaggcatgtcaaaaagagatgacgaaaactacactctatttgacattttccgatgacctctttcttccttccgttttgccagtgtcactctgtgatgataggtgtaagttgactgtgtgcattgcccgtctgtgaccgttttcgactcacagaaatggcagtctgaagtggctcggcctcttgcttgagagacagattggagcagagtctttgtggatgcaaagccacctgggccactgccgtgtgtgccaccctgaacttcaagctgccctgaaccgcgtgcgtttctcagtgtcacgtacagctcggcctgaccgtttgccttttagtgttctcttccttctcggtgtcctcctcctcttcctcactaacattcatccagagcctttcagtgcagaaatcaggtagctgctgaactcggcagctgcgtcctttttcccatcatctcttctgtcctttgctagctgtcatttcttccctcttggcttcaactgcacatccctgggtttgtcctaatagggaatttttcccacttgagtagacaagcatgagaatatcattatttttatatgttatatgttatatttttagcagagaaaaaagtggaaaatgtgtgcaaacttgcagaaggccccccggaggagggtcgtccctgtgcccatgctgtcaggaaggccccggaggagggtcgtccctgtgcccatgcggtcagaaaggccccggaggagggtcatctctgtgcccatgcggtcaggttggggctgaggcactttgatcattgctcctcctcagagtgttcttttcctcccctctcagattataataacgaggtagttacagagtgagctccagcctagatcgtctgggtttgaatccagctccatgactgtggccgtgttgcctaatctctctgagtctcagcttccttttctgtaaagtgggtataatagtagagtctacactgtggggctgtggtgggattcattgtgttcacacgtgtgcagggctgagaacagggccccaaacagggtaggcacaatgaagcatgagtcagaataataatacagatgacagtttctctatcactaatttgaacattgcagacagtgcaaagaagaaaattagaaactgggaggatcacttgagcacaggagttcaagtccagcctgggcaacatagtgagacccctgtctctttttaaaaaatttagcacaatttattaaaaaaaagaagaagaggccgagcatggtggctcacgcctgtaatcccagcactttgggaggccaaggtgggtggatcatgaggtcaagagatcaagaccagcctggccaacatggtgaaaccccgtctctactaaaaatacaaaaattagctgggcgtggtggtgcacacctgtggtcccagttactccagaggctgaggcaggagaatcgcttgaacccgggaggcagaggttgcagtgagccgagattgcgccactgcactccagcctggcgacagagtgagactctgtgtcaaaaaaaaaaaaaaaaaaaaaaaaaaaagaagatcaaaacctttgttgctacgttgctgctcaggcacatggagatagggaaacgccggatctgagtattatggcccttttcacttaggacctatcaggagcactttgtcgtgctttttaatgactgaagacagatgacaacagtttctttcctcagttgcttattttcatatatttaatctgttctgaaaattcagctgtgaagatgctttcttatttaaatgactctccctcaccgctctgaatcaaagctctggcacttctctgagcacctgcagttggagccagtctccaccttctggactgtcttagtgactggtgggagctttgtatccagagccctcgaggttaagagtccagctgtccctcaacctcagagtctcagttcacccattggaaagtggtgatgggaacagcacccttccttgtcggactgtgtgaggatggaaagagaagataagatgacgcggataaggtgcttagcacagtgtcaggcacctactcagtgaaggctcatcattccagttatgtgtatttataaaactgactgtattatgtcgtagctgtctgtatatagctgacttcatcgtggccttctggatgcaccacttttgtcgctctggtacctcggacagggtctggcatgtattagttgcttagtaaatgctagacgagtgaacaaatggataaaacactgatgtgtccactactcaagtgcacaccatttatgtcatgaaagttgatattaatgagtgataaactaaaaaataaaagtagtcactgctttttgtttattgtcccgtagtttcctagggctgccaggtcagatgaccacaaactgtaggtggcttaaaacaacagaaatgtgttgtctcacagttctggaggccagatgtccagagccagggtgtcagcagagctgtgctccctctgactcaggtggactctttcttggcctctccccagccccgggcttgccagcagtccctggcgtgccttggcttgcagcagcctcactcggatcgctgcccccatcatcacatgacgttctccccattctgtgtgtccagattttccttttttttttttttttttttttttgagacagagtcttgctctgtcgcccaggctggagtgcaatggcatggtctcagctcactgcaaactctgcctcccagattcaagggagtctcctgcctcagcctcctgagtagctgggactacaggcatgtgccaccacacctggcgaatttttgtgtttttagtagagatggggtttcaatatgttggccaggctggttttgaactcctgaccttgtgatctgcctgcctcatcctcccaaagtgctgggattacaggtgtgagccaccgtgcctggccgattttcctcttcttatgaggataccggtcattggattagggcccaccttaatgcattatgacctcatcttaacttggttacgtctgtaaagacccctttctaaataaggtcctagtcacaggtattggggattaggacatcagcatagtttggggaaggacaaaattcactctgtaacacctccatatacagtcatgtaccacataatgttctggtccacagtgggccacgtatataacagcggtcccataagactataattccatatttttactgtaccttttgtacgtttagatacgttgagatacatacatacttactattatattgcagttgcctacatacagtattcagtacagtaacgtgctgtacaggtttgtagcctgagagcatatagcatagccttggtgtgtgataggctagaccctccaggtttgtgcaagtacatgctatgatgctcgcacaacaacgaaattccccagcgacacatttctcagaacgtagcctcatcgttaagtgatgcatgactgtatttcagacactgctgggctttttgtttagatttttaaaattatacttaaaaggagagtgttggtttccctctataagtgatggttcgattcagcaaatcctaaaaggaaactgctccccatgacaggcacagcacctagattctgcagcaggtataaatactagactccgtgacaggtgtgacactagaatcaaagacacatcgctgagccaagtccccagggtggagacaggtccacccaagaggagtcctgccttggagggattcagagttgctgggaattgagcagctccctggtctcgaagtgcacatgattttaatagatgacttaaatgggaagaaaaggcgaccctgggggcgccaatcccggattggcagtgctgggatcggaggctctgatcactgtgctcagaggctccttcctgcatctacagttgtgcggagtgcacgtgacgcaggtgtggggaaagtctggagggccagggttccgcatccgagctccaccagggaactgctttccccagttaagcttttgtagaggctgcggggcaaacccaattataattccaagaaaggagtgatgccccatccagggagcggcatgttttgcaacccgggtatggatgaaaggcccctgttcatttgagaaacacacaggtcatgggaggtgcctgtggctgagcccgtgaggggcagaaaccagagtccgtagaggcctaaacaggacatttaactgaggcctgggcattttacacttcctctctgtcaaacagctttttcccttggtcttgttttaagccctaggagataggtttgttactgtagttctgatggtgtgaatttttggataagtttttttttccttaggtttaaactgagtcttccagaaggtagttttataacctgatgtaacagtaaggatctttttcagagattttatttattaacaagctaacaagtctttcactccttaacatcagacagatggacccttcatcttagagtagagaagagcggggcccatgcccagagcatttctgtcactggccctgacaactgccaggcaccttatgggtcaagcctgaggggcaggaattcctgctgggattcacagcattcaccacttcttgaataaggcttttttttggagacacagtttcactcctgttggccagactggagtgcagtggcgcgatctcagctcactgcaacctctgcctcccaggttcaagtgattctcctgcctcagcctcccgagtagctgggattacaggtgcgtcccaccattcccagctaggttttgtatttttagtagagatgggatttcaccagactagtctcgaactcctgacctcaggtgatctgctcgcctcggcctcccaaagcgctgggattgcaggcatgagccacagcacctggcctagggtttttaattatacatccacctccagttgacacggcctcttctttcacctctgccttttcctcagccatccagccatccctttggaaacatacctccttcctcctgaggggctcagcagctggttggggagacagacatgaaaccaattttagtagagaaccccgtgtaaagtgctggcatggccaatgctggggtcttctgggagagcagggagggatgtagaggcagagggaaggcctccggaggtcaagacacttgatctggatcttaaggaatgagaatgagtttacccggctgaaaaaagttagaagggatataccaagaagggaacagtgtgagtaaaggcagggacgtgtggatgagtttgacctttcaagcacagagtatcttgggagtgagggcaagatgtggttggaaaagtgagtggggaatggagtgtggagtatatcatgctaaagggttggaactctgtggtgagagccaatgaaaagttaaaagctggctgggtgcggtggctcacgcctgcaatcccagcactttgggaggccgaggcgggtggatcctgaggtcaggagatcgagaccattccggccaacatggtgaaaaccccgtctctactaaaaatacaaaaattagctgggcatggtggtgtgcgcctataaatcccagctactcgggaggctgaggcaggagaattgcttgaacctgggaggtggagattgcagtgggccgagatcacatcactgcactgcagcctgggcaactgagcaaggctccatctcaaaaaaaaaaataaataaaaatacattaaaaaaaaagttaaaaacaggagatgggggagggggcggggaatgctcacacctgtaatcccagtactttgggaggccaagatgagaagattgcttgagcccaggagttttgagaccagcctgggcaatatagtgaggccttgtttctacaaaaacaaacaaaaaaagcccccaagaaccaaaaaactaataataacagatgagcaaaaatgacaaaaaattagctgggcatggttgtgcgcacctgtagtcctacttactggggaggctgaggcaggaggatcacttgagcccaggaagtagaggctgcagtgagctcttactatatgactgcactccagcctcggcaacagagtgaaagagcaaaactctgtctcttaaaaaagcaagagagtgctatgagcagatttccattttagaaataaaaatctgtgtctcctcttactgttcttggcatggatcattttacacccaaccatacagccttgatctttctggccaggtaccatgaatctatttctctctgctggccgagttggccctatcacaccttcagcatgaggtggagagggaaaaaggatgggctctggtatccccataatgtgggcaactgtcttttgctcacgagaagctgaagacacgggttctctctgttgttgcagaaggagacctggaagctttcacaacccctcatcctcttctgtccagcagaccttttgtccttgctggcactgaacattcaaccccgggggaggctgaaagctctgctggctcccttctcatcaagagaggaaaatggtgataggatgaaaaatcctcccgtctccacagcaacctcttggcttagcctcacgatgtactgaacaatctttacttaattggaagggatttcggggagaacagtcaagacaaagtcattggcaacctattcctggaattagaacgcatcaccttcttaacttaattggataattcattttaaattgggcgtgcaatcacgacaagaaaatgttagtattaataatacatatctgagatcaactgcctctcccaagaaacctggccctggtggaattctttaattcctccaaaataaattttgcaaagataaaatgatgttgtcaaagtggagaaggaacaaacatccagcaggcattcatatcccagaactttctagaacacctctgttggtcatggaatgttagggaagacctggactccctttggggtgttttatcgatcgagggggccctctgtgcccggccctgggtgtgagtgttgagggcctggtgtgttttgttaagtgtctttctttcctaccatagcagctattcagatggttggaagcataacagatggcaatgggctattgcctgggggcgcaggggatgaccagggcctctctcacaagcttgggtcctggaagctgcttagagacctgtggagtggctgaaccgcctcatggaggtcttccaatctggtcacattgtgccgggagatggcagctggtatcaggggaccaggctgctgggagcagggggctgcgtgttgactgaaggtgctgcctgtcttgcacgtgcttccaggccagcttccctgtggcactcagtgttcccccaaaatagggcagttgctaagaaacagggatgagccagaggcccgggagcgccgtcaacactgtgttgatgaggatgcttctgcgccaggggctcggctgccaaagctcttgcggccttgccagatccacttacgtcaggctgttgcccaagcccacaccgagtctgcgtttgccagcatgagcgttcctgcttctgggatttgagctgcaggaaaatttagtggttgtgtagacaaactcacaaaaactccaacattcacagcatagcacccaccacccgccgtccacccacgcctcagctgctcctctgcacggcctctcccccacccctgcctgtgctcctccacggctcttctcagttcctaccccaaatttgtaacataaaaaagagatgcttacgtgtgtgcagcattttgttttaagccaggcactgtgctaggtatttttacatctattagcttattttccaatttgtgatgcaccagtgctggtggtcgatattgagcccattgtagaggtggggatgctgagtctccaagaggtgtaagtcacggactcaagatgcagcagcagggcggtggcagagctttcagactaagagtgttgacccccaaggcccatgcctgggcttccaaagctggagggcgacacagctccagagccctgggcccagacttgagtcctgtatgcccagtactgctgatgattaccccaagggcagccagggaggagagacaggcccccggtattttttaattgaaatgacagtggaaaaactgctggcaagattatctgagtcagctgaaaatgtgagtttgagtggccccggaataccccacgcttccagaagacgcttcctatggaaagtactggagcgtggcactcctctgcgtgtgcgcctcccagctctcggcggcctccaggaaggagtccaaactcccttcaccatctcaccccaacccaactgccttccctgcacccccacagccgccccccaccccagcatcttctcaggccccctccttccccctgcccttcttgcctggctcactcctggccacccttcagactcctctctctgcctcctccagctggcgcctcacttggtgatggccgtgtctgttccatggcccctcccagagggacttggtttctcctgctgtcattgcgtctcccttacggggccgcatgctgggttttcttaccatttcctgcatcctgcagagccgagggcgtggcagcaccaatcaagtgtagtaggaatgagtaggaaacaagcatccttctccatggcacagaagggagtctgtcaccttggaaagtcactcaagagaggatccaagaaagcgtcttgccctacctacccctcctttagcaagtgaggatcttcgaggggaggggagtttccaagtcaactggtgacaaagccaggatgagaagacactcccagaccacctgtggctaatgacacacactgcccggccatgccatctgccagcgctggaggtggccgctcaacacaggaaggtcaaggtcagtgttagcagctcccccacccagcaggggaaagggaaagacttgcactggggagcagttttatttatttttatttatttattattaattatttttagatggagtcttgctctgtcacccaggctgatgcagtggtgagattttagttcactgcaacctctacctcctgggttcgagcgattctcctgccttagcctcctgagtagctgggactataggtgtgccaccatacccggctaatttttgtatttttagtagagatggggtttcaccatgttggccaggctggtctcgaacttctgacctcagttgaaccacctgccttggcctcccaaactgctgggattacaggtgtaagccaccaccccgcctgagcagctttatgttctatgttattaacacttaaaaggcctttgaataaaagtacccttgagtgtttaaggagagccaggagggagacaggactccaggtccagccagcagcagcgcccagccaagaaggcagggagaaaaatgctgcgaacgtccagtcgaatcctcccgggttggggtgtcctgccaggccagcaagccagcacttctcactagcaccctcagggtgccacgtgtactcaggcagcagggatgaagagcgcctcaacttcaggctggccaaatttggtgagatagttcacgctgcagtttaccggtgccagaaagcaaagaaacctcaacccaaaccacaagaaaacctctcccgggagccgacagagttggcctgttcagagacagagttccagcctttgttggcagcacgtcattcttagaagtctggaatgggtgtgagtgggtgtgtacgtgtgtgtgtgtgcacactccaaagttcggctttgcacaagggacagcctaggctccaccttacccggtgcctgtaccatcgcagtgggaagggctagttgcaccccagtggcggccccaggctgtgcctcctctgcctcgctgaacagagacaattttaagaaaggggtgtattagtttcccagggctgctgtaacaaatgaccccaaacttggtggctcaaaacaatagaaatgtattctctgaaggttttggaagacagaagtgtgtaatccaggtatctgcagggccccgctccctctgaaggccctagggaaaaatccccccttcctcttctggcttcttgtgggctccagccacccttggtgttccttgacttggagctgcctcactccagtctctgcctccacgtcccatgaccaccttccctgtgtgtgtctttctgtgtcttcatgaggacagaagccattgatttcagtgcctacctcaaatccaggatgattctgtgtcgacatctttaaccaattacatctgtaagaaccctgcttccaaatcagatcacattctaaggtccttggtggacatgaatttggcagggacattaaactcactgcagcggtgggtgggggaagattgccttggtgagaagcagctcaggtttatgggtcagaggagccctttcataagatgctcttaaatagctgggtgtggcggctcacgcttgtcatcccactactttgggaggccgaggtgagaggatcgtttgagcccgtgagtccaggatcataagatgctctttagtgggggtgggtgtgaggtgagcctgccccccagacatttgtagcagagtctcttatggccagctgactgctcactgtcccctctgcttcaatggcagagacagagcagaggcaggggatgtcacactgcatccaagccactgaggggcacttcaaggacagaagctggcttcactccttctccattcctcagagcctggcatggggccacccataggagagtgtgtattcagtgttcactgaaagccaggtgtggtggcttgaacctatagtcccagctacttgggaggctgaggcaagaggaccgcttgagcccaggagctccaggctgccgtgtgtaacagtcgtgcctgtgaatagccactgcattccagcctgggcaatgccagcaagaccccatctctaaaaaacaaaaacaatgtttgctgaaagaatgtttgcttgtcggagagatacagtaactacttgttctaactttggagaaaggacacttcgggtttcatgtcaggaaggagtgagtcagactgtggtctggaagggaacccaaaagcaggagttgaagaaaatgtgttggccaggaagccgcggcctggagatactcctctgctacttgtgggtgttgtgaactcagctgggagcctcgggtctcacatctgtgaagtgggtatcaaagcgttgtgaggctaacatgagattttgtgtgagccttctgtaaactgtaaagtaaggtgcccacccaagaaattttcctggaaggcagaataaaatgaaaagtgtgatataatgagcagtgtgtacgattagattattgcatgctaagcaagattcactgggtgagggtcatgttgtaaggacctgtgtgagtgaggcactgactgcgttgagtctttagaaaaaattagcctatggggtatttttattcccattttaggggtgagcaaactgagccccgtgtagatgttcagtaactttcccaaggtcatagtaagcagagaggctggaattcaaacccagatctgttcaccccagcactgggtccacatgacttctggcccgtcaaggctcctggcctgtgcccttgtgtgagctgctgctgggcacgggcctggagacagccgggggagcttggcagtgggtgccatcaccgggctgtatatggtggacacgagcttcctgttgttttcctgtcaccctcgtcccttggatggcatgccacttatagtttggctgctcatgtccagtctgctgcactgggagtgctgggtcccccgtgcctcatgttagggtgtccctccaaagcaggcaccttctctaccctgtggattggcagaggcagttctatttctaggtaatgaatggaccttacggaagattggtctcttccgcccgaagagctagaaataactgttctcaagcaaggcccatgctttctcagcacagagctggttttcccaggcactctgcagttaaccccactattactctggaatgcagagaccccttggccctgtcggatttactttagtagcagcctctgcttccaaatgcagctgctttctggaagagggtgtggtagtggaacagaaatggcttaggtcttggcactagatacaattgggttcaaacttcggctccaccagttacaagctgtgtgaccttgggctagtcagctttttagttcctatttctttcccttaaaaagtcttaatttgacaagtaatacatatcaaatatacattctttaatgtgaaaatacacataagcaaaaagaaatatgaaaaatcactgttaaattttagtatacctcttttaagattaatttttctacctccttttatttacacatatatgcatatatacagtagaaaacatataaatatatatgcaatagaacatttttaaaataatggaattattcatactgttttttttccccacctaatgtatatttaaaggtatggggaagtgttagcaatgtcgtgtcccctgaagtagctacgtggtattccattgtatggctctcccaatatttaacctacccccaggtggtggacagttggatataacctcactgtccagggggaccttggcttctccatctctgcaatgggataacagtgcccatcctgcaaggcagctgtgtgtgctcagcatgcagctggccctcataaatgctggcttctttccttgtcctttctctgtactggttcctttcacgtagggtatctaccacgataaaatgagtgtgccccaaataaatgcattgtctcgtgtgtctgctcagcacctgaacaggttcctgcctcgggtcttgctgacaagtgcgcagggccagcagcttcccgttggcctctcccaggaaccctgagcagaggcctgagcccaagcagacgctgcaaggctgctcttctccctcccagtctgggcagcatggtttctgctctgagaagccgccgggagcagttgagatgagctgggtgcctggttagtgtctgcaccacctttcggggcctgacatgtggcgtctcgcctgtaggctgcggccagcatctaagcggagcacttggatctagcagttattcacatctgcggctccgtgtgtccccctcctagaacctccccacaacccccaaattaattggattgtgtaaggttttcgtcacagtggatgtcaagtgctggccgtgttaggcacaatataatataagccttgtatctatttcttgtctgaacctaactaaataaaaacatcatgtttccctgctcagttgagatatgtaaaccagatgtaattctgcctgctgtgcaactgatcatgttacccagaactttggacaaagctagcagaatatgcgcagccttctgtgagggttaattttgtctattaaattgtcattagggctgacacagggtgatatttatgttttgttctgtttttgcttaaatgggagtgtaaaaatgatgataatactaatagctagtatatgttatggggcttgtcatgcgtggatgcatcgggcgttctgatagaagctgtatatggatgtctcattcagtcccatgaggcagatggatcagtccccattttatacatgagaagctgaggcattgaactcaggcagtgactctggagcctctccttttaatccctgcagcagtctttgtgatagggtcaagtgggtatttattggaaaggtcccctgctctgtcccccttacccagtgcaggggttaagaagggcctgtttgttaggaaaagtcttcagcacaaccgatcctgcttgcttactgagctgctgacattctcagttttgagaacgaggtaggagagttgcagaatcagagggcaggagcgctgtgtttccagggtgccctgaaatggcagaggatccaggggccagaccagaatgacgaggaactcgccacaggcctggctcctcgcggggaggaaaacggaagatcagataacaagactaagcacgtgaactccagatgcataaccttggatcaaaattggggtgccagaccagagtgggtggacagacacatgcagcaaatatttgccacgtaaatggatgggtgaaattatggctcattaagctctcacgggaggtgtgaggttgtatgtagcatgtggagtttgcatatggcctctaatatctgcctgggagttttcagtttaaaaatgccagcaaagaagaacaagcaggtatatgtatgggatacacccacagggagctttaaccagcctaagaatgagccgtggaaaattgtgtctttcatgcctgtggctttatgcctgggtcagttctccttatagttggtaattcattcaacaaacatttaattaactcatttaaatataatcctaataacatcatcaagaaggtaaatctaattccatatgcatcttttcattacctagcactgcatatgctttttttaaattacaaaacttatcgaaatatttctcatctatctactatttgagattatttacacagactccttcctcttcaaagggcacagtggagcgtttgtgtgtgtgtgtgtgtgtgtgtgtgtgtgtgtgtacatatgtaaacacactgtggacagccataccttttcttataggtaggtatgcctgtaacctgtcagggtaacagacagcactgaaatggaaatggaaatatgacctgctctcttggcattttctatgcagttaaagtgaaataattgagggatcctgtcacgagatcctgtcatgggctgctgtcatgggatgccttggtccccagaggtggctggtgagttgggaagggttcttctgcacaggtctgcccggaatcctgtcccaaagggacgacttgccctttaggctactactgcattctcaaaatggcaacttggacggggtgagggattaattttggtatctggtcctcctcttttgcctggaactgccactgggctctgtttgaaggggatgttgctttttcctctcactaaaattggtcccatccttgctgcccgtaacctcacatggaatgcctgccgggcaaagaggcagcccttttgcaaatacgtatttaatgggaaattacaaagagactggtcccacccatgtaagagggaagcggatgtgtgtaacactctaaaaccacgctggagatgcactcagctccacccgacacagaccagcatcgctcaggttaccaggcaactgtgagcaacaaatacttgtgagtctgggattgaagggggtggaaacccgactttttctaaatatcctcatcacttaccataataagagcccttacccaagtgtgcttgtgtcccgggctgcctaagttggcctgaatcttgtgtcacccttcatagtagccaagacctcaggagtcagattgcctgggtaccatctgttctctccaggtacaagcttccaacagtgtataatttatactttccgagcctcagcttgcttatctccaaaatggggataataatcattccattctctaagaggattgagtgagttgatggttgacaggttcttagaagatagcctgacaaataatacgtgctcagcacatactagcttgtattattcctgacactgagtcttctcagcaaactcttggaaggaaacttccctctggaagccacagagagatcttcaaacatacatggcgctgcttctgggggcagccctggaagataaggaagaaggggctgtcagtgcagctgcagggacacacgtcctctgagcccaggttgttcctaatcctccagccgtgggcaccgctgtggggggctttccttaccagctcccctcgtctagcagatgtccccggtgctgagtcactgggctgcactgctctgacccacttactgtacccgaccctgccctcttccctcccagttccactctttagccttcgaccctggcaggtttccaggtagccagatcgaatccgtctttcccattggtctctagagaagcatgacctgcctcggttctttccaatggctgtcacttcctccttttggccagctagtaaattgtctccatccccgtcactgcgtaacctttccccagaaaactcttggtgtcctctctgctcccccagcagaggcagcagctactgaagggcccttcccagtgtctccctttttacattctgagtagggttatgacagttgcttctagctatagaaagttcccactgtcttccacttaaacacgtaaaatacttaagattcttatatgttcttttctttaaaaaccagcttcattaagataaaattcacataccatacaattcacccatttaccatatacagttcagtggctctgagtatagagttctgcacccatcaccgtgacccactttagaacattttcattacctccttccttccacccctctcagccctaggtaaccatgctctactttctggttttttgtatagatatcatgattctggacatttcatataaatggaatcatatgtgacctttatcatgtaatatctggctgctttcactttgcagtgaatcatagaatattatattctattctatggctcatgcctataatcccagcactttgggaggctgaggcgggcagatcacctgaggtcaggagttcaagaccagcctggccaacatggtgaaaccccgtctctataaaaattaggcagggcgtggtggctcacgcctgtaatcccagcactttgggaggccgaggcaaggcagatcacgaggtcaggagatcgagaccatcctgacttacacggtgaaaccccatctctgctaaaaaaaattagccaggcatggtggcgggcgcctgtagtcccagctactcagaggctgaggcaggagaatggcgtgaatcagggaggcggagcttgcagtgagccgagatcacaccactgcactctagcctgggcaacagagcgagactccatctcaaaaaaaaaaaaaattagctgggcatgatggtgggtgcctgtaattccagctgcttgggaggctggggcagaagaatcgcttgaacctaggaggcagaggttgcagtgagccgagatcacgccactacattccagcctggacgacagagcaagactccatctcaaaaaaaaaaaaaaaaaaaatctatgattctgtttaatgaaattgaggcccattatgttatgtttgttccttactattccaaacaatattccttattgttcttactatagtctagtaattcattattcctcaaataatgaattctaggccttggtgcagagcttcattctttactacagctggataatattccattgtaaggacaccccacatttcatttatccttttgctggttggtggacaggtgggttgttcctcatgttctttttaacacagcaaggccatatgatctgtctgaggctgcctttcagttcccaaccattttttgagcaggagagacattttctgtcatttttatcacagcccttggttatttcttgatgtgttcatgaatgtaatcccaacttagacatgatgttccaaacctataagaaaattagaattttttttttttttttttgggaaagaagaaacagttatttaagacttgttagaataaatgattcagatcctttttcttctgtgtttttattttggctctaaataaaacatttatagaagtttgtcttttgtgtaattatttaggctctaaaaacttcactcagtttagatgagtgttcaaactcgctgagggaaaaaaataaagtttttccccagggagaaaaatattatgagctaaaactaaaaataacttaaaattttagcgaaggaagcattaacacaccaggccagcacactttctttttaatgggaactgaccctgggtcaggtgggtccaatgacacccttatttaatttatttcctgctgggagctgattttcctgggcatgttctgacccagggcactcggcagagacgctgctaacaaagtccaggtggaaaacatctgagtttcccaaatttctctaaaggtttttaagggctgttcagcttcgagtagcagcgtgagtgtgaggtcgctggcgtaaatgagaccccgcgggttaagttgcaggtgggagctccaggatgcagcaaggtggccgcggccactggaactgttgtttggccttgactctaatctaaggtgccctgggcgtcggcctgtatgctggtgctcagtgaggtttctccatgactctgtatgagatctcctgtgctgaatgggacccttaaatgtgcccttcgctgccatcatttaaggagggaaaaggcaaatcagaatgtcataatgtaaaggatggcaggcaaacacatgtttttagaaccacactatgatttcaaaaggcacatcaacattcagttgaatttcatgtctattgggggatctttgatttctctccccctaaatttgtgtggggatgtgaaaaagcttacgctttagaatctgtcgatcttggtggttcttgggcaaatgactctccatccctgggatcttgtttgtgtcagaaggatgacatcctccacctccatcagggctaatgtggggatctaatgaggtgccttatgtacaacccctggtacagaagagaggcactcaatcagagctgcttctaaagctcttctacttgaaatgatctttttttaatcctcactcataccctggttttaggtggaatagtttctaaggaaacagagtccttttcccataggatggtgctgggtttttgtgcttgagagagaccatctttgtctctctgagccccttggacgccaagatgcatccacagggcaaggcacacgcaagcatttggtaggtaaatatagaacccagtgggttcggcagggaattaaagtatccatttaataaacctcaagaacagcatagcctttaatataaagtcccttctcccaaagggttgcaaaaacttttgcaatgattattgcttttcatttatagcctaatgtttgaggactggagccataaactgaagagccagaagtagacgctagcaactaaaaatactgtcaatgaatgtcacagatatccaaagtagacaattcgttttccttccagtggctttcttggcaaaaaaaataaaaattaaaaaggaaaaaaatgactgagttaagaaaacgttgtagtgtttgatgatgataacttgcattttataatgctttccagcttacagaatgctttcccattattatttcattgaattcttctgactcgcagaggtaggtaagacaatactgtgttatggttcaggacatgctgcctctaccacttcacttcctagcaggtggtcatgtgagttagggaagtgctctaagcttattttccaaatttttaaaataggagtcacaacaccttccttttaggattgctgttcagattgtatgagataagatatgaataatcccatccacatagtaaaggcttcataaatggcagctgttactatgttattacatagaataatcctcactcggccaaggttgggggattgcttgagtccaggagtttgagaccagcctgagcaaccaagtgagatgctgtctccacaaaaaataaaaatgtaaaaattagcagggtgtggtggcatgtacctgtagtcccagccactcaggaggtggaggcaggaggattgcttgagtccaggaggttgaggctgcagtgagccatgttcgtgccactgcactccagcctgtgcgacagagtgagaccctgtctaagaaatcatcatcatcatcatcatcttccttactttacagacgaggaaactcaaagtggcacttaatttgccaaagatcacaaagatctagtaatggcagaactggaatgcacatctaattctacttccaacttcattcctccttccacttttccttagccaagaatgtaaatcaggaacattttggtgcttctgccagcgacatttaccattatcatgagctcttacatggtttctcgggtgcactcagattttcaacgtctacttttgtatttgcagaacatcatcaagaaggtgatcgggcagaagtttgtgtacaagtttgtctctttcccggagatcctgaagatggatcctcacgcggtggagatcagccgggagagccttctgctgcaggacagcgactgcaaggcgtctccggagggccgcgaggcccacaaacacggcctggccgccctcagaagcacgagccgcaacgaatacatccactcaggcctgtactcgtccttcaccattaattccctgcagaacccaccagacgccttcaaggccatcaagacggagaagctggaggagccgcccgaagacagcccccccgtggaagaagtcaggactgtgatcaggtttgtgaccaataaaaccgacaagcacgtcaccaggccggtggtgtccctgccttccacgtcagaggctgcggcggcgtccgccttcctggcctcgtccgtctcggccaagatctcctctttaatgttgccaaacgctgccagtatttcatccgcctcacccttctcatctcggtccccgtccctgtcccccaactcacccctcccttctgaacacagaagcctcttcctggaggccgcctgccatgactccgattccctggagcccttgaacctgtcatcgggctccaagaccaagtctccatctcttcccccaaaggccaaaaaacccaaaggcttggaaatctcagcgcccccgctggtgctctccggcaccgacatcggctccatcgccctcaacagcccagccctcccctcgggatccctcaccccagccttcttcaccgcacaggtaagagtcattcctgtcatctaagccacagccagcttcagtggcttagcaaaaaaggaagagcaactaaagagacttccttctgtccctcaaaacgttgtcctatgactcgtaccgaggtcactgtgtaaatgtgaagggaagctgcttttccatcctcagaccaaggggtgcacatgagacagggtttggtttgtcgactctagtgggatgcttgattggtttcttgcttttagcggcctaaagtgaccataggtggaacacgcacactggccgacaaagcagatctcaccagcgatttccaagggaaagttgagcgggccagtttacatttcaggaggcgcttgggctttatgaaatttttatggcagaatcttctctgggggcgcttaataaggagccacttgtgttctgttaacaagaaaatagatgtcaactgatgccgccatcgcatgtcagtgtggagctgtggtcatagcgtaggtaataagaaacaaaggggccaccccaaacagctgcttcgctgaaagcagcactactctgagaaagccccagtccacagcactggcgagaggacagcaaacttgcagagccaaaaaagccttcgttgttattagtcccaaagagaaagcagccttttcctttaaatcagatattcagatgctctttcttgtccagctgacaattgcagtgcaaaggcgtagtaggtgctgggaaaccatatttctccttccccttgaaaattggatgcaattttagtggcagaggttaaaagagtattcgttttaggttcacagacctgcattcagttcctggctaccctgcttcctaggagtgggactgtgggcggttgctctctgggccaggttccatgtgtggaaaatgggaccatggacaggctttgtgagctggggacacctggtagcattgttaaccgtggagctgcacccgtcccctgcctctgtaatctcatcgtagttgtccctgttgtcattagcagcagccgcggcagcatatgacgggctccccacgtgtgccaggcactgctccagatgctttacatgcattgcctgtatccacacttacagcagccctgtcacgtggatacaggttgagcatcctgtttccaaaatgcttgtgaccagaagcatttcagagttcagatgttttcagattttggaatatttgcatgatacttgccagttgaatatcccacatctgaaaatctgaaatccaaaatgttgcaatgagcatttccttggagtgtcatgtcaggactcagaaagtttcagattctggaggatttgggatttgggaatttttggatttgggatgctgagcctgtgctattattatcatcctgtttcccagctgagataaatgaggcacagaggtaaagtagttcgtccagggtcccacagccaataggtggtagaggtggctttggatccagtgtctgcctccagaatccatgctctcaaatgaaatgcattcccgctgcgagaaggcagtgtccctgatcacgatggccgtccatggagcacctgaaagcagctctgggccactgtcctctccacgctttctctggactggattctgcccaggatttcatgacagctcaagcctgtgagctggtggtgacgcgcgccactgcggagggggagggccaggggatcaggatataggtcagagtgagcacgtgtgctcttaaatcaggcatcttccagttaagcaaggctgtccagtgaccaagggctgctgagcaaatggctcagaaacagcagctcctgatgtagctcaggggagtatcttgagaggcagggccagggtagatgatctgagcatctcctcccctggcctcctgtgtgtttacaactgtcagggtgagaaaggtccgaagccaggccagggctgactctgatttaggtgtctgtgttccctgggagcctggatcaccttctcagaacagagtgaggcagatgccagccctgtctcagaggaagtcagctcagccagccctgtggataatgtggatggagtggtggctcccatcggtggggctgagggcgtgagagaaggatcaagggtggatgcccaacaaatggatgcagagggcacgaccaggagccagaagccaccagcatggcctgaaactaggtgggaaggcgtaggaaagccaggatctttacaagaggacctgtgccttaggcagtgagggtgcctggtcctcagccaagctgtgagggtggggctgtgatgatttagtgccaggaagcccagaaatggtcctgaggggagggaggcaacaggcagcatctggacccagggcaggagagtggaagtaaagggacctggctcagagagggccttcgggtcaaaggaggaggaggggcaccaggcagtcctctaaaccacgcaaaactaagggggtcaccagctacactgggagatggtagagcctcgggactcagaccccactttgaacttccctcacattcccagagtgtgggctctgctcctggcatggccatgggtggccaacagggagggagagaaggggcaatgagggagacaccagaggggcccgggtggtagtcaggggtgtggtacttattcagagttgagttcttgcagccggtttcacccaggcggattccctgagatcagataggatatcttgaagccaggggtggtttaggattagggtatgtcagtgtcagatttggactctcagattccctcccctgggagctgcttcagggggtgccccagaaactcacccaccagcaccagctcagtagtttgtcttccaggtgacagccagaaacagcgtggctctcaacagccaggcattctgtggaattcctttcggcctcaggagtgaaggacaactgtggggttcagggtgttccacaggcagcagtgaggcttcagtggttttcctcttacctgagcactttgtcacagaaactctccttttctctgtgtgtggggggtgtgctgtgtgcagtgtgatgctgtgtgcacataaacatttgataatctgtgggctgtcagctttgcttagtggtgggctttggaagaggtgaaagctgtgtgtgctgtaataacccgataccctgaaggtacaaattccgaaggttggttatttccagctagaatcatggcaggaagaaggggagaagtaagggagccttggcatggcctgtgtcacgtggttaccttatcacacctcatacaggcatccctcattttactgtactttgctttattgcgtttcacaattaattggtggtttttacaaatcgaaggtttgtggcaacctggcgctgagcaagtcttgtcagcgccagtctgttcttccaacagcacacactcactccgtgtttcaatgtcacattttggtaattctcaaacatttccaactttttccttactattatgtctgttatagtgctctgagatcagcgagctttgatactactattgtcattgttttggggcaccatgaaccacacctgtataagacagcaaacttgatcagtgttgtgtgtgtcccaactgctctcctgtgtcaaacttgatcagtgttgtgtgtgtcccaactgctctcctgtgtctccctctccttgggtctccctattccctgaaacacaacaattttgaaattaggccaattgataaccctatagtggcctataaagtgttcaagagaaaggaagagctgcgcatctctcattttaaatccaaagctagaatgatgacggtgaaggcatgtccaaaaccgagacaggcctaaagctagggggctcttataccagttaagtatgtaaatgtaaaggaagagttcctgaaggaaatgaaagtgctacgtcagtgaaaacatgaatgataagaaagtgggacatcctgattgttgatatggagaaagttttagtggtctggatagaagatcaaaccagccacaacattcctttcaggctaacccagagcaaggccctaactcttcaattctttgaatgctgagagaggcgaagaagctgcagaagaaaagtgtgaagctagcagaggttggttcatgaggtttaaagaaaaaagccatctccataacataaaagtgcaaggtgaagcagcgagtgctaatggagaagctgcagtaagctgtccagaagatctagctacgctcattgatgaaggtggctacgtcaaacagcttcactgtaggtgaaacggccttctactggaagaagatgccatctaggactttcatagctggagaagagaagtccatgcctggcttcagagcttcaaaggacaggctgagtcttgttagtacagcttgtgactttaagttgaagccagtgctactaaatacactctgcctgtgctctgtaaatggaacaacaaagtctggacgacagcacatctgttttcacagtttatggaatagtttaagcccaggtgagacctactactcagaaaaaagattcctttcaaaatattactgctcattacagtgcatctggttacccaagagctctcatggagatatacaagaagattaatatttttcatgcctgcaaatacaacatccattctacaacccagaagtcaaggagtaattttgactttcaagtcttattacttaataaatacatttcataaagctacagctgccatagatagtgattcctctgatggatctgggcaaagtcaattgaaaaccttctggaaaggagtcaccatcctagatgctattaagaatattcatgattcatgggaggaggtcaaaatatcaacattaacaggagtttggaagaaactgattccagccctcatggatcactttgaagggttcaagacttcattggaggagggaactgcagatgtggtagaaatagcaagagaactagcattagaagtggagcctggagatgcaaccaaattgctgcaatttattgatcaaacttgattgggtgagtagttgcttctcacagatgagcagagaaagtggtttcttgagatagaatctactcctgttgaagacgctgtgaatattgttgaaatgacaacaaaggactgagaatattacataactttacattacattacttagttgataaagcagcggcagggtttgagaggattgactccaattttgaaagaagttctactctgggtaaaatgctatcaaacagcatcacatgccatagagaaatctttcatgaaaggaataatcaattgggccaggtgcgctggctcacgcctgtaatcgcagcactttgggaggccaaggcgggtggatcacctgaggtcaggagttcaagaccagcctggccaacatggcaaaaccccgtctctactaaaagtacaaaaattagccaggtttggtggcagatgcctgtaatcccactacttgggagcctgaggcaggagaatcacttgaacctgggaggtggaggttgtgatgagccgagatcacgccaccgcactccagcctggacaacaagagcgaaactcgcatctcaccaaaaaaataaataaataaataaaagagtcaatcaatgtggcaaacttcattattgtcttattttaagaaactgccacagccaccccagtcttcatgactctgcctccttgtccctggttctgccctgcttcctcccctgtccctttctgtagctaccctaggcccccatgggagtctccattttgtctccttttccgtaggatcagtgctacagacttctgtgggattaactcaccttttaaagaccttaaaaccatggtttcacttgaattcagacaactttaggagcttccagagattcagtcaccttttatttgaggacatttttttaacctcaaggtggcattgtcatggattctgttggcatctgtgggagcttaggattacagatatttgtgggtacaacctgctagacatcttgtttctctctcctttactttcttagagactgagtgacttaccggtatctcagatcaccaaatcaagtgatcagcaaatacttctgcatcttctttaatcagtccagtaacaaatgtttatcatgtattcattcatttgggagataatcactgaaaactaagcattcgcttagatacctggagatacagaggttagcaagatagaaaccgttcctgttctcatgagtttacaggttgctgtccagcatacggggcaatatataacatagggttataatttagggtggtgtgaaattatggaggaccctgagaactggctaaggaattttgacttgtttggattggaaattaactgctagaggctgggcgcagtggctcacgcctgtaatcccaatatttagggaggccaagggggcggatagcttgaggtcaggagttcaagaccaacctggccaacatggccaaaccccatctctactaaagataagaaaattagctgggtgtggtggtgcatgcctgtaatctcagctactcgggaggctgaggcaggagaatcgcttgaacccgggaggcagaggttacagtgagccaagattgtgccactgcaccccagcctgggtgacagagtgagattctatctcaaagataaataagtaaataaacagctgctagaggtataagtgaaaaaaatctcattagaatcaacaaataattattgagcaataacagagcctagaaaggacaccaaaactacagttgcttgtttttatgaccttaggacctagccatgacaacaaggcattacaagtgcacacacacacacaatagcccttggcaagagtcaaacatgcagcacagagaagcgctttaggagctgaggggcaagatcgtttagttcaggtcaacacacatgaactgagtgcccatcatgtgaaagctgctgtgtttggagctggggctacaaacgtggataaaatagtctctgatagttaggagctcataacttaagtcccttcatctagtatctcaggtgcaatacaaaaggaatactaagttgcaaaaggaatcctaaggaggaaggtattaactttgcctgagatggaggaagaatgtccagagggcttcctggagggggtgagaccactggtacagggtgttgaaggatcagcctgtggcagggtagacagggagaggaaggcatcgtcggcagaggaacagcttgaggcaaggcatagatacgtgaaatagctttgtgattaggggaggtatagcaataggaagcattgaaggggtatgagtgacagtctgaattgttttaggaatcaccctgctggcgagattgggaagggggaaggctggatccaagtaggatgctattggaatattccaggcgaaagaccatgagtatctaaggctgtatggtgggaggggtcagagggatggatctgatgttgggagtgccgtcagcaggagttggtgactgactgggtgggaggagtggggagagccagaattgagtgtgaggaacatgggaggaagactaagctccctgggaaaaggctaaacgtccagtcggggccatgctgagtttgaggaccctgcaggaaattcgggtggaaaagtccagctgcatctggagagcggagagtgttttggagccggagaggaagttaggcagtcatcaacacgcaaggggtggtgaaaccatgggaacggatgaggtcacttgtggagagggcctgtagcccagggaactatgggctgggctgggtggtcagggaagttctgagggagcgttgaaggactgttgggttagaatgcctgttcctccgtgcatatgaggaaagctcaggacacatcaaagcaagtaagagggtttggggagggaagtgtctacgaagagtcaaactctgtaaaatatttgaagagatttattctgagccaaatatgagtgaccatggcctgtgacacagtccacaggaggtcctgagaacatgtgccccaggtggtcggggtacagtttggttttatatattttagggaggcatgagacgtcatgaaattgccaggcaacttcaaggtatggcaaggaaatatattttggggttaaatattttttcctcgttccataatgttactccagagtcagattgaaaagtaagtcaccatatatagggtcaaataaaacccatctgatgagaatttacggtttgtagggcatgactccctagacccctaggtaggaatttgggcaagataaaaaatgagagcttagtcctcagaagttagcaagtgtgtgaacccagattatggggaacctcaaatctggggctaaggaggacatcacatcctttctgaaatggtgactgaatgttgagtgaactcagtgtttgagggtggttgatttggcgatggggtacagaatagatggggagaccggaggcaggtggactggcctgggcagctgttgtggaatgccatctgtaaggtgataggggcttggatgcagcaggaatggaaatgagggataaacaggagactgagttgtgggactcctccagaggctatgtccggagcttgcagttatcggaaggcattttgcatggtggggcctgggatgcgggtggtaaatggggctgtgcatgcagggtttatgtcttgttttatcctcatctgtggcacctgaaacatagtttgcactctcggtcagtatttattgaggcagtgcctacacggtggtcctgttgacagaaggggaagagtcttaagaaacactgatgtggaaaggtgctgagcttcatgaagttggagcatggtggggcatccaagtggagatgcccaacaagcgataagccaggggggacccagctagagctgcagatggcttcagttcattggtatttaggagatgaaagtacaggaggaataaagatgagcagataccttaaaggctacagaaagaataagaaaaatgtgccaatcaccataataggaggcagaacatgttaaatgttaagaaaaaaatggtcacaaagtgttacaaagattcagaaataagaaatcccatctggttgaggggagatcaggaaagtgtccttggaggaggtggcattttgatgggcagaggaaggcaagaggaggaggcagcgggccggggcaggggtgcacaggtgggcatgcctggatgccagctcaccctggcgagctcagatgtgcaggctttttaggagactctatgaagtggaagtggaagatgaactgagtggggaaaatgaaaaggggatcttgggatgagggtcttactctttgcaaatgcattgcctgtggcatctcctttcccagcagccgtgggatcaggagctccttatctgccatgcttgttaaaacgagactgtctttggggaaggaaagaaaacagcactttttgctgtggcttctttagcccttggccctcaggctcagcccactctgcctgactccaggagcgtgtggagagaggctgtgaagtctcacactgtcccggagataacccagagcaggtgttataggaactttccttaaaaaagcaaccacatggttctttaaggccacaggattttcagggagaacttcagggatagaagggagaggagggaatgaaatcattttacagtgtttatttgcatatattatagaagacatttcagacatattaaagatgagaaacaagaaggctacagtagtctgagtacatcctgtattcctaagaaacaaatgtgcaaacatctcaaatccagacatgggtatacgttttagactagagaaatagaaattctagaccttgtacattgcttagaggattaaaaaggaatgggcatatgatggccatggaggagagaaggatagctgtgttttgtggtttagaagattgtctctttaaagctttgagagccttcattgatggataaactaggaggccttgaacacactggttattaaatgttaatgtgacatattgaggttggaaccttgctccagagtaacatgcaaatattagttttcagaacacctgagcttgtggccttgagcctaacacaactgacagtagcctccaagtccaggctgactcagttgagttggtctgtttcagaggattaagtccttctctgtatacagttgagaatttctccctcacatagatgaagtacgtttagtaagtatgtcatgtatactttcaattaattaccaatccatttattcattcaaaaacatgtatgaagtacctagccagataactgcctctggcacttgttgagcatttctatatgccaggcacatatcttataagagcttgcagtagatcagcttatttaatcttcccaacaaccctgtaacgtgggcatttttattctccccattttacagatgaggcaactgagacagagagaggttaggtggcttgcctgaggttacctggctgggaagtagtggttctgagattggaaccctggcagagctcatgctgagccgtgaagttttaactgttaggccagatggcctggcatgcttgtgaaattgccttggactagaacaaatgggaagcttattcaaaacatgtatttattctagtaacctcataggtcattcagtatgtaggaaatgccatggaaccaacgactcaaataatttggtataaatgtgtttacatttcagcagcttcacagtttgaggaactttggatgtttgtctccattctgctgaacagagcagacctttcaatttaggtttaagccaaatgctgttggtaattaatgatgctacggaggccaattctaggaaaaaataacactttagcatccagcatggtgcagtctgaaaggctggcgcctttgctgtggttcttcttacacaaagcaccttattgacatcacaaaaccactgagggactccttctagtcaccaaaggtacaaaaccaccctgggccggggagtttgtctccactgagaataaaagccatgcagacttagcagctgggcgggtgtttcttctgccctcctgctggcttgcaggccaggactcctgctgtgtgtgtgcaagaaattcagtccttggaactcccctgggaaacccagggttttggctttatacccaatctgacaagaaagggccctccctgcccccacccaaaccattgccagggcaatgaattctcatcaactccacatccggaaggaatctggaaaacccggctcagagcttctgaagaggctgctacagggtattttaacagcaaatcccaaagccttaacagctgttgatatggagaccatttaaaaacgtgtgttcgtaacccaagtaatagatgtccactgtagaaacacaggaaaatatagataagaagaattaaagcccctttatgggatcctattttgtttgtatactaatccttgtttaatctgggaaggggaacaagttaacaaaccattcggacgaaagttgatacaaacttgaattttccaccagaatgtttagggaaggtaatgtgtcaatacctttttcctttatgaaaaaagtgttaataaaattagcattgaagaaaactagccagccaggtatggtggctcacgcctgtaatcccagcactttgggaggctgaggtgggcagatcacttgaggtcaggagttcgagaccagcctggccaacgtaatgaaaccccttctctactaaaaatacaaaaattagtcggtggtgggtgcctgtaatcccagctgcttgggaggctgaggcaggagaatcgcttaaacccaggaagtggaggttatagtgaaccaagatcgcgccattgcactccagcctgggtgacagagcgagactgtctccaaaagaaaagaaaattaaaattaaactgttcacagcccctcagaattaacgttgccagttttcctgagatggtaaggtcgtttcctggcccatgcctagcctacctaacctctctctgctgctctgttgatcatggcccaagtcaggtgaacctatatgaagaagtctgtttgctttatttcccagacaccaaatggattgcttctgactccgagtccactgctctccagcatacatttctggagcagccttagtccagttgctccgctgagtcctgccaggctgcaagggccaagcacgctgttccaggtgagcgtttggaaatgaacttttgaacattaagcttctgagggatggttttttctctaaatcctgcagaggtaacggtgagttttgccatatgttgagttgaaatattaaatgtccagagggggttcatgttagtggggttgcacgcccttcagaggcagacattttcattgaggcagaaattgcagactcatgccagacacccatacgtggaacaattagttcttaaagtgttttgcatattttcatttgtctatgaaaacaggaaatttattaaggaaaaggcaaaactttaaaaattattctttaggccagtgtgatggctcacacctgtaatcccagcactttgggaggttgagggtgggaggattgtttgagcccaggagtttgagaccagcctgggcaacacagcaagaccccatctatatttaaaataaaatgaaaataaatattattatttataaaagtccacaaaagactttaaaatattaatcctcctagttaatgtagcaacttgtttgacataaagtgaaaataaaaatagtgaacaatttccccatcctgggatagaaaaattacttgcatcattttatgaatcatcattaagttctccttgttctgtaatgaaaaaggagaatccagggcatttggttaaaaaataatgaagacttagctgctttatcttatagaactctccatactaggcgagcaccttcattattcattcacacaccagaatcttgcaggaccgtcacttgctatcatggagaaatcagtatttcctccttgagacccatagatcattactcactgattaaggtgttactgtttgaatatgttgagtgcaggtggaaagaatcctagggacaggactgaagaaaaggtggacccagtgcaaactccctctttcccaaattctagcttttctcatcgtccctgcctgtatcctgtgccccacagtgtggcttaccccaagttagttgcagctctttggataccatttcatctagcacgtggcactttgtattatgattgcctgttgatctggcaatctttctcactaaactatgggccctcgagaccagaatggaatcctgttcactgtggtgtccccagcatctggcacatggcttggtacacaagtgaggctcagtaataattgactgtctaaatgaattcacaaagagaagtctgagaaaggccagtattaatagcaagtcttcatgatcatctgagctggtcattttgcttgtcaaggttaatgtctgctgagtacctcctctgtgccaggagctgtacatgctgggattcagggtctctttgtaagggtggagctaaagaggttttgattgccatcttgcttctttggtttcctagtggagttagggtagggtgtcatgaagtgaccatatccttggagtaattgggtttctatctctttcacagcccttattcccatcacaacaacttgagctatagtcatgttgatttttaacaatttcagcttgggtaggaaaagagaaactagaaatagcaaaaagcaatgagcaaatgttgtattaggaaagtttaaaattaggaatactaatcttttggtggagagataaaaacacctcatttcctgaaagtcttaagattagagcagcagaattctaaaattaatagaatagaaagaaattgtttggttacagtaaactccatggcagtagggattgttatactactctaatcctagaatctaacacagagcttctgtagagttcagtaggtatttgtgaataataagtggcctctcatttctctccttactgggaattctgccacctgattggtgcaggccttggcaacctcctaggaaagcaatggagcactattggctgggggttctttgggattccttgtcttagataccttttccagcccaacactcccaacaggaaatgatggttcatgtctacagtgattcgacacgttatcaggatctctgggagttgggatacgtgcatccgctcgtttcttcagtcctcagtcactactgtagaccaatggttctcaaagttagcatgcaaaataatctcctagagggtgagttaaaataaagattgcagggccccactcccagagtttctgactcagtaggtctgggatagggcctgataaaaacttttttttttttttttttgagacagagtctcactctgttgcccaggctggagtgcagtggtgtgatctctgctcactgcaatttccacctcctgggtccaagtgattctcttgcttcagcatcccaaatagctaggactacaggcgtgtaccaccacacacagttaatttttgtatttttagtagagatggagttttgccatgttggccaggctggtcccaaactcctgacctcaagtgacctgcctgccttggtctcccaaattgctgcgattacaggtgtaagccaccgtgcctggcccaaaaacatttttgtcatgttcctagtgatactacccagtctaggaaccaatttgagaagcactgcagaccagaggttcctagtttatatttagaattctgcatcagaaattactgcatttaaaggctacctgcttagagttttaatttcaccaagtggacctgttctctttcctgaagccattcagaatacaacccttgaaaaaaaagacaagctggtattccggatggctgacaggttgtatggccttgggctctctttttgtggctggatccaggagactaaggaaaaacaattttttgccttttaaaatattattagtcttcctgtgaaaagagcaactgagtatggcaaaagttgaaaatagcaattttgagaacggtaaacaacaaaatatggtagaggaataactttctgatttttaaaactagatgttacaattgatacatattcagaattcagattactatcagcagtgcctcttatttttttaagaacttttttttttttttaaatttagagacggggtctcattatgttgtccaggctggtcttgaactcctgggttcaagtagtcctccacttcagcctctggagtagctgggactacaggcataccaccacgctggccaacatcccttttaaactgatgaaaataattttctttcaaaataacaacaaacctctttcatgtacgctatagatgtaatgaaggaagaaaaaaatagatttggcttacacattttaaatgatgctggcaagtttcctattaccatgattggaaaggttgatcagaatccttggggtaatagttgaacagctgaagcatttttgtacagaagggcccctaatatgattactatagcaggttatagcagatatgaaagaattccaaggaaggagagagaagacgcctttctggaagaggtatgctttaaaattgagaaatgtttaggtaaggagagaggcaccgaagacattgtgctaaatgtaaacaaagaaccttgatttatataaataaagtgaactcggtttttcttggacagtttattattttcttcttgtctaaggatgtctgttccatgacttttgaaacagattttgttccaatgtggaatatacctagtaggaataggtatgtcttgaaacaaggtagagctaattaagttttcaattaagaatgtgtgctgtaatttttagttcaacaaatctaaccccagcaaatatttgcaatgctctgcgacaaggactgtagggacagagaatatgtgaatagtggatgagtaaacaaactgctgcagaaagtaaggggcagacgcgctttttccagctggccactggacaggctccaaggaagcagtggcgcctcagctgggaggaagggacaggatttcaatcgagtacatttagatgaatagagccgaatgacggggacgtgagagtctgttcaggaagggaccaggtgataggagataaggttggaaacgcagctgtgggccttgaatataggcttaggaatttctctctttatctgttaaatgtttacgctttttaagctggaggtaggaggatgagatctctgttttagagaacaatcactgatattagtgtggaggaagaactgaagagaaagtggaaggaacaggaagataagaggaaatttttatttttattttttgagatgagctcgctgtgctgcccaggctggagtgcggtggcacaatctcggctcactgcaacctctgcctcctgggctcaagcgatcctcccacctcagcctctcaagtagctgggactacaactacaggcatatgccaccaagcctggctaagttttgaaatttttttgtagaaacgaggtctcactatattgctcaggctggttttgaactcctgggctcgagcagtcctcctgctttagcttcctaggaagggctaggattacaggtgtcaacgaccatacctggctagaggaaatgatactacaaatattgaagggagaatcatctttgagattaaaacagtggacacaggatataattagaagacattttagaggtgagctcaagagaggcagactttgagctgggtctgaggggtaaagtaggtattgaaaattaagtagaagcaaagattactaagtgattaacatactggaaatgctactaaataacaatagttaaggccgggcatggtggttcatgcctgtaatcccagcactttgggagggtgacatgggtggatcacttgagcccaagagttcgagaccatcaggggcaacatagcaagaccctgtctctccaaaaaaaatacaaaaattggccacgtgtgctggcgtgtgcctgtggtcccaactactagggaggctgaggtggcagcactgcttgagccctggaggttgaggctgtagtgagccatgagcatgccactgcactcaaacctgggcgacagagtgatcctgtctgaaaaaataaagataaaacataacaatagttaacatttattgatgattgatgacttattgtgtgcaagacgttgttcttagcacttttggtggcttctcatttaatactcccagtaattctattttagagataagaaactaaggcacagggatattggctagtttattcaagataacacactcgtaagtggtggagccctgactcaagttttaagtttgtggtcccagccaccattctcactgacttggagtaagcaatggaagaagggcgagttttgtgggaaagaggcattggttggagatgtctaaaatggaaatggttgtcaagtccaagcatggtactggagaaaaggtggctggggacaaaagtttgggaaacgttgcagtttaaaataggggagtgtcatgggagaagagcctaataaagatgactaaaaaaatgttagaaaagccaggctaatcaagagaaactatgtccattgagtatacagaaataataagggcagaaatcagtaatttattttgcaaaacagatgaataccaaaactgattctcttgaaaacaccaataaggtacaccaaagagagagaagatgcaaataaacaaaaagaatgaaaatgcaggctgggcacagtggctgacatctgcaatcccagcactttgggaggctgaggcaggccagttgcttgagctcaggagttccagaccagcctgggcaacatggtgaaacctcgtatttaccaaacatacaaaaattagctaggcatggtggcatccacctgtagtcccagctacttaggaggctgaagtgggaggatggctgggaggtggaggttgcagtgagccaatattgcatcactatgctccagcctgggtgacagagccagaccctatctctaaataaaataaataaataaatgaaaatttaaaatctgttcatcttcccatgttcactctaactcaatgggaagagtggttagtagcacggaccttttaaaaaagagtataaactatatgtgcatagatttgataatgcagttgaagtgaatacaattctagaaaaagttaaaattctaaagttccagaaaagaaacaaaaaccttgaatatgccaataatcattaaagaaattaaaacagtaattaaagataccccctaactcctaccaaaataaaaagttgtaaaatgttggtacagaaagatttgtttaaaacttggctgtgttgcttattagctgtgtgacctttagccaacagaacttatttgaaatctgttttctcatctgtaaaatggggacaacaaaacttacgttacagctcctaggtatcaaatgaaatgacaagccttgataaactctaaggtactagacacaagttactgaaattgtttgaaaattgcaaaaacatatttacttaaatataagtatttgttgtacttctaacatgtgtcaggctctgtaatttgatatttggcgctgaagtttaactttcctggactaaataggaaataagctagaaaagacagcccaggagatctttttgacacatcatcctcaacaacgaaaatctagttgcaagtagtcacatattaaaaggccttgttcagttgggattgcaactaacatatttgtttcagacctgaaactcattatcagagcatatactgtcatcctactatatttatcatcttagtgaacaacaatacagaaatcttattctttgtcacttatgagtgatctgtgtgatattttaattagaatactttcttagctccaaaataatctattctaaatctttaaatacatttcttactttagaataaatgctgcaagaatcatctttgtagtaccctgaaaaactgatggcaaatttcaaaatatagtattagaaattactgactcacatgtaaagagtctatggttttcaaaacactcttttaatatttaatattaaacattattttaatatttatagcattatcagcatcctgagtagcttagaacttttaaaaaatagagttagaagatgctttagcaacatataaattatatattttttcctagtagcctatgcatatagaataattagggacattttctgggccttatcctttgtttgctctatgtaaatcttgatctcattgtcatcttccaattattctgtaaaatacattggcaactaatctctatcacaggggtgatgagagaaatggactgctatggactgtatgggaatgtaaagaacctaagttcttcccaatggatttgcaataattattgtaaaaatcttttgtcccctacagttccccacactgcttaatggccacatgccagtgccaatccccagtctggacagagctgcttctccagtactgctttcttcaaactctcagaaatcctgatgacgtctggccacaattaaggactcattaactgatgaaacaaatttgtccccacgggctagtttacctgtgtcgtgagaaggacattgtgaaactcttgttaatttggtttgcacttttcataacatggatagtctagatttatgttagcattttaaaaactgtttttgatatattcaagtatatatgaaaatctgtttggcattaagtgaattttaatgtttttgtttttatatccttttagctcttaagtgttgaacactgttgacagtgaagaacttttcttaatggttttcagtataactaataaggatgtgaagcttttttctctttagttctgagtatgctaaactgtgtgcttatatagactataaccagttgtgccttccttcgcatttaatgtaaatgaatgatttatatattttttagtattaagaggaaatgtttgaaagatgaaaattagtatcaaacagctctctagtagaatttcattatttttcaccagtgggcaatatgaaagcatatatcacgttttgttttactttcaattgtataagaattgccttagaacctcttttgaactgaaattcagtaaatgtccaagtaatgtttttataataaactaagccatatttagacaataaacattgataaaatgttctaaagtacattttcaaaagaatggaccttgaaaggctagcctccttagctgtttacagtatcttatcttttagatgcctcccagacaaaaatctgagatggaaaagctacatcaagttcatgctattccaggcccaagaatatctcctaggttagcatattcttatttcaaaaaattagccctggttttctcagttttccatagggaatcccgaccatctgatatatttactgtgtcagtataagtaagttggggttcccctggaactataattaacatttaaaaaatctaatgctttagaagaagctcacagagtggtgatgaacccaaacaacaaagaaaccatttttaacactaggtatcttcatcagtataggtaggtgttcacaatttttgatggatcaaaaacttgctgtaatacaaatagagagtggaggtactaaaggccttgcttgtggaaactgagagaggatacactgctttatgtattactaaagttaggggagaatgaaggaaatctgacagatgaaaaattctacaggaacctcatcatcgtggaactgaactgatgataacttggaacactccagtaaattctgttgtgtaatgtaatttggagcagtgataatacagacatattttctgttccatcagaaaatcagcaggcaccagtccaaaggtaccacacctgtacatgaagaaggaaagttctaatacaagaaaactgaaaagcaccaagctttaaattcaagattaattacaatccttaactataagtgatgataaaaactaacttgaaatgtgactaaataactgatccaaactgggcattaagtggcaggattatgagaaaggataaaaaaagagatttgagaaaacacatttcttgaattttcagaaaaaaatctagactattgctttgacacttagaaattctgaggtttttcaattggaattgagcatctctgtatgtggggatgtgggcccttatcaagggataaaaatccaaacactctaacatgcctccttgactgtaaagtaatgacactggttccaaaattcacaaataatagacactactgtccccccacccccaccccataggctaagaataattctgtaccagaataaaaggagctggtccagggaactgatatttactgaacatacaaagttagtgctagaaggggcctttgagaatgcttcccgccacctgtttccagctcaagacaggtgcacagcagaagctgggagttgcctatggctgcacagctcactgaaggtagaacaatgattggtgctcagtccaattctgtctcccccatgcctagctgttaagtaattactggttcaaaactacgtgttattagtaaaacaaacaaaacagataaagacagcatttaaaactgtgttgtcagataagagaacacatccaaaatgcatgattcttacaaactaaaggaagttaatgtgcaaaaatctcaaccaaaactactatttttagtatacttgtttacgtaaatgctgattggaaatatttaaatgactatagatctgattctttcttttcctttggaaactgggattaatgtatgctctagatccatttattagaaatgcaaaaatactacaattttttgatggatgaaaatactcctgtaacacaaacagagaactggaggaactgaagaataactcactcatatagctctgcctcattctgtgtgtgtgtgcatgtgtgtgttagcagaggtattttactcagaaaataggtttcaaagaacattaatgactttcttttcccttttatgtctgcttaatcagtgttaaactgctatgggaaaagttttatagaactatataacctgaatgttggtctctttgtacacatcttttctatgactgcaaatcttcactttatgtatcatttttactgtcatattatttttgttcaataaaaactttgtgataaaaggtgtttagaggtaactggattggcttacttccatttgcttggggtgacccaaaccacttttccatatggatacaagttggaaaatgagtcttgtcacctacccttaaagacagcacatccaaaaaaaaagtgctttacatacacatattttaagaaataaatgtaattattgaggctgacttgtgggagaatggaatggattgaaaagcagacccctgatcttatttaagttctatcaactgctctgtattgaggaggaggaggaagtgagaaggtaggggaaaatcaaatctaccatttattcttttagccattttgttgattcaggggaatgtgaactgctaggcttggtgataaaggttattatttctcttggtctcaataccaggctgacctggctctggttttcatgggtgattcaaagcagtctccactcagggtttgatatagggagactggtgtgaggggaggggaggggatgcagggagaaagcagattaatgcagtccctaaacaacacattcagtatcactagcgtgccaaaaggccacagataactcacagctacatatagtgtaacacaggtggcggtaggaaatcatttgcttcctgaagaaacatttaaagatcaactatgttccaggtgccattttagaaacgggggatggaaacccgatccctgttctcattaataatttgcttggttctgtttatacataagaattcaactggctgggtgcggtggctcacgcctgtaatcccagcactttgggaggcccaggcgagtggatcacctgaggtcaggagttcaagaccagcctggccaacatggtgaaaccccgtctctactaaatacgcaaaaattagttgggcatgatggcaagcgcctgtaatcccagctacgcgggaggctgaggcaggagaatcacctggatctgggaggtggaggttgcagtgagccgagatcatgccactgcactccagcctggatgacgagagcgaaactacatctcaaaaaaaaaaaaaaagaattcaaatcagttttgtaaaatgcccttttatgcttaaatacccacagggatctgcgccgccccttcgtgttacctgggattatatgaccctgcctaaaggattggcactgaagaatacactatgtttagttaccctctctcaggtgagtcagatctctaaaacatggttttatttcattgctggatggcataatttcagttaatgatagcaaccatttgtaaggttgctgtcatgccaggcactgttctaagcatgttacatggattacttaatcttcctaataaacctatgatagaagtactattatataccattttacagataaggaaattgaagcctagagtgattaaggaactggctcaaggtcacagaattggccagatttcaaacagcattttgattgagaggccatggtcttaatctataggacttccaacgaatgtaaattagcaatttacatcttcacatagaacagtacctggtgcacataaacctttcagacatgtttgctatatcagtgtttcctgggagggcaggcaaattttctgtcatcaagaagctggccctacctagatttctctagtattgactttattcctagacccactccccagtggcgcgtgtgtacctgcatatctgtgtgtgtgtgtgtgtgtgtgtgtgtgtgtgtgtgtgtgtgtgtgtgtgtgtgttgagaacagcttgatcataggttagttcttaagattttaaagactcacatgttttagccagctaggaagaaagtttctatcaccaatttttgacagcgacatttgtctttggttgactcagagaggggacgaatccaagttgatattacataactgacaaaagattttttagaattactcagaatttcatcatgcatgtgtgccttaatttgatcagcaaatactactgttcccctaaaatgtatcaggtactaggataaagaagtgagcaaaatgcaatcctctccttcatggagcttgtggattagtgagaagaaatgacgtgtgattaagtgttgttgcagagtgaagtataaggatgctattgggaaggaaggcagttaagcagcagagcacataacccagtctgtggtagggtaggtggggcagagaaggctttctggaagaaaaaattacattgagaatgagtaagggtaacaaagagaagaggcatagatgaacaagcagaggaaaggggatgtttcacaatgaggtgaggtgtgaggaactcaaaagatcaatatggctggatttaccctcacagagaacaaagcctatctcatcatcatatgggatagtaatgtagataccagtagcaacagagtcgaaattgaaaagggaggaaggaggaacgcttctagatccctgaggagtaatgacacagtgattagctacgattctgtggaagagcaagatggcaggatggggccctcaaaaataaactttttcagtgtttctggaataacagtccatcatcatcatccagagatgagctacacagcctgtaacagcaccacgtcacccattcatcacttgacaacctcagctgcatacatacatgaggaagaaaataacaagataaagatgatccttaagactattttgactgttagaatgtggaactattgtcaatatagctggagaaacggctggagagtggcactgtttcaactagcactgttctaggaaagactcaaaagagtcccaagggagtcttgcgttaagtcccaagtctattcactaaaattccataggtcaatcagagcccagtggagccatcctttggtaaacatacaagactgttggcagacgctaagtttcccttaccctctgaaaggtgctgcatattatccagagggtcaccagctacatcttcacatctttatgatccagcccaggtatctctgcatcactactgcagcagcgttaaggtgggagagagtagcaagaacagccatcaggattcctattccagcttcagtctttctctccctgtccccctctcacagatgcacacctgcacatctagcccccacacccactctactcaacagaggtttagtttacagtctttgaaatggtaatctttgaaaaatgggttttcaaattagtggaattttcccacttctcttagggggaacccaccaatgaaaaatcctccccatcatcacagattgaaattttatattctcctctaatcaaagtagctttataatcagtggcttggtcaccttctttctgtttgagtctaacagaaaattggtaacttcagtggttttctgggtcagtgatggaaactgattattgtaataacttcagccgggaatgatgacagctcagggaaactcctatctgactaagcccagaatctgaatttaagattagaaaatagtttcaggccaggcatggtggctcacgtctgtaatcccagcactttggggggccgaggcaggtggatcacctgaggtcaggagttcaagaccagcctagccaacatagtgaaacctcgtctctactaaatatagaaaaatcagccaggtatggtggcatgtacctataatcccagctactcaggaagctgaggcaggagaattgcttgaacctgagaggcggaggttgcaatgagctgagattgcaccactgtactccagcctgggtgacagagcataactccatctcaaaaaaaaattttttttaaatagtttcagctttacactgagcaagaggggaaaatgttgtacctttctcttgggtctaaagtaatgcattaaaaactttggaaatttcaagtttggaacatagaaaagtatgcaaattcttcagcagccttgcttgagggcttgtgttaacacttaaaattctgatatggatgaatttgtcaatcagaaagaatcaatgtaagaatctagaatatttaaaaaataaaaccactgacattataaataataaactcgaagggattacatttggggataaatattttaaaatgataggaactgaaaataactaaaaatatacaggcaaagaaagaagaaaataaaaatggtacattaccaaaaaaaaaaaaatcaaatacaaggcagtatgtagaaactgaagaacaaaaagcacataagacatacagaaaacagctaaatggcagaagtccttccttatcagtaattattttaaatgtaaatgttgtaaagtctccaattaatgggcagagatgggcaggatggatttaaaaaatgatccatcaatatgctatctacaagagactcactttaaaaacacagacactgtatttttactttgaagaggctgaaaataaaagaatggaaaaaatattccatacaaatagtaaccaaaagaggtatggggtggccatatttttgtcagataaaatagactaaagtatcaaaaaaaagttacaggagacaaaggacattatatattgctaaaaggttcaatccaccaagaagataggtaacaattataaacacatatgcagccagtaacagggcccccaaatatatgaagcatgcactcacagaactgaaaggagaaatatgacaatcctgcaataacagttggagatgtcaatgctcccacttcaataatgtacaaaagagtcagatcagtaaagaaagagaggaactgaacactgtgaaccaattagacctaacagacacataccaaacactctacccaacaatatttttcatagaatgacacatactttctcaagcatacatgaagcattctccagaacagaccatatgttaggccacaaaacaactcttaatacatttttaaaaactgaaatcatacaaactatcttctctaaccacaatggaatgaaactagaaatcaataacagaaataaaaaggattataagagactactatgaaaaagtttatgtcagcaaactggttataagagattaaatggacaaattcctagaaacacacaaactaccaaaactaacaagaaataaaaactctgaataaaattatatataacaaagagactgtatcattaatcaaaacctctgaacaaagaaaagccaggaccaggtcacctcactgctgaattctaccaaatatttaaggaagaattaacaccaatcctcaaactattccaaaaaactgaagaggagagaacacttcctaactcattctattaagccagcattaccctgataccaaatccagacaaaaacactataagaaaagcaactacaggccaaataccttatgaatataggcaaaaatactaaaaaaaatttagcaaactaaattcagcagcctattagaattacataccataaccaagtaggatttatccaaggaatgcaagagtggtttcacatatgaaaatcaatgtaatacacatcaaaaaaatatagaaaacaatatgatcatcttaattgatggagaaaaagcatttgaagaaaatccaatattctcaagataaaaatactcaataaactagggatagaagggaacttctttaacacgttaaagaccatacatagaaagacacagctaatagcatactcaatggtgagagactgaaagctttgtccctaagatcaaaacaagacaaggatatgttccttcatcacttcaacatagtactggaagtcctagacagagcaattaggcaagagaaagaaataaacagcatccaaattataaaggaggaagtaaaactatcattccttgcaggtaacaagatcatatgtatagaaaaccctaaagactctacagaaaccctgttagtgctaataatcaaatttagcaaagctgcaggatacaaaaggaacacacaaaaattacttgtatttctatacactagcaatgaaaaaatccaaaaagaaattaagaaaacaactccatctacaataacatcaataagaataagatgcttaggaataaatttaagaaggcaaaagacttgtatgctgaaaactacaaaatgttgctgaaattatagatgacctaactaaatggaaagacatcttgtgttcatggactggaagatttaatattattaaaattgtaatactacccaaagtgatctatagattctaatttaatgcaaaccctatcataattccaatggtgttttgttgttgttgcagaaatagaaaatcccatcttaaaattcatattgaatttcaagagactctgaatagctgcaacaatcttgagaaagagaacaaagttggaagactcacattttctgatttaaaacgttctaaagacagtaatcaaaacattgtgctacaaacccttatggacagacatatagactaatggaacagacctgacagcccagaaataaacctcacatctatggtcaactgatttctgagaagggcaccaagaccacttaatggggaaaggacagtcttttcaacaaatggtgctggaaaaaaaattgatattcatatgcaaaataaagtcggacccttactttgtatcacacataaaaatttaaatggatcaaagctctaaatctgacagctaaaaatataataaactcttaaaggaaaatataagagcaaatatttatgacctttgaaacgtgacaatactttcttaaatcaccaaaagcacaggcaacaaacgagataaaatagatgtcgttaaattaaaaacttttggctgtgcgtggtggctcacacctgtaatcccagcactttgggaggctgaaatgggcggatcacaaggtcaggagttcgagaccagcctggccaacatggtgaaaccccatctctactaaaaacgtaaaaattagctgggcatggtggcacatgcctataatcccagctacttgggaggctgagtcaggagaatcgcttgaacccaggaggcagaggtagcagtgagccgagattgcaccactgcactccagtgtggacaacagagcaaggctccgtctcagaaaataataacaataaaaataaaataaaataaaacttttgtgcaacaaaaggacaccaaagaaagtgaaagagaacccaaagaacaggagaaaataattacaaatcaaatacctcataaaggtgtaacagccaaaatacataaagaatttttaaactcgatgacaaaaagacaagcaaccctatttttaaaatggacaaagtacttgaataaacctttggataaaggtttatccaaagcaaataaacaaatagccaaaaaagtatgaaaagatgttccacatcactaagcattaggtaaatgcaaataaaaactacaatgaaataccacttcaacttattagaataaatgtaataaaaaggaggaaaaaaagaattagcaaggatgaggagaaactggaactctcatgcattactactgcaaatatcaaatagtacagccactgtggaaaacattttggcagttcctcaaacagtcaaacacagaattatatgacccagcaattccactcctaggtgtatgtattccccaaataattaaaaacaaggactcaaacagatgcttataccccaatgttcacacagcattattcacaaaagccaaaagatgggatatcctagtgtccatcaacagataaatcgataaacaaaatgtgtataatcataatagaatattattcagtcatgataagaaatgaagttctgatacatgctaaacatggatgaactgtgaacattatgctgaatgaaataagccagacccaaaacgacaaatatggtatgactccacttatttgaaatacctagaatgggcaaattcacagagacagaaagtagattagcggttaccaggggctgcggggaagggtaaaatggttcagagtttctgtttggagtaatgaaacattttagaagtagacagtggtaactgttatacaactttgtggctataattatgccactgaactgtacacatacaaataattacaatgccaaattttatgatatatatatatatatatatatatatatatatatatatatatatatgtctcaacacaatttttaaaagataaaaagaacctacataaattgtcccgagtccaaaagacagattataacatgttaacaaatagcctttcaaatgaaagttgataaagcctcagacagaatgcagccactctatac

SEQ ID NO: 677 - DNA, 2422 bp, Homo sapiens
gggcggaaaagcctgtttacacagactgcacaccgcctggggaataatgcagtaaaggaagtgagccggctcggcctgactgctccaacttcctgctctcacacacaccagaggggaaaaaaaaagaggagcgagagaaagaaaaaaagggggaaaaatcaggatctcattacaagagccacagaccgtctgcagacgcctgtcagcatggaaagtcgggggctttcgcccgggtcctcctagaaattccccccgaagaagactcccccacatctgggaagaccagtatggtgctgtgaaatgttgcaaaacatgacctgatgacaacccaaaacacttcatagaaaactatccaagaatgtgacttcctggagtagagtcttttttcactgagggtgtatggagagtgcaatcacgctgtggcagttcctgttgcagttgctgctggatcagaaacatgagcatttgatctgctggacctcgaacgatggtgaattcaagctcctcaaagcagaagaagtggccaagctgtggggactccgaaaaaacaaaacaaatatgaactatgataagctgagcagagccctgcgatactattatgacaagaacatcatcaagaaggtgatcgggcagaagtttgtgtacaagtttgtctctttcccggagatcctgaagatggatcctcacgcggtggagatcagccgggagagccttctgctgcaggacagcgactgcaaggcgtctccggagggccgcgaggcccacaaacacggcctggccgccctcagaagcacgagccgcaacgaatacatccactcaggcctgtactcgtccttcaccattaattccctgcagaacccaccagacgccttcaaggccatcaagacggagaagctggaggagccgcccgaagacagcccccccgtggaagaagtcaggactgtgatcaggtttgtgaccaataaaaccgacaagcacgtcaccaggccggtggtgtccctgccttccacgtcagaggctgcggcggcgtccgccttcctggcctcgtccgtctcggccaagatctcctctttaatgttgccaaacgctgccagtatttcatccgcctcacccttctcatctcggtccccgtccctgtcccccaactcacccctcccttctgaacacagaagcctcttcctggaggccgcctgccatgactccgattccctggagcccttgaacctgtcatcgggctccaagaccaagtctccatctcttcccccaaaggccaaaaaacccaaaggcttggaaatctcagcgcccccgctggtgctctccggcaccgacatcggctccatcgccctcaacagcccagccctcccctcgggatccctcaccccagccttcttcaccgcacagacaccaaatggattgcttctgactccgagtccactgctctccagcatacatttctggagcagccttagtccagttgctccgctgagtcctgccaggctgcaagggccaagcacgctgttccagttccccacactgcttaatggccacatgccagtgccaatccccagtctggacagagctgcttctccagtactgctttcttcaaactctcagaaatcctgatgacgtctggccacaattaaggactcattaactgatgaaacaaatttgtccccacgggctagtttacctgtgtcgtgagaaggacattgtgaaactcttgttaatttggtttgcacttttcataacatggatagtctagatttatgttagcattttaaaaactgtttttgatatattcaagtatatatgaaaatctgtttggcattaagtgaattttaatgtttttgtttttatatccttttagctcttaagtgttgaacactgttgacagtgaagaacttttcttaatggttttcagtataactaataaggatgtgaagcttttttctctttagttctgagtatgctaaactgtgtgcttatatagactataaccagttgtgccttccttcgcatttaatgtaaatgaatgatttatatattttttagtattaagaggaaatgtttgaaagatgaaaattagtatcaaacagctctctagtagaatttcattatttttcaccagtgggcaatatgaaagcatatatcacgttttgttttactttcaattgtataagaattgccttagaacctcttttgaactgaaattcagtaaatgtccaagtaatgtttttataataaactaagccatatttagacaataaacattgataaaatgttctaaagtacattttcaaaagaatggaccttgaaaggctagcctccttagctgtttacagtatcttatcttttagatgcctcccagacaaaaatctgagatggaaaagctacatcaagttcatgctattccaggcccaag

SEQ ID NO: 678 - protein, 397 aa, Homo sapiens
MESAITLWQFLLQLLLDQKHEHLICWTSNDGEFKLLKAEEVAKLWGLRKNKTNMNYDKLSRALRYYYDKNIIKKVIGQKFVYKFVSFPEILKMDPHAVEISRESLLLQDSDCKDEGREAHKHGLAALRSTSRNEYIHSGSSFTINSLQNPPDAFKAIKTEKLEEPPEDSPPVEEVRTVIRFVTNKTDKHVWVVSLPSTSEAAAASAFLASSVSAKISSLMLPNAASISSDFSSRSPSLSPNSPLPSEHRSLFLEAACHDSDSLEPLNLSSGSKTKSPSLPPKAKKPKGLEISAPPLVLSGTDIGSIALNSPALPSGSLTPAFFTAQTPNGLLLTPSPLLSSIHFWSSLSPVAPLSPARLQGPSTLFQFPTLLNGHMPVPIPSLDRADVLLSSNSQKS

SEQ ID NO: 679 - DNA, 36599 bp, Mus musculus
  misc_feature (1)...(36599): n = A,T,C or G
cttccttccaactaccctgtagcaaacatcccataattcagcaggaggcagagcagggcgtctccaggagtggatcttcctactgctatgctacttggctggaacccatgacaatccattcaagcagtcaagtcactgacgggcagaaaagctagagttcaaagtatgtttgtatgtgtggtatgtaacatcagaacatttcccggggggtggaggggttggggaaggtactttgcagttctcccaaatctttacaaaagaaggttgtagatttggagagctgaagaccctgaagacataaatcccatagtgcccccctcctcccttttctgattctatgctcaccaagttgagtggggtagaccctgagttggggcagcaggcttgtcagggttctcgtgtaaattaagaagtggaatgaggtttcacgagctggtctcttgagggcttccctgctggactggtaaggtgattgagtactctcaggccaggtaaactccacacactggtccttcacggttctgagcctgcgcagttgatgtcagtgagcttgctttggggagtgccacagtgatcagtagaagaaaccagctgggctttcaagaaactcttctatgcttacatagactgatgcctaagaagccgtaacaccgtcgcagttactggcaaccctcattttctacactgatgacccgcgccactgttgcatttgtgacagccattccattcttttataaaactcactttaatgtcaaaaagcagtgacaagcttcctagagcaatggtttttaggaaatgttcaccctttggggtccactggaaccctgactctgccgccagtcggctttgctgtattgcctggatctaggccggaggagatgggaagcagactgccagagatgaaactggcagatagaagggaaaggaagcaagcccttgaccttctcttttctcctgaccgataccattcttgaaaatatgtgtgtgtgttctaaccccggtagtctccctaccctcttcctattccactttattatctatttttaccattctgcagaaactggtctaaggtcacagtatgccagatctgatggcctcgttttaacttccctccaccgtgttatctccttcacgtttcaggataggtggaaagctatcctgttctttgtggttttgaccagcatttgtcgcacagcacaatgactacttcctaggaaatatgaaatacagtcttactgcgagagccaataaccttttttcattaataaagaaaagctttctcttgttcttgtgcttcgacaatctttttccaaagaatcatactttatttttgtctgcattaactcgtggatgttcccacaaaagtggggatggcaaatgggaagagggggtgtggctcctgtcacaggtgatcagtagaagtgtgaccagtgattgaccttggtgacattgactccatgatgtccctgttactctgcagactttgtgatgaatcactccccaagcacagcagcttcagataaaaatcacttatattctctttccctgtcctgctgtttatgagttgaggaagggctaagctggccactgaaggggctccagcaggtcctagcatggcaacatggtggtgacaggccttgccctagccaccaaggtttttccccttatttgctcacgtccccctccccaggctgataaacaatttctagctatcaaagtactgaagtcctgcaatcaaaagccccatttggcttacttaattaatatgtgcaatcgaaatgaaatacctcatcctaacatagggtttccccttttacctttttataaactatttgcttatgggccacatctgcctcctctctatccagaggtggttcttcgtccctccagagcaaatatcccttacccctctccctttgtgctgagaacttggtcttggtgtgccctgtgctaactccagttctttctgtcacttttctcttgaagtgcacgtgggccttgtatgaggataaaggcggcgaggtgttggctgaagtggtgaaatctcaagctttgccttgggttagagaattgatttccaaggaaactacatccctttggcctggggcctctatctctctccacaggcttgcctgaatgttctcaaagcaggctatctaatgtcccttagagtgagcagctcaggacacctgggtggaatccacagtgcctttagaaccttgtctcctatgtcatatgtcacggtcccaccatgctttattgatcatacagagctcccagttagtgtggcaagatattgaatgtcaggaagtgaggacattagagcttgctagaaaacagcgcacagagactttagccttaggggaaacagttttgaacctggacaaagctcagacatgcagtattaggaaggtaagcattcagtctcaactcccccaaacaaacaaacaaacaaataaataagcaaacacattgtcatccaagagtgagttttacttcttgcctttcacgttcccacagctcagttccatcttgattcagtggctggccacctgtgcagagttactctttaggtccccaagcagccacacccatcccaatgaaggccaggcaagagtttgggtcagtttaacattaagctagttgggttgttccttaggcagaaatgtgagtgtactgaagctgccagcaagtccagataaactaattcgtgcttgtcctttggcctcactgaatccctgagctgggtctcagggctctaagacagcagaactattgcttctgatgtgttctcagagcagtatctgtactcagagttgcctggagggaacacactgctttacaatcatttcaaaagaccaggaggagggcagggactcccaggaagcctgcctggagcacactcacacaacacacatgctccttggctctaagcagttaggcttctctatgtctgccccaggtcctaaggaaagccacagaggctggttattcatgaatcaatgcctaggctttaagctaggctcattcccccgtctagcttgcaactcagtaactcagttaacctgtttatactagtctatggctgccacatgactagttacctctcagtttcacatgcctgatgtcctctgccagtcagtggagaatccttcagcacccgactctttccaagagatcctgtctcctcccggaagtctcacattctctcctgccttgctctttattgacacgtgatgattttacacggtgcacaaaagattattcctgcactcagctgctgatttttatagcaaatgttccttggatctggggaaaattccaggatgtgtttacatatatatatatatatggttcagttactgctatgcttttaagtgattagaaaaatttaaaggaccaagaattatgtaagggaaaatagtggaataatttttgaaaaagatgatatgatacatatccttttaattcatgaattcaactttgaaatcaagcattcttgtttcgtgagatttatggtgttcattttaaaacaacaatgtgcagctgaataatgcaaaggagaaatataaactatagttttgaacaagtgctatttttaactctgtaggctggtctgctcttcgttcacaggctcacttcctttgtttagttatgcaaatgacaatttcttacctggctctatattagtttccgcttacttttactatcaatatgtccagtaacttacgatgccccaatgcaacacatacacactatgcacctttaatattggccttattgagaactttggtgtgattggtagatacaaaggacttggtgctgtgaaaatactcatggtctgatgtgactgtagacttagcctttgaattgaaaaacagttcttggaaataaacctgtattttagcagtgttaagttttccctcttagacatctacctcattgtggaaaatttcagatatacggtttttcatatttaagggaaacacgatgcatgctagaatcagggtttctcggatgctaccaaacagttaagttgggctctgctgcatctgtctgtactgcaagtgcctcaaacaacttgccgatggaaggtcactcttcagtactttatcacagagtgataaacaacataagccttacagaagtcatcaaaatagggttgttcttgatgaaagaggctacctagtagtttttgaaggaaggaaaacaacatctttaagctggttgctcagaatgcagctgccctggccagctctggccagctcaagttggtctgtgctggaaccagtcttgcttttgctgtctttattcacaccagcatcttggccagaaagtctcttctcattgctccttgttctgtttttactcctctgagccttcatttctgcacttgcatgtcacctccctcagagaaacctcctaacaccacactcctgtcaccttgtcttgtctctattgtacttaaactttgcatggctattatcaggtttattcaattgctatcttccctaatgttctctaaaactggaagtctgtagccctggcttgcacaatggccatccctcccctggtgaaagctggttaaacaaattaattgttgcaaaccaatgaaaacaaactagaatcacacagttatcatattttgtcattttgatagattggatgtggtaatatttaaagtcccccagggatggattagagtcttggcagcagtttgactgccagtgagagaatttaattcattttgttaccaagacttgatagcacaatgtttggcatcgtctattaattattaaaaatacagaaatctcttcattatataaaactcgatttaagttgaaaaaagatatatgttcttttaaatctcattttaaaacaatgttgagagctttggctctgttctagaaaaattgcttgaattgaagactgggggcagtggtaagaagaatattaagaaagagttaatggatagaaaatacactggaaatgaaatcttataaggataataataacaggcgggatgaagtctttccaagtgcagcattcagtagagagcagattctgaaggaggtattgtggtggtaatagtggtgtggcccatgcaggagagctagtactgggtgctagtacaaagccaccccgaattttatcttcataaaataaaacacatttacaaatcccttatttagaaaggggagatcaatgaaaatctccagggagctcccgtttggccaaagactccaggagaggttgtataaggtgtgtccttggtgaaggtctgtcctggagtctggacttggactctggtcccatggggcaaagagcatcttcttcccaagggtacagtgaccctgcaagcattagcagagacttctactgtgaagggactgctacagcgctcaactgtgtctttgaggcatcttttttctttccacctctaggattctatgggctgctgctgtggggttaggtaaactgggccttagctgacctctggttttatttggaagattcccaaaggacatagtcaacaatagagcttcttcattaatattcttaaaacacaactcaccataaaaatcaagttatatctgatgtatttgggaatctacccgaaaggtttagtttctgaaatgtccattactctttaagacatttcaatgctccccaaacaaaattgaaagcagaattaccctggggaggtgcagtagtacctgtgtgaattgggaagaatctgaatgcagggaggcaggaaccatgtttcattattatttattcggagggtacttttctcttcattcctcatacaaattgcagtagtgcttgtcttagtttgggtttccagaggttcagtcacacagtatcagcacaatgggaaacatggaagcatccaggtagacatggtgctgaagaaagagttctacatcctgatcctaagtcagccagaagtttggcttccacccttggtggagccacccccacagtgatacagttcctccaacgaggccatgcctactccaacaaagacacacttcctaatagtgggccaagcattcaaataccagtctatgcggccaaacccactcgaaccaggacagtgttcaatttgatactcttgaaagatgttttagaagaataatgactagacctaacatacactaaaggtgattcctggttatgggttaagtattgaaatttattttgttttcagtcaatttccccctgtttcttgggttaattttgaactccagggctaaattaacccccctactgtagtcttctgagtagccagcaccacaggggctatgctgactagttttatattgactagatacaattgaaagtcatctgagaggaaagagcttcaatgaaaattcctcttgaaggtaagcctagggcattttcttaattagtgattgatgtgggatggcctttcacattgtagttggggacacccctgggctgatggccctggtactataagaaagcaggctgagcaagccatagggaacaagccagtaagcagcattcctccctgactctattcctgctgtgtttccattcctgctctgacttccctaagaggaggatcatgacctgacatttgaaagatgaagtgaaccttttcctccctgagttgcctttttggtcacagtgcatccttacaatagtactaacccttatatgctaccatatccagcaaaaggatgcatttctagaaacacacttaactgttaattcaagaatgttgtatgctctcaaaggtaggaagtttttaaaacattcttcattaagggtaattcctttattacagggcctaagagatattcagaattaactattaaaaacatatgttgaatacaatgtaggcatattattgctttaaacttactctaagagtttttctatactatgcttttataatttctcacctaaaactacattcaccaataaacacatttcacaccttggcagatgatctataaccctattaaaaaactaataaaaagatcaaaaggtataagaaaatgtaggagcttaactgtagcagttacttatgattatatatgtaaatatatgtatgcttgcatgcacgctccccactgtataacagagcacttcagaatttagtgacctaaaaacagtagtcattttatcaaattttacgactcagaaatttgagcagtgctctattgggtgtttattttgttccaagtaggatcaatgaatcttactgaatgagatttatctggtggatgaagtcaacatgaagccattcacatttcataggagatactgagaggcaggggttagtcggcagacctggccagggtccacatccagtggccttttcggcgaggcactatcataggagttgaatttacatgtcagcccagagctatcagagggaataacccaaactaatatactgaaaatgcaaagttccctttggcttaactttgaaaatcttaaaatatatcttattccaggttctattttttaaggtagattataaccaattcaagagtgagggttaaaactctatctttctctttctctcttttttttaaattttgaaattaaaatatgattatattatttttatccttccctttcctccctccaacccttcccatgtaccctactcccttctatttatttttaaaaatcaagttcacaaactatgtttttaaaaaaattattgttgcatatagtggaagaggtaggggaaaccctgaaagagccagagaaacaggagtttgctttgcgatttcctcttctagacctgtcagggaagctacacccaggaagactcatgaacatgagctgaacagggatggcaccgatagacatgctaacacgaaaagggggaagtctcatggggcctcaaccctagacaaagaactccatgcaactacgacattctgggagcagggaaaatagactcctaattacaggacagcaaagacattgcaatggacttattctacaatacaggtgggaaacaggtagagcacctgggcacattaccactaggctttcagctccgatcttggactaaatgttcactttgcagtgtattctagtccggttctgatggaagacaaatggaatccctgaattttaacagtgtcagattgatttgttctacagctgccccatacttttttttttttttttctcactaagtcattgtcaacataaaccatgatcagaggttctctgcagtgacatttatttgggatgagcagagccctgggagagaggagacgaacaagaattaaccacagatatagtcaacagggtttgaggaaggattcgactctaaatttaaaaagagataaacttacaaaaacgtcttgaatatcaagactttgggttttggaggaggggggaagaaggccttgaggtgggttcccttgtatagtttgtaggattgctaggcaaactctctgcatgagcattcgtatggactgctgcagtcttaatgttacagataatcctatccccttcccgaccccctgttgtgggagaggtgcgcaaagcaagctggcctattaaaacaaacatcttatcaaccaagaaactccctacctcagacaggtatgaacacccctcccccaataatactgtcaagttctaattttgtttggatctgacaaggacttcatcctaatatcatcagtttttatgaatgaatatctgaccagaacgttctttttgtgtggcccctgatagtcataaggtcattaaaggtgaagctagatgccattccagagagaaaaacctggcttcattttgaagatgaggagactaccggggtctcaagaagttacgtgacctgtccaaagccagaaactgctagtagagtcacaccctactgtgaagtttggaaagaaacaaccactgatttatctgtggagaggcatcttctagccaaatcttccttaagcaatacccatctacctggatttgcaatctatttaattactagttctgagtacaattgatgcatctaataaaactaacccatgatcccaggcaatgtcccacggcagaaaaaatcccatcaagactcaggtgcaggcatcgggccactagctcctggagttggtttcacgctctgccattttcagatgctttggttgttattttgcctagaagtattcttacagcaggtttgcctctggtccttagaaccatagtcttcagcactccacttagaaccagcctgttcattgtataaatgccgacgtttttctgcccagagcacaaatgtggactactcactgatgaaataaatgtgctggcctaattcttcttgctcctttgtttcgagagaagtttgcttttaagatgaggggacagagagctctgacttttattttatagaccgcagggattctaggtggccttaagtactgttcccgaagcttggatttcctgtttagagggtgcactgtcaagattagcttttgtcttctgctgtggctaatttgtcttcctcttggagcagccagtgggggcgggggtgtgggcaggaccggtctgctgatggagacacctccttccactctctgacctgggcgggatcaggcttctcgcttggctgggaggagccccaagggggcggatcccggtccacagggggcggggcagctgacccctggccactcccggggaccgtggaggggggcgcgtcccggtggagctggtgccgcgcgctcgggagtgggttggcttcgctggggcggggcggggnnnnnnnnnnnnnnnnnnnnnnnnnnnnnnnnnnnnnnnnnnnnnnnnnnnnnnnnnnnnnnnnnnnnnnnnnnnnnnnnnnnnnnnnnnnnnnnnnnnnnnnnnnnnnnnnnnnnnnnnnnnnnnnnnnnnnnnnnnnnnnnnnnnnnnnnnnnnnnnnnnnnnnnnnnnnnnnnnnnnnnnnnnnnnnnnnnnnnnnnnnnnnnnnnnnnnnnnnnnnnnnnnnnnnnnnnnccgcgcccgccgccgcctcttcatgggcaacctgctcggcggggtcagcttccgcgagcccaccaccgtggaggactgcgactccacctggcagaccgattcggagcccgagcccgagcagccggggccggcaggcggtggcgagggccagcagcacgacgagccggagcagcccaagcaacctcccgagagagccggagggcggccccgcgccagccccgtgcccgaggaccacgccgaggcggcgggcgcggagcaggtacgcggccccgggacccacggtgggcccggcgaggtcgtgctcccggcgcccgggaggggactgccccccggggatgcagggcgggatgctcggcgtgcttggcccgggcacccgacctaagggagcctgcggtgcccaggtggctagctgctagcccagggggccttgctgtgaacctcgcagggaagtctccccaaggcagaccccgaccccactcggtgttctctttgcctctgcagcgcagctgggtgatgcgaaggtggggtgggaggaactaaactaaaaatagaagattgtgaggaggacccggccagtgcctgttattgatttttttttaattttcattttttaaaaaaagatttaaaatattattcagagcaagacaactgcagttgtgaagcggcccgcagcctccccctcccagcgagggtccaacgggcattaaaagtatcacagaaggttcctgagcaaacttaaaataacaccgttcatttccccaagagaaacctttcaacgacttgagtattcctttaacatttacgttcacccagaagacttgttgatccaaccaagcttaagtcagttgaccaatacaattaggtagataggttagaagagagatagatggcgtcccttaacctcttgtggcttcagaaacttttaaaaggaggaactgtatatttttaaagaagtctgcaccgtttaaggttggtggttctgtattaggcctccctcttacaacttgaaggaaaatggagcccaaaatccaatgtgactttaggggaagcatcacatttccaggaagtccgagccttcccatccaggttaattgagcgtgttattgaatggaatgcaatttccaggtgtgcggtccgttttaattccccattttggagaactgtgagccttaaaggaaatcttgcccaaagcatacgaggagaaaagtatgtctgtggccaaagtgagggccttggccctgctaatgagatcttggccgcccttgtcttctgttcccgtttgtattttgcacttagtgttatgtgctcaaccccaaaacaatagcgcatgccacatttcagcgtcttatttgtcttccaagtaaatagcaaatagccactgagaagtttggaattaaagaaacaaaaacaaaacttgttaatacaattaactaggtcaattgtaaaataacataccatttcaacaaatactctgcaacctgagtaagaatagagcatcctttaattgttaatttttgttcctggaagttccaccagacttcttaaataatcgttgtgacgctgttttgactccttactctatttgcccactatgcggaccggtcagttccccctttaaaggaggttgcagactggtttcacccgctcactgtctttgctctcatccatctctgtaaacgttagacaaaagatggtaccactaactgaggtgaggaaacctggggtgaaagatgtttcagaggttaagtcaaggcttatgctaagttttgcgtcctattagacacccaagtggatgggcgagtagttaatggtctctataaatagatgctccgtctaggctggagctataggcttgcatttagtatctatacatagatactgtctaagctggagctataggcatgcatttaggataagttgtactcaaaaaaaaaaaatcaatgcaagataagaggtcatcaaagagtcatgaggggtgagaataaggctgtctatacgggttgtgattaagacgagaaaaaggggagcaatggtacaggaagcaagtcaggagagagtggtattctgacagctaagtgttaacactgcttcagggccttacagggtcccagctgctgggaagtccctgggatgaccgctgagacatgatttgagtaaatgggggattggtttggaaagttcctaatagtcccattttaaagcaatgccctggacagagtgtcagttccttggtgaagattcacttcagaagaaagcagagacacagcctgcaagtagggtagacctgggtcaagggaggcgttatgcttaggattggagagactacagtgtgtttggtggttgcatggaatggtttggaagagccaagttttgatgatccagggaaggggaattaaggagcagattccttgctgaggaggtgaaagcggccagggtacagcagtgaatggggcagactctggcgggctgagggatgccgtcatttacatggtagtcttggggaacaggcaggccgtgagtcattagcttcgtttcacagatgatgaaactaagattcagctaaatgatttgcttaaggcctcacacatattaaggagcagaacgaagcctcgcactactctcctggatccagagacttgggtcgttgatcttcatgacaggatttttcaaatatccatcacttctagcagggacaaaactggttccgacccaattagtcagacatgggaagcagcgacttcttacactgttgctgggctctgagccttgttcacttcctcttaagttccggcagccttgttcccaagatgctggcactaataactgtcagtcaggcgtgttgcacggaagtgtttggtaaatgggaacgtgctctctgcaagtgcttgtggttgtagctcaggctaagtagattctgaaccttgctaggcagagctattttgaaaagtgtggcaagaaccagaattggagcttttccttgcttatgtaacatgacagtgtaacgactgttaaacagcggagggctgggtgttaaagtatctctgtacttgtagtaagagtgagaaatcacaccacttcagaaatgcgtgaaagctgcttagatgatgccagtctgtcagcacagacagggtgggaagggttgagacaaagggttgggggcagacttcttgaatattcatatctcagcaccgcggtcttctttatcatgttccattgtacagtcctgtgtgtcactggacaagtgcattttgccgtacagcatatggtctggataattagaggttattagacctgcatcttctccgtttaaaatgacatcacattgctggcactttgtaaacagcatgagcaagctatcacgtagaaagtacttcagtgtttgtttcacccgagagctctgtcttgctctgtgtacttatgtcaagtttgctgatttctagcccactgatcattgaatgggcagatgattactcatgccttgtatgtttgttatggtgctttgaagtagtttagaaagctaatttagtttaaagccctccttttctttcataaatgttgcttgactttcaggcgcagccaggagatgcaaatttaatgagaatcttctgcatagaattgatttaccaacttaaccctttcatggcaccctaggaaatacgctttgtcacaggctccattgtataacagctggtggaacatgttttcaattcgttctgagcactgttctgcattgttactgatgcttagcatttgccctccacaggcactgaacgataaagtctttttatttagtgatataccttaggacagaagtttttagtgcaaataaggcaggttgatgccagcaagcacagctcgaaagcatcacggaagagacagaatcatttccttcatcttggcaggttggaaatgctcagggatctttatggaggttgactattttaagtttgttccagaagtttctcagtatggttctctgtgtaagtggaattccactttgtgtcctagggcggcgagtccacggaaggaaatgccaaaccaaagagaagcttctacgccgcgagagatctgtacaagtaccgacatcagtacccagtaagacactgctgtgccttttcaatgtgtttctctgattttactcttccggtaaacaaacatgtccgaagggtccttgtgccgtgtgtgtgtgtgtgtgtgtgtgtgtgtgtgtgtgtgtgtttccatacaccagagattaatttatcttttcctctagcagaacttcaaagatatccgatatcaaaatgacttgagcaaccttcgcttttataagaacaaaattccatttaagccggatggtgagtaagcctccttgctaacatgcaggttttaaacaataacatgtacctgggcgtgcgttccttcttctgggcttcacgccttcttgctgcatttgctggatggttaccttggttttggcttgccgtgccggctgatgtgtccccggagccctggcgggtagggctgcttccatccatttagtgagctgtggagaaatagatattggttagttgcatcttctcactatctgtgtgtcttggtggttattgacaagttaggaggggcagggtttctgtttgctggtttagtttagtttctttcatttagggagttttaacttttatgagcagaaaggaggaaagacttgtagagctattgaattttaactggttagaccttggagggggtcagattcagctttttcatcttgaagatgtggttcctgggatttgaaacctgaatggctgacatgctgggccacagaatcaattttagagtggacctaagttgttctcgggtccacggttctttttgctgtgccatatctaaaaataattacttagaagatgagcaaatacagtgtttgtctttagaatttcttctgtcacttttcaaaatcaagggttggggaactacagcaatcccagttcaaaccggaccaaataaatgtgcctcgttcacaatcgtacgacctccctcatagaataggagccttcccaagcccatagtgaaaactcgcagattacaaactggcagataagccaaacactggggcagcccagtgggcctcacagtgggtatctgaattgtgtgcaggcaaacagaagccagatacactcctgaggagttcagtgtggggtggcccgattgtcctgattgttgtcatttgctctcagtgaaagctgagtgacattcagagccatgagtcagctggtgaaagtcctagattgtgagctgtgctggctagctttatagcaaccaacacaagctggagttggtcgggaagagggagcctgagctgagaaagtatgcctgccagattggcctgtggggcattctctggagtgatgactaacgtgtgtgtgtgtgtgtgtgtgtgtgtgtgtgtgtgtgtgtgtgtgtgtcacgcacacgcgtgcgctcgggggctacctctccacggacagtgctgtccctgggctggtgggcctggatggtatgaaatagtagacagagcaagctagtaaacagtattcctctatggcctttgcttcattccctgcgctgagtttctggccgtccttcctttaagtgatggaatgtgatgtgaaaatgtgagagaaatcccttcctcccaatgttgcttttggtcatggctctgtcaaagcagtaggaacccctaagacacaaacgtttcagaatgccacaaccatgggaaggagagagtcgtgggaatgctggaagagagttcaaagtttggaggtggtgtttagaaggggggaatcctgacattttgtcctgaggagtgttgctgaaatgggcaaatgcaggtaacttgaactttttggtattcagaagtttggagggtataatgcacagtgtatttaccgttgatttaaaaaaaaaaaagatataaccacgggaaaatgactccagcatgttaataatactgaaggaaaatggtgttgcagatttctgggaggggccttggggtcaggctgctggtctttgaggaaaaaaggagatgagttgcgggtgtgtttttggttttgttctttgttttgttgttgatgattttgtttgctttctgtaagattagctaactggccccagatgaggactgtggcagacttgagggtcacgaggatttccttacgttcttactggcgagagcgagccattgccaaagggcctgctttgtgcaggcacgaagacttcgaagacttgtgttccactcccacacgactttgtaactagtgtgtgacactgaacaaattgtcgttgttattaatttactaatgtgagactctgaacaaatattccacataagagcagtgttttcctgttagtcatgtggagatggtaatgttgtttgaagtagtttccctgcacagaggcagacagcaaatatgttaggctttggaaaatagtccattgaagcactcaagcctgcaggtgtgagcagtataaaaatgtgtgcttgtgtatattctcacaaaacgttgtcttgtgttatttacaaaacgctcgttaggccatcctttgccaccctctgtgcatcacccagtatgcacttctgtaacctgtggtgctgctgtctttattttaattgggcttttaacattactgggtgtatggcataggatagtccacttttaggatcattcttgtgttgcttttaaactgaacacttttaagactcgtgttaactcacatgttttaatgccatccccatgtttttaatgaatggttccatttttctcaatatatttgccacataggtgtttacattgaagaggttctaaataagtggaaaggggactacgagaagctggagcacaaccacacgtacatccaatggtcagtaacacgctcgccgccatgagccctgtcctgtttaatcttaggttttcaagacaacgttaactgaaaattgttatttctttttttttttttttttttttaacaatcaaggcttttccccctgagagaacaaggcttgaacttttatgctaaagaattaaccacatatgaaatcgaggtaatgcaatctcaattcactttccataaggcagccaaataatatcatcattttattgtcctgatagcaaccgagtcatttcaattgacttctcgccccccttttatattaggaattcaaaaaaacaaaggaagcaatcagaagattcctcttggcttataaaatgatgctagagttttttggaataaagctgattgataagactggaaatgttgctcgggccggaaactggcaagaaagatttcaacatcttaatgagtaagtgaagcctgagtggtaagccattggcctcttcctgtagctccattctctggaaagtagcaatagctcgccattggcataggtctgtctagctgttgggcatggaaatagctagtcgttgggtgctggataggctagctattgggcataggactggacataggaacaactagcatttgaacacaggaatacatagctgttgggcattgaaatagctagtcatagggcacaggacaagctctaggtattgggcctagcaacttgacattgtccaattgtaaataatgaattgacattaccagatattggacataggactggccagctgttgggcataggattagcttttctttttctttttcttttttttttctttttttgccataggactggctagtcattaggaataggaatcaaaatctagtcagaaatgtgtttattccatctcgtgcattctaaaacaaagcataggaatgagaatgaacaaattctacagagagctggctgctctactccagagtggtctcttcttgaatcctctgcctccggcccaacgtggcttctctccttatatataccacatttcaaggagtttatagtttttcatatgttccctctcctaggctataggagtacaaatcatttgtaatatcttcatgcgtgcaagcttcttcggttaaattcataaatgcattctgtgatgtataaaaatgggttcatttgatgtggccatacttctagctaaaatagaggaaaaagcacatttgccttcatgagttaggtaaaggacaagtacctatttctgattaattccaaaacctataaaggaaaatttagcagctttcctggatgagtttggctgtacttttttgtttggatatctgtaatgatgattaatacttataaccaaagtttagttttaaaaatattttctccatatgcacactgatttttttttcctttttaattatagagtgacttatgaatactggactataaaactaacaattttaagaaactttttttagtaccttataattagctgaactgggcaagtattaagaaaaaaaaaaaaaaaactaacgcaagcactttctctttggcaaaaacaatcagaattttggcatcagctctttaaatttttttccagaattctcctcactttggtaaaaggagtaaaatattagtgttgaggcctccatttccttggttgtaagtaacactgttaaattaggaggttcacccgaagctttgaaactatggacataaagcgttaggtcctgactggagactcactggcttatacctcaggtgaaagtttgctacgtaagctaatgtcagcacaagacaggcctctgcctatctaatgcagataaccatatctggatggtttctctgtcatactgttgaagaaggctatctgcaagtaaggctttggcaaacagtggtcacacctcaccctttgggtgcccacctctatccttttgttatttttgcttggaatgacatgcttgtttggtacgttgttgttgaagtagtaagtcatgaagagaatgtgagcaaaggcttaaagcctccctggggtatcattgttaggtctttttgtttatagcccaaaccagagccctttctggaggctttatttaattaggttgtctcttagcctctgatgaagaatggcctgcactcacagccttcccactctgtcccaaactagcaagctctctccctctcatccaatagctttctgctttcccagctctgggtgaactctcctagggggaaaaaattaaaaattaaaaaaaaattttttttacatgtagatgcctgcttgtctgtgggtgtgccacacgtatgtacaggtgtgcctctagaagtcagaagagggtgtcagatcccctggaactggagtcctcaggcagttgtgaactgcctagtgtgggcactaggagccaaacctggctcctctgtaagactttcctgtttatttatctttgagaccagatctctgagtctaggttgactccaaatttgccaccattttttggcaccatcttccaaattctgggattgcagacacatagtatgattttttcatcaccacaagtttttattgattaggtttgagcagaggataaggcgtgatatggacgtatctcctctattttcatttggattcttttgtgatccattcttaatgtcattgctcatctgtgattaaagctgggagacatcttgagctttttgcaataggctggccaggacttggttgtgtttatagctcagtggaggaaaactgtttaatcagagtaaactgaagtgaaattgaatgagtaagtgacctggataaaagtggtgaaatgtgttcagctattaaagtacaaatgcacaaatctgctaagatgctggccaggtcacatttgtgatgaggtaggactcctgagcctcactgagtctagttttgagttttatgtccctgctgtgccttcttttgacctatctggtcttctgataaaattagcaccgcctctttgtttccatagcagccccttcctccattccttggtgtggaagccagggctgtgtacagctccagccatatttaactcctctagccgccattttgcctttcatttcgacatttatctcaagctgtcctgaaacaaccaattcctttgttttatagataattttgtcctagaatcctaatcattatttttctcagctgctcaggttttttaacttctttttttcctcggttgcataaatgctttaacttgtgaatatgtaaataccaatgaatgtatatgcaaatgctaagtttcctgttcctcttagaggggttctggctgcagatctggtatctgctgcatccggcagtgcgccttttcttttaagtagtctccctgtcttctccactccttgttcttatgaagtcagttgtgatacgacgttctttcaatatgagagccctacatgcatgtgacggctaaatcacggttgttagtgggatactggcttcacattacctgagtcaggtggtcttcaaacagtcaggagcagttactgcttccccggagggccagttcctgtggatcaggcaccctcttctgaccctctttggctcttgtacacgcatgacacatataaactaaacaggtacacacataaataagtttttaaaaattcaaatattacagaatcataaaactgagacatatgtgctgggttttaccctttggattacaaatagattttaaaataatacttttgggacagatatccaaaaggatgtagataacaatttttcttttattccagtagttgcttagctcaaataacaccaattttttattttgtctgtatttgtttattaaaatataagaccagaaactatgtacttatatatctctagtaatttgacatatttttccaacattcccaggtgatttagtaattacttctaataaaaaactcaagcacttttggaagccgaggcagatatatacagtgctttcaagaaaattcaatgtctgctctaaaacagaatttagcaagttagaggcaagtgctagctctgttgtgtagcaatcctgggtaagtacatgtccgacctgctgacctcaggcatggttctgtaatggaggagagggccctaagggttcagacagatgtgtgtgtgtgttcagctgaacaaggctagggagatgagttatgaattgtaactaagtttggaaaatgctagtccaagcatggcctcggttttgaaagagaaaggtataagtgccatgtgggggaagtgtgtgtttagactcaaggttgttctaagtaagattggaagccttttaataaggcaaggctggcaaagatggagagactaggttaaactgaattcaggggtgctgttactcagtcctaaatcctgttgttgtagatgatagtaggagtaacaactagggtgctaacacctgagggtgatagctgacacgtgcttataatcccaggggatacgcttgcagccacacactcaccactgcatacgtgaacacaggcacccacagaagagttctgaataacgtccctatttactgagtttgttcacaccctccatttgtttccctttgttggagttttgcaacgggggcagtgagagctctttgttccccattttacaggtgcagacactgaggcttagatgggcatcatactttttcattgcacttaaggaggtctgtcttaggtccagaggtttagtccattatcaatcatcatggagggaagcatggctgcatttaggcagacacggtgctagaatggtcactgagagttctacctcgggatcagcaggcagcagaaagagagcaacattgagcccagctttaaagccccagagccaacccccaaggtgacacacttcctccaagaaggccacacttcctaacagtgccactccctatggccagacattcaaacacttgaatctatggggaccactcctattcaaagccccacagtaataacgctagggtaaggcaggctctgtcaagtagttttgttttctttgtcagaattcttctaggtaggcaggaccaagcactgctttctggattttgctggtcatttggtgctgttaatgataccgttcagcttttagctagtgcatctctgttagctagtgcgtctctgtttagccctggttacctgtgatcagaagcatacttctttgatatctcaagttctgaagttccctgtagatggcagaagtcatatgtacagagtcctccacatcctctgttttgttccatgatgagatttttaagttaggcgtagtaagagacaacaataactaataacaaagcagagctttaataacattaccataataaaggctacgttcatggctccttcactctctcatcttctaccatggtcgctacttttcttatggcagcatcgcctgatgcttggctgtatgtgcgaagctgctctattagaacactaatcttcagtgacaattaattggcaccagcaaggacaaagtcaacctcagtggttctttatgttgatgtgtctcttaaagaggagagcttgtatttacatttgagtttcacacttgttcgattcacatacgttaaacaaaatgcattatattttttatttcgttagagtcactataagacttactttcttactttgcatttctgtaaacaccttctcaatagttagggtttttctacttttcttctcctgattcttttctctcattttattcaatgctctctttcaggtctcagcacaactatttaagaattacgcgaattcttaaaagccttggcgagcttggatacgagagttttaaatctcctctggtaaaattcattcttcacgaggctctagtggagaatactattcccaatattaagcagagtgctctggagtactttgtttatacaattagagacaggagagagaggagaaagctcctgcgatttgcccagaaacattacacaccatcagagaatttcatctgggggccacctaagaaagaactgccagagcgaagcaaagcccagaaaaccccgactctgcccgcgtcgggctccaatggtcaaacttctacacacaagaaatccaaggactccaaaatttccccaggagctagtcacgtaaatagcaaatcagtggaagaaaaaaagggggcatcaagagagcctggggaggaggcggacaagccgagcccagagcctggcagtggagatcccaagccaagaaacacagagaaagacagtgctgctgaccaatctgattctccacccgagaaaacagttcctgataccgcaggaaaaggggaatgtccaacttcttctgaaaaagatggagaaggggaagaccagagcaaagactctgaaaatcctgaaaatgccggttgtcatgctgaggtagtggcacagcaaaatgccacaaacccacaaaccagttctggttaaagaagttaaaaaaaaaaaaaaaaaaaaactgctttctaatgtgtcctgaagaacagaaatgaggtcacatttaaaatgttggccacctgtgacttttgctgtaagcctttttattttggatcacaatgaattggacattaaataagaagttttaagaccagatccaataaaagaatacatttaggatgtgttttcaaattctgtatataacagtcactttaaaaatagtttcaagttatctagatgcagttccatagcatttggtattcaacacgttctcgtgagagattcctgcagacatcaagacctctggtgatgtggcagcacctggtttttagactagtgaaggatgctgcgtgaggtgtgcccaaatgtttccagaaactagtctggattccctgattacagcgcctctgtgctcttagctttggtggctgctctggctggtcctttcttcccattggtctgctgtcctcgtcttccccactctgcttgcctgggcatcaccatctctctcagcctccacacgagtgttctagtacatgttaggatcctctcctgtaccagtgtccaggtgtaacagacaggatttttactagtctgatttcgggattttttttatgttcataataataaaaatattctcagtattgtttagaaaggatttttttgtgtgtatgtgaaaaaaggaacaaaaatagacttgttttttggtggctgttctatacaaaattgatagttgatcatggatgcacatcactgaggaatattataaaaatcacaaaaaattagtcattttgaaaagatgactctttatattgtcaacaagcaaattgtcctttgacccattagtgtagtgatgccctgaggcctatgctgatgtcaccagtccacggtgtctatacatgtctatgcatcttcatgtatcatgtgtatgttcatctcatcttcatgcactgtgtctatgttcatcttccagtattgtgtgtgtatgtttatcttcatgtattatatgtgtatatttatcttcatgtattgtgtgtatatgtttatcttcaagtattgtacattcatcttccatttgccatttgaaattgagaacagtttgaagttatatataccgactttaagtaaatattagatttgcatagcattggttgaaagttttattttctacagtgttattgttaattattagtacaaatcagaagacaatcagaaacactgtgatagcaacttcagaacattcatacagacaaaatgatgaacagaaaatatttttacctttttttttaactgagcaaagaactgacttaaaaaatctctcttcagcttttcagaaaagccccatatgttttcccccaccccacccgcacaccccagggaacgtttcctatttccttttcgtagtacatataatcgtcttcttggcttcttcagcccacaattttcagtggtgattcctacaaaacactcccactattcttaggttaggtttttagaaataagattttattgtttattgttcgatatacacagcccagttatttatccctactttatttgtgcaccatagtggcacaaatatgatacatacttatttgtgaatcatatccctgtaagtaagacaagaaacacttcctcattctaggtacataatacaccagctttagcttgtaccgatttgtgaggtgttaagattttgaggtagtaatcttggtttaaattcggtttaatgcaaggagttcatgggctctcttatgtggtatttgtagcaacagtctaaagatcttagtagacatttatacagggttcaggaatgagagaggattgccaactcaggatgagttgtagggatatgagcaattaaataatatattacttttgaacacacaatgaaacattcagaccatgttaaaggtatttagtataaaaacatgggactaggagactagagagatgactcggtgataaagagctcttgttgctcttccagaggaccagggttcaactctctgtgcctatatggagagatcacaatagcctctactaccaggagatctggctccctgctctggcttctgggggcagtgggacctgcatgcatgtggtgcacatacatacacactcaagcgcatacatacacagaaataactttttaaaatagacatggagtcagatactaaaaatattttttcttaaaaaccaagctaccagatactaaagttaatacaatacaaattacttagaagttacagtatgccagaacccttagaaataaaaacacttaacaatttagattctagagtattattccttattagtggtgttgttaggttatgctatttaatttgagaatacttagtctctagaggagtacaccctggctttcatccaaaatagtggcctttttcttgcagcagttatttaaactgcgtcctcgtaacatgacaacgtttcctacatttaatctgtaaatagcagagaaaatagtgaagaacaagttgaagtaagtcattcctcatgctgataaaaattgagcatctcgaattttttctattaagagcactttgtacatttaatagttttttaacatcagatctatagacgatgtgtttatgtgtgtgttcgctatcaagcagtggtccaaatttgacttagctgttttgtgtttctccaaccatcatatgcttacagtaattgactgagaagctgttccaggagatgctgtgcagcatggccaagtagttagatgcattgctgagcatccacaggtgttttcatgtggtctttgttgtacccaaagcggcaaggatacaaagtatcaactgtcgataaaattgcatttcacaacaaatagatgctatattgcttgattagcttggtgcagttctaatattttttttttgctttcatatttcagaggagaaaatatatgtgaagatattttgaaatactataaagtgataaatagttctatatttctgtatggtggagatgtttctgacattaagattattgtattgttctgtgttttccagatcattctcataggaaattttaaatgatcatgacttgaaaaaaataatatctgctttctctaaatcgaggcttattgtcagttctaaaattaaattgtagagttttattttgtttaggttttgaaattataatttttagttttaaggaatgaagacctacaactcaggagttactaagaaagttttaagacttgttttttgatgttacatatataaataaatgaatgtgtaataaaaacctgtcatagccatggtgcattgtaccacgccctcctgattttcataatttactaggaatgaaggtaggttggggtgagaaggaaaaaaacatacaccgaggtactccttagaaaaatcattttgataaataaacctacatgccaaattttaagtggttaaatgagcaaagaatatttggagagttgttttaaggtcaaagtttgtaatacatttaatcaagaaaatgtgaaactattctccaggctcctctaaaatctgtgttttgtaacacaagaagagcatttaaaacatcttaattatatttacatgcacaggtctttagtgactatttagagtaagattccttgttagaggaggtttggggagtagttgtttttagaatattttccttttcctttcactgtgggcatgcgtgtgcatatgagtatgtgctaggatgaaatgtgacatactagaatcactcaaggcaggagtagtattaaaggaagatggttgagtgagtgttgcctagcaatgcctgtttacgtacctctttaagcattgactttattgcaggaacaggtttgtgtgggatatctctaggctgacagtgaatagtacctcgcccactgttctgaggagccaacacaacccaacagattgtactccgggacagtctgcatgtaggaatctcattattgaaattaacattgcagttataacatgaatgcctagaggtttcagatgtgccttaatgaatgtaaatggttttcattcagaagttctcattactatcccattgtaaactcttgccaagaggaaccctaagcacccattctttcatttatttatttatttatttatttatttatttatttatttatttttattagatattttctttatatatattttaaatgctatcccgaaagttccctataccctccctccgccctgctcccctacccacacactcctgcttcttggccctagcattcccctgtattggggcatataaagtttgcaataccaaggggcctctcttccctgtgatggccaactaggccatcttctgctacatatgcagctagagatacgagctctgggagtactggttagttcatattgttgttccacctatagggttgcagaccccttcagctccttgggtactttatctagcttctccattgggagccccgtgttccatcttatagatgactatgagcatccacttctgtatttgccaggcactggcatagcctcatatgagacagctataacagggtcccttcagcaaaatctttctggcattgtgcaatagtgtctgggtttggtggctgattatgggatggatcccgggtggggtagtctctggatagtccatcctttcgtcttagctccaaactttgtctctgtaactcctttcatgggtattttgttccctattctaaggaggaatgaagtatccacacgttggtcttccctcttcttgattttcttgtgttttgcaaattgtatcttgggtgttctatgtttctaggctaatatccacttatcagtgagtgcatatctaatgacttcttttgttattgggttacctcactaaggatgatatcctccaggtccatccattcttaaaggatattcaacaatgtgttacctgtgctgaaagaattcagaggcacaaggtgtgactggtgctaggttatttttatgtttcttcgttctgttacacactggcccagtcaaacaccctttgattagtacaagtcataatgatggttttgctttctgttcttgcatttagatacaaacttaaaatggactgttattagagaaattatttaagccttcattctcatagttgtttggaggaattggaaattagtttgaaaaactttcatattaccttcttagtacatacttttaaaaaggcttattcttgctttccctctagattagagaaagtagtcaaaggcatctaatattactaattctcttgtgaaatttattgttctcattatttgtggaaaatattttttccttgaattaaatttttcatgtggacagtcttctgttgtacttgtgtggccctaactgtggctggctgctagtggtttagagaggaaggcatggctaacattcatgtgaccatcttgaaggcagagcagactcctttcatgggtgtgtgggaccttcagaattgtctctggatcatgaaggtgtgattgctgatgtccaggataataggccttcttggaccctatgcttaatgggtgtcattttccccaggatatctactataatttatctgctaccattttatagtggttcagaaatttatgagcaattgaacatctgctatgtaaattagttctatctttatacctgtcctgggaaatactgaaaaatcaccctttacattggttcttcaaatttcttttggactattttttttaatgccatattttataggcaggactctggagaaatataacttagagaaaaaaatatatatatacctttacaatataatgttttctatatatttagggatttgtcagactagcttacaagctgtggtccagattgtccaacagtggttgtctactaacagaacatggaagaatctagtagctgttcagtccacaaggccgggttctcatctggtctccaggatccactggaatctgtaatgggaatgaaggaatggacatgccagcaaaagcagaagcaagcaggccgagagagagagccaccttcctttttctatgtcctttatgtaggctgccagcagaagatgggggcccagagtaaaggtgacttcccaccttaaaaaaatctggattaaagatctatcttcccactgcaagaaaagtttgttttaagaaagaaagaaaggaaggaaggaaggaaggaaggaaggaaggaaggaaggaaggaaggaaggaaggaaggaaggaggaaggaaagaaaagaaagaaagaaagaaagaaagaaagaaagaaagaaagaaagaaagaaagaaagagaagaaagaaaaaaccctcacaggtgtgctcagctgcttgggttttagttaattacagatgtagtctggttgccaaccaagaatagctgttatgtttatattttaaaaacaagaacaacaaaaatgctcttgtaaagcgggtgcaaaggggagcttaatgtccacttattgctctaaaatattttccaaatcatagcaccatagtgaaaaaaatttaagtgatgatcagcaattaaaaacaatgaattcacgaaatctttaggcaattggatagatctggaggatatcatcctgagtgaggtaacccaatcacagaagaacacacaggatatgcactcactgataagcagatattagcccagaaacttagaatacccaagatacaatttgtaaaacacatgaaactcaagaataaggaagaccaaagtgtggatacttcgctccttcttagaatggggaaaaatactcatggaaggagttacagagacaaagttcgaagctgagacagaagaaagaaccatccagagcctgccccaccaggggatccagcccatatacaaccaccaaacccagacactattgcatatgccagcaagattttgctgacaggaccctgacatagctctcttgtgaggctatgccagtgcctggcaaatacagaagtggatgctcacagtcatcttttggatggaacacagtaccctccccgcctcccccgccccccccgcagagctgcgtctctagttgcatatgtagcagaggatggcctagtcagccatcaatgggaggagatgtccttggtcttgtgaagatcatatgccccagtacaggggaatgccagggccaggaatcaggagtgggtgagttggggagcagggcgggggaggttatagggggctttggggatagcatttgaaatgtgaatgaagaaaatatctaataaaaaagagtttgagaactagaggcagctaagggatgctacgagagatagagacagtcttccccaaagaagagcaccccagctgattatctgatatggtcagcactgagaacatactcatgcacagggctgggaatattgtagctatgtatttggggacgtatatgtatgtgtatacacatacacacacacatataaagggaaaagaatgaaattgaagaacaaagagtggggtagacacttgggagggtttggaggtaggaaagcaaagggggaaatggtataattatggtctcaaaaaaaaaacctaaaaaattatgaagcttgtattatctagagaaaccaggtatagaagatacttttagcctaaggaatgctcaactactgggcttggatattttcaacaccaattgacttctagttttatgtgaacaaagacacagaggaatctaagttcctgaaaataccagggttctttgaagcaagagggttagagatgccgtgggatgtgttgtgaggatcagcccagccgggagctctgtgctgaggtgatcagcgactggtgtggaaatagacccattaatactctccatgaactgtgagttccacattgacaccttcaattaggctaatggaattaatcaaatgatcagtactgaattgaattccttttttatgtgcagactatcagagttgctaagctgactcagtgataggaagcaggtggagtttctgtctccagcactatctagctgtctgcatagtaattgtatggcatcacaactaagaataaagtgagggccagagagaagggtcagggggtaaagatgcttgctgccaagcctgacatcctgttggattacctataagacacatggtggaagcagagagctgacttttgcaagttgtcctttgactctccaaagtgcaccacaggcctctcaaaggtacacactccaaagcactcgagcacacacacacacacacacacacacacagagaaagagagagagagagagaaagagacggacagacagacagagtaaataaatgaaagtaaagaaaccacaaaacaatacatgagtgagaacaattttagatcctttcttaagtttttaatcttctctaaagcacttttgtttgtctcctaattgactttggttcgtcctaggcactattttaggttggaaattgtttgtggtctctggtatttcagggaaatgggtgtggctcttataaaggtgtgtgtgttccccattacctggctcccatcgtctaggggtgatggagttttctctgcactgtattctcctacagtgtgaaccacccaatgctttgcacgcttgctatatcagtgccatgtgtagaagttgtaaccaatttctgggtctgtatgttactatggaatatttcctttataattctataactgcattagcacagttaatcgcaagcaagtggaaagtgcaataacttctgttgctaattcttgtgtattgtttctaaaataatgcatttagactttctttaggattgttattttttaatagctattgtgtttaagaattattataccatgaaaattaataaaagtcaatcaagcttagggaacagttgagtattgtggtagagtacactgtgttgattttgcataattaaaatgttttttaaagagctagggaaaaaaaaagacttgctgttttccagtgattaaacgtagtttttctaatgcttaacatctaagatatctcctttaatcctctaaaataaatatttttattataaagggttaaatcttattcatatgaagttatttctactgtgagactttgcatggcaggttgtgtatgcacctacttagatatatatcttgcttttttttcatctttaaatgcctattcaaagatgtatctgagtaggttcacgaatatgataactttttcatttaagcaggatagaatttgtagaaaattaaacattttttaaagaaaaatttggtcatgagatacaagtgaggagactctagagcagtggttctcatcctccctgatgccgagaccccttcatgctgctcctcatggcgtggtaccccaactgtaaaccttcctgatgccgagaccccttcatgctgctcctcatggcctggtaccccaactgtaaaccttcctgatgccgagaccccttcatgctgctcctcatggcctggtaccccaactgtaaaccttcctgatgccgagaccccttcatgctgctcctcatggcctggtaccccaactgtaaaccttcctgatgctgagaccccttcatgctgctcctcatggcctggtaccccaactgtaaaccttcctgatgccgagaccctttcatattgctcctcatggcgtggtaccccaactgtaaaattatttttgatgcaacttcctaactgtaattttgctactgttatgaattgtagttaaacatttgaaatgcatggtatctgatatggagaagggtcatttgaccccaaggggtcatgacccacaggttgagaaccactgctctagcgtcatcagacgatgcagacagataaggttgggagaatattttaccttggctgcattgacctgtttgggcaggaagaaatgggattagagaatgaggaacaacttgtgctgagagaatgaggtcaccttgtacacaacggagaaaatgacagaaaagtgtaacaatcacaggagcggaagaacaggatgttaaccacagcttttagatgagccagcagagagggtgcacacacacaattactgtcagcgagagagaacgaacacatcctggtaagagagcatcgaagggcttacagactgaaggcagtgtaaaatctagtgaaaagagattctctggctagtcaggtaggctgaagcctgcctctgtctcagagtgtaatgttcgataaaagaaaattcacaccttcttcattttaaggttccagtggacaccacacaggcacaggcatgccagtattttagaaataagaggaagaccccacctgtttaggtttttttttgtgtgtgtgtatgtaagtgtgtgtgtgtgtgtgtgtgtgtgtgagagagagagagagagagagagagagagagagagagtgagaaagagagagagtgatgattttaggtctggaaatagtgactgaatcatcataactatgacagaggaaacagaagggttatagatttatttaattggaacaacattttaaaataagacactcaggagacagattagagagtcacaaggcttttgatttgatggctggggaacacagagtttattaatttggctgtaatagtcagcattgttctaatcagattaacattattgtgcattcaatactttgaagaaatatacaaatgctgaagctgtgtataagatttttgttggcggtgctgctgttgctgattattcagcctactctcggccttggagaagaaaggggttgtaaacagaaggaaaatgcctgggccagatgactcatgtgaggtcagacagggctttctagaacactgagggggcccgaaagcctagaaatggatggtgtaaggaggcagaaggaaagaaagacaaagagacgttgcttgacagtgggtcctgaagcacggtagacgtgaggacatgacaacaccatcacttaaagttggctgtgtaacctcgtgcaagtctctcagtctctgggctccattttgctgtgctcttcttggatcagagagaattcgaaagtctagggatatattccaggcagtgccttaaaggactagccactgatgctcacagagaatggatggacaccaggaattatagaacatttatttcaatagaaatgggtctaagcgcatctatgctaatcagctttataaaccaaaacaaacagtgtagagtttacttataaattctaatgtgcttctcaaaaaagattccgtggggtatataaaatggatggtttatattagatctgttgatgtagacaggcagaagcttatctcattgaagatatgatatacgaaacagctccttgttgcttcaatgatcatttggaatggctcgtaactagaagacagttttggcttctttaagggcactatctatttaatccctattgaaagcaggacattttaatttgtagctctaagtggatattcactttatgtcttaatgggaggccacttaaaagttaagtttaaaaatgttcgtgcaattgattctctgagcatgatggtttaactgcctttatttttgtaaaattagatggatgaataatcttggctaatattcacactttgaaatcctaaattgtaggcactgacatgctgtgcattaaaaggggtcttatgcaacccttgtaccctaagaatatcatacatgtattataagcatgataggaaataaattcacattgagttggacagaaatttaacatttttatttcctctagaaaaaaaaaatctagatttatgtcaagcctttgcctgaattttgttgtttcaatttccagaaatgtgagaggaaatcaaagatctccatccttagaagcatgttttctaactttacagagaatgaggctgaaacaggggtgactcccttcccacacagagatgcaaaggcaggagcctaatgtagaaccaaggcagtggagaggggctcagtggatatgctgtgtagcccctttagctcagactacatttttaataattagaataggaataagggggggatccttcaggcaatgagctggtctattctatgcaaagaattttaaaccaggagtctgggggctggagcaaagaaaacacatggtgggactcgtgtctctagctgcacacgtagcagaggatggcctagtcagtcatcaatgggaggagaagcccttgatcttgtgaaggttctatgccccagtgcaggggaatgtcagggccaggaagccggagtgggtgggttggggagcagggtgaggcgggagaggaaaataggaaaggggtaaacatttgaaatataaataaaatatctaataagaaaaaaaaaaaaaaagagcacagactgctcttccagaggtcctgaattcgattcccagcaactacatggtcgcatacaatcatctgtaatgggatctgatgtcctcttctggtgtgtctgaagacagtgacagtgtactcctataaaataaataaatctttaaacaaaacaaaacaaaaaacaggaggctgagctgagagaggcttcaccgcttgagccatgtcccttgcctcccccagctagtgccatccccctccccagctagtgccatcccccccccagctagtgccatccccccccctccccagcgagtgcttacaattagcagaatttcaggtttccatttgggaaacaaaccaaggggcctctaaaaatggtcttggaatacagcatagtgcagttatctgtctgtgaacttgtccttggggtgatggaacccatagtactgctctatccctgacacttcttaccctcatccagcagtattgcctgatctcccaactgttcaccaatacatccagtgtgataacagagcccactaatgctacttcttggtttgactcgaactcattcactcaccatcagcatcaccaccttcatgggcctttgtctacaaaatgctgtggtgtctctttatattttgcatgcttaacataaatcctacagtaaatacagttttaaacacatggcaatagcatcttaagacaagttgtgtgtgtatgtgatggacaattactcatgttcttttatggaaacaatatctcttcctcaagatagttagttttaagaatgaattatttggactgggaatggcggtgcatgcctgtaatcccatcacttgggagggaggcagaggcaggcagagctctgtgggtttgaggccagcctgatctccagggcaagttacaggacagccagggctctgttactcagagaaactgccttggaaaacaaaataaacagacaaagaaaaagaatggattatttggggactggggagatgactcagccg

SEQ ID NO: 680 - DNA, 4537 bp, Mus musculus
cgcgcccgccgccgcctcttcatgggcaacctgctcggcggggtcagcttccgcgagcccaccaccgtggaggactgcgactccacctggcagaccgattcggagcccgagcccgagcagccggggccggcaggcggtggcgagggccagcagcacgacgagccggagcagcccaagcaacctcccgagagagccggagggcggccccgcgccagccccgtgcccgaggaccacgccgaggcggcgggcgcggagcaggtacgcggccccgggacccacgcgcagctgggtgatgcgaagggcggcgagtccacggaaggaaatgccaaaccaaagagaagcttctacgccgcgagagatctgtacaagtaccgacatcagtacccaaacttcaaagatatccgatatcaaaatgacttgagcaaccttcgcttttataagaacaaaattccatttaagccggatggtgtttacattgaagaggttctaaataagtggaaaggggactacgagaagctggagcacaaccacacgtacatccaatggtctcagcacaactatttaagaattacgcgaattcttaaaagccttggcgagcttggatacgagagttttaaatctcctctggtaaaattcattcttcacgaggctctagtggagaatactattcccaatattaagcagagtgctctggagtactttgtttatacaattagagacaggagagagaggagaaagctcctgcgatttgcccagaaacattacacaccatcagagaatttcatctgggggccacctaagaaagaactgccagagcgaagcaaagcccagaaaaccccgactctgcccgcgtcgggctccaatggtcaaacttctacacacaagaaatccaaggactccaaaatttccccaggagctagtcacgtaaatagcaaatcagtggaagaaaaaaagggggcatcaagagagcctggggaggaggcggacaagccgagcccagagcctggcagtggagatcccaagccaagaaacacagagaaagacagtgctgctgaccaatctgattctccacccgagaaaacagttcctgataccgcaggaaaaggggaatgtccaacttcttctgaaaaagatggagaaggggaagaccagagcaaagactctgaaaatcctgaaaatgccggttgtcatgctgaggtagtggcacagcaaaatgccacaaacccacaaaccagttctggttaaagaagttaaaaaaaaaaaaaaaaaaaaactgctttctaatgtgtcctgaagaacagaaatgaggtcacatttaaaatgttggccacctgtgacttttgctgtaagcctttttattttggatcacaatgaattggacattaaataagaagttttaagaccagatccaataaaagaatacatttaggatgtgttttcaaattctgtatataacagtcactttaaaaatagtttcaagttatctagatgcagttccatagcatttggtattcaacacgttctcgtgagagattcctgcagacatcaagacctctggtgatgtggcagcacctggtttttagactagtgaaggatgctgcgtgaggtgtgcccaaatgtttccagaaactagtctggattccctgattacagcgcctctgtgctcttagctttggtggctgctctggctggtcctttcttcccattggtctgctgtcctcgtcttccccactctgcttgcctgggcatcaccatctctctcagcctccacacgagtgttctagtacatgttaggatcctctcctgtaccagtgtccaggtgtaacagacaggatttttactagtctgatttcgggattttttttatgttcataataataaaaatattctcagtattgtttagaaaggatttttttgtgtgtatgtgaaaaaaggaacaaaaatagacttgttttttggtggctgttctatacaaaattgatagttgatcatggatgcacatcactgaggaatattataaaaatcacaaaaaattagtcattttgaaaagatgactctttatattgtcaacaagcaaattgtcctttgacccattagtgtagtgatgccctgaggcctatgctgatgtcaccagtccacggtgtctatacatgtctatgcatcttcatgtatcatgtgtatgttcatctcatcttcatgcactgtgtctatgttcatcttccagtattgtgtgtgtatgtttatcttcatgtattatatgtgtatatttatcttcatgtattgtgtgtatatgtttatcttcaagtattgtacattcatcttccatttgccatttgaaattgagaacagtttgaagttatatataccgactttaagtaaatattagatttgcatagcattggttgaaagttttattttctacagtgttattgttaattattagtacaaatcagaagacaatcagaaacactgtgatagcaacttcagaacattcatacagacaaaatgatgaacagaaaatatttttacctttttttttaactgagcaaagaactgacttaaaaaatctctcttcagcttttcagaaaagccccatatgttttcccccaccccacccgcacaccccagggaacgtttcctatttccttttcgtagtacatataatcgtcttcttggcttcttcagcccacaattttcagtggtgattcctacaaaacactcccactattcttaggttaggtttttagaaataagattttattgtttattgttcgatatacacagcccagttatttatccctactttatttgtgcaccatagtggcacaaatatgatacatacttatttgtgaatcatatccctgtaagtaagacaagaaacacttcctcattctaggtacataatacaccagctttagcttgtaccgatttgtgaggtgttaagattttgaggtagtaatcttggtttaaattcggtttaatgcaaggagttcatgggctctcttatgtggtatttgtagcaacagtctaaagatcttagtagacatttatacagggttcaggaatgagagaggattgccaactcaggatgagttgtagggatatgagcaattaaataatatattacttttgaacacacaatgaaacattcagaccatgttaaaggtatttagtataaaaacatgggactaggagactagagagatgactcggtgataaagagctcttgttgctcttccagaggaccagggttcaactctctgtgcctatatggagagatcacaatagcctctactaccaggagatctggctccctgctctggcttctgggggcagtgggacctgcatgcatgtggtgcacatacatacacactcaagcgcatacatacacagaaataactttttaaaatagacatggagtcagatactaaaaatattttttcttaaaaaccaagctaccagatactaaagttaatacaatacaaattacttagaagttacagtatgccagaacccttagaaataaaaacacttaacaatttagattctagagtattattccttattagtggtgttgttaggttatgctatttaatttgagaatacttagtctctagaggagtacaccctggctttcatccaaaatagtggcctttttcttgcagcagttatttaaactgcgtcctcgtaacatgacaacgtttcctacatttaatctgtaaatagcagagaaaatagtgaagaacaagttgaagtaagtcattcctcatgctgataaaaattgagcatctcgaattttttctattaagagcactttgtacatttaatagttttttaacatcagatctatagacgatgtgtttatgtgtgtgttcgctatcaagcagtggtccaaatttgacttagctgttttgtgtttctccaaccatcatatgcttacagtaattgactgagaagctgttccaggagatgctgtgcagcatggccaagtagttagatgcattgctgagcatccacaggtgttttcatgtggtctttgttgtacccaaagcggcaaggatacaaagtatcaactgtcgataaaattgcatttcacaacaaatagatgctatattgcttgattagcttggtgcagttctaatattttttttttgctttcatatttcagaggagaaaatatatgtgaagatattttgaaatactataaagtgataaatagttctatatttctgtatggtggagatgtttctgacattaagattattgtattgttctgtgttttccagatcattctcataggaaattttaaatgatcatgacttgaaaaaaataatatctgctttctctaaatcgaggcttattgtcagttctaaaattaaattgtagagttttattttgtttaggttttgaaattataatttttagttttaaggaatgaagacctacaactcaggagttactaagaaagttttaagacttgttttttgatgttacatatataaataaatgaatgtgtaataaaaacctgtcatagcca

SEQ ID NO: 681 - protein, 412 aa, Mus musculus
RARRRLFMGNLLGGVSFREPTTVEDCDSTWQTDSEPEPEQPGPAGGGEGQQHDEPEQPKQPPERAGGRPRDVPEDHAEAAGAEQVRGPGTHAQLGDAKGGESTEGNAKPKRSFYAARDLYKYRHQYPNFKDIRYQNDLSNLRFYKNKIPFKPDGVYIEEVLNKWKGDYEKLEHNHTYIQWSQHNYLRITRILKSLGELGYESFKSPLVKFILHEALVENTIPNIKQSALEYFVYTIRDRRERRKLLRFAQKHYTPSENFIWGPPKKELPERSKAQKTPTLPASGSNGQTSTHKKSKDSKISPGASHVNSKSVEEKKGASREPGEEADKPSPEPGSGDPKPRNTEKDSAADQSDSPPEKTVPDTAGKGECPTSSEKDGEGEDQSKDSENPENAGCHAEVVAQQNATNPQTSSG

SEQ ID NO: 682 - DNA, 36871 bp, Homo sapiens
ccctccaaaaaaagacttgtatatagaacacacaaggaactctcaacattgaacaataaggaaacaatgcaattttcaaaatgaacaaaatatctgaagcaacatttttaccaggggaaatatacagatggacaaatagataactatataaaaagatattccactattattagccatttatggaaatgcaaattgtaattagaatactcccattgtttgttcattcatctaatttattagaaagaatttaagaagaacctaatatatatcacttcttataaaaggttctgagaaagaaaaatatcaatgccattgcaatttgataatatttattagaggtaatagttgaggtaacaatggggtgtctttaagaactgggaaatatggttttcctctgagaactaaattttgattcagcattaaatgcattcaggttaaaaagagaagttaccaccgcaagaatggctgcaaggcttccaaggcagcctgtgccctgatcacaatattcacatataagaagaagactgaaaatcagactgccaatcatcaaaaatcaaaatacttccaggtggttgataagtagtcatgatacccaaacccccagcactgcttccctctcccagacactctggaactccccgcaatccagcagttggcagaacagggagcctccagcagtgccccctcctgctggcattctgcttgactggagcccatgacgtatgggttattatacatttagaatatcctccctgaatcatccactcaagtagtttaatcatttatgtatcctcagaaaaggcagcatctaagaggcacagtgtgcccaatagaacattttctagggtagagggtacactgctatgccccccatcatacacaaaaggaggctgcagactttgggaccttaagatcttttaacagttaaatcccatagcatctcctgttctgatttcaggctcaccaagctgggtgggcagacactggcatgcactaggcttactagtttacagttgccattgtgaattaagattggcattctggttttacagggtagtctcttgagagctcagccccagagcaggttagtgtgagtgagcatcctcaagtccgaaggcagcctctctaccctgctcaattctccgtggggaatgccacccagttagaggtgggaggagccagccagtctctccaattaacccactctgcttatacatgcttatccttgggaatgtctactatcatcagtagttattgaacgttagttttctacattaatgcatcatgtcattgtctttaagcagcgatgaagcttgtaacagttgtttctatcttgtctaaagctcattttaacatcaagaagcaatcccttacctgcagggctgggactagagtgaagtgagtaagatggttagggtgcaaaatttaaggaggcattcactctcagggtcctgctagtgccctgagcctattttaggtcagcgttgttgtgtcacctgtatctccagctccagtgaagaagggaagaaagtcactggtgatgaaatcagctgagcttatggaaggtaagcaggagaaccaagttcttgacctttctcttttctcctttttgtcactaacattcttgaaaaaataatatgttctataccagcagactcttcctccttttcctattcaaattttttatctattttcaccattttacagaaattgctctcactaaggtcacaatatgcaaaatttgatggcctcattttagcttttttctaaatggtatctcctcagcttttgacattgaccttgggaaaaggtttgtgtctcgttcaccatatttttatcagcatctatcacagatcacagcgattggctcctagaaagcactaagtacatttttattgaaaaaataaataacttattttattgacaaaggaaagaaaatcattcctcttttgttgtgttcttacagcattttgttcatgggatcttgtgctgtcattcatatttactcatctgtgttcccaaggattgagagcaacaactgtgtgttgtagttctttgtatcccagcctaacaaagggcctgacatataacaggtgctcgataaaagtttgtggaataaatacaattggtgactaatgacacaattatgatgttctagttactccaatgatttgtgataaatcatttcaaaatacagtggctgatatgcttgggctgtgtctccacccaaatctcatcttgaattgtagctcccacaattcccacatgttgtgcgagggatctggtgggagataattgaattagggagtggtttccccatactgttctcatggtagtgaataagtctcacgagatctgatggttttatatggggtttgccctttcacttagctctcattctctcgtctgctgccatgtaagatgtgccttttgccttccaccatgattgtgaagtctcaccagccacgtggaactgtgagtccactaaacctctttttctttataaattacccagtctcaggtatgtctttatcagcagcatgaaaatggactaatatagtgggttaaaacaataatcatttattttctctcactttttctgttggtcaggaatctaggaagagctaggctggatagctcacactgcttaagtgatggaagggaggggccattgatgtggttgcaggcagatgtcagttagaactgcaggaatctgaaggcttgactggggctgcagggaggatcctcttccaaagtggcttactctcactgtcagcaagttagtgctgtctgttggcaggggagctctgtccctctccttgtgagcctctccacaggcctgcttgagtgtcctcatgacatggcaactggcttcccctagagtaagcaatcccaaggtggaagctgtgatgccttttatgacctagccttagaagttacatgccgttacatctgccacattttactggtcacataggacacgcattcagtatgggaggggactgaatatcaggaagtgaagatcattagggctgacttggaaactgggtacaacagatgattggccatgaaagaaaagttttgaattaaggcaaatctattctccaggcacacttctaaaggtaattgtaagctatgaagcctggaagaaacaattgttgcttgataggatgtcccctatctttgaagagatgggcatctggattaattgtatttctccctgacacctatagccatacctcagttctctcctaatgaagttgctgacagtctataaggaattagtctttacccatccccaaaacagcacacccatctcatggaaggccagaccagagtctggggttggtttaggcttaagcagcctggacttttctttgggcaggaacatgatttggttcctctggtgcactgagactgcaattaggttttaggataaagtgccaaatgcatctaccggtatcccctgtggtatgtcccaagacccagtgacagcaggacttctggttgtgatgtatcctcagaatcatctgcactcagaggagcctggaggaaacccatccctgccaactgcccttggggtccttttataagataaagagaaggcagaaactccaaggaaggctgcaggaaacccattaagaatcacatattccttggctacagatttaatgacaagtgcccttctgagccaggggagagtccagtgtgtttactcatccattttttattccgttacttgtaatgcttcagaacagataaatttcaaggatcaagaataaaaattaaataaaataggaatacatactcaatataataattgggaaaaaaagattgtggaatacatatctatttttattcagggaaaataagcaataattttggagggtaggggcaaaatttcttctttcttttcttttttgaagtcaaatatgttatatctcatagtatttatactattttttatatcaaaatatggtctaaatgctgctgaattatccaaataagaactctaaacattgtatttgaacacgtcattatttttaaaatttaaatatggccctatttttagtctacaggctgaatttatgcaaatgatgattaactgaattcttatattaatttcaacttagctccactgatatgttattatgcactaattcaacactcatacattctatggaccttttacctttgctttattaacaactttagtgcgattggtaaaaaaaagtctttaagctgtgaaaatactcagtatcagttatgagtttagagttggcctttgaattgtaaactatttcttaggaataaattagttctgtaaagttaaacattctctttcagcaaaccataatgcatgaattctagaatgtacaagtttttacatttaaatatctctgaaataagatgcatttgagaataaatgattcttaggttccatgaaatgcaatacgttattgctttggtgtattagcaatgctccagtggcctggaaaaggctgcaaaggcacctgacacatgcagccaggtccgtcatctacttcctatctgttactttaccaagaaataataaaaccaacaaaaagaactaccagaaataatgaaaacagggttgcttttgatgaaagaggctaaagattggtttttgaaaaatgaaccaatatccaaaaaccttaaatcaaatgccctggcctgctttgtcccttacacacctcacgcacctgttctctggccactctggccgtaggggctaatcttgttcttgcctggggcctttgtccatgccaatatctttgccaggaatgctcttctctctgctctttgtcaggctaatttctctcctgtctttcatttcttcccttatatgtcacctccccagagaaattctctgactcccagagtaaagccaaaaccccatgatctcactttgcctgcattatacttacaatttgtaattattattatttttgaatgtattaattgctgtcttccttaatatattcctgaccctaggtcaggagctctccctagggcaaggtggcttcccatgatggatgctgatgaaaaaaattaagtgagaataacaaaaatgaatgaacgaacaaacaaataaacaaccccagcagtacacacacaacatatcctgctattttttgatacatttgatatataagatttggaagaccacacgggttcagaagagtcttggcagcagtttaggtgccagtgagggaattcaattcatttgttaccaatatttgatagtaaaatatttgaccctttatatctataataaaaaatgcaggctgggcgcggtggctcacacctgtaatcccagcactttgggaggccgaactgtgtggatcacctgaggtcagggtttcaagaccagcctggccaacatggcaaaaccccgtctctgctaaaaatacaaaaattagccaggcatggtggcgcatgcctgtagtctcagatacttgggaggctgaggcaggagaatcacttgaacccaggaggcggaggttgcagtgagctgagattgagccattgcactccagcctgggtgacagagcgagactccatctcaaaagaaaaaaaaatgcagaaatctctttgctactacaagttcagtttagttgaaattagacgtatgtgtgtttatttctgtatcccatttaaaacaaccttgaaagctttgtttttggtatacaggaattgctttaattgctggtcatttctttgagaagaataagaagaaagaatattaaggaagaggtaatggacagcagagatatttttgcaacaagccttagaaagataaaagaaacatgcagaaaaacactgaattgcacaattgcattgtccaaaaagaaagaaagatttttgtaagaggggctatggtgatgttagtggttggcaaggatacaggagaagatatctcagaatcatacaaaaagtatagaatatttgcagggaggaaggaggaaaaaatattttgttttcataaattataacctattataaactcctaccttaaggaaggaagatcctgggaaatttccagcaagtcttgtctggtcaggaactctatgtgaggttgtacatgctgtgtcctgcatgaagagttcagttaaggtggtgggagggaactccagttcaggccctgctcactaagccctggagcaaaggtgtcttattctcaagaacacaaagttctcatgggtgctagcagaggcccttggctacagtcaatggaaaataatattacagcatgttactactaatttcagatgtttctttagagagccatctttattatttttaatttttaaaataatactatttttttttcctccaaagatttcaggttcctgtgaggtactgaggagttaactcctgaggttggggaaaatggcccttgatctgccctttccttttatttgaaagactctcaaattatgtaataataaacctttgttaatgtccctaaaacaggattgactataaaagacaattcaagatatgccagatacatttgggtttcatccaaaaaagtttagttcctgaagcaccagtttctttgtcctttgtaaaatggcctcacccttaaaggatttcataacgaagttgaaaacagagttatattgaagcatggctatagcatctgcttaatttagagcagattctatttacagggagtcagaaactatattatagtccattgtgataatagtttctccttgttccatacatgtgtatattactgttgaattatatgttctttaaagacatattgaatgaatcatcattacagctaacatatattgataaattaatagatgcctggcactgagctaagtgatgatttttatatgaagcaaaggtacccttctttactgttgatgcaggaatgttaaatactctgcaaggcagggataatgaaaaaagtttaggtattcgagaaggataattcctgtgtatagaagcttgggatgacagaacttcagcattaacttgtaaaaataacacatagattgggcacaatgtggtcgtgcttattgctctaaacttaaaattgattaaatattatataaggttggtgttacgcttcatgtaaaattatgttctttagaaaatatattgcaaaatctggcatatcatctatggtcctataaaaattgacacatttttcaaaaggtggtgtaaaagggaaggatttaattgcagtagttacttaaatgtttatatgcacaaacacagatacttctcaccattccatcatctactgatgtataacaaactactacaaaatttagtgacctaaagcaacagccattttattgcatttcactcttctgtgggtcagaaatctgagcagggctttgctgggtagtccctttattccaagtagggtcgatggaggtcactgaaaggtattcagatggtggatgggttggtctggaggattcaataaaaaaaaaaaaacaaaaacgtggaatccagcaggggatactggaaggtaggcctcagctggtaccatgaccagaggatgaccagaggccacacacaagtggcctttctaggagtatggcagtctcaagctagctgaactttttacatggcagcatggggctaacagagagaatattccaagagacccagtggaaaatgcaaggttccttatggcttaacttagaaaatcctggactatcacttctttcatattctatagttaagcaagtcactgaggccagctccttcaagagtaaggaataagactacttctcaatgggaagagagcaaagaacatgtggccaactttaatctacatacacctaaaccaacagatggagcgcctgggacacaacaactatccttagactttccacatcaacaatctcggaacacttaaggctggatggacaatatctacttctgcaatgtgttccggtcttctaccaacggaaaatcgaattcccagctttgagcagttggattcctgtggtatgtggctgccccacatcttcttctgctaagccattataatcaaaaagtattttttttggcggggggtgggggcaatggagtctcactctgtcgcccaggctggagtgcagtggcctgatctcagctcactgcaacctccacctcccgcgttcaagtgattctcgtgcctcagcctcccaagtagctgggattacaggcgcccgccaccaagccaggctaatttttatatttttttgtggagatgaggtttcgtcatgttggccaggctggtcttgaacatctgacctcaggtgatctgcccgcctcggcctcccaaagttctgggattacaggcgtgagccaccgcacccggccccaaaagtctttttgtgcaccccgtgtctatttcttattagtttcagagcttttcccagtcataggatcacagaaggtcagagctggaagggctcccagagatctggtttcattttacaaatgaggaagtttaggttcatgtgacctacttaaagtcagaaactgattagtgacagagctacagcctagatgtcttgttgcagtgcatgaagagcttaggtaatcctgatttatccatggaataggcagctggtttacctgattcttcccttagaaacagtccatctaacatgatttggcttcctacttcatcatgaaacatttgaaaagaaactattcattccaagttcaacagtttaatcttcaaatatctagctcatctttcttagtccatatttaacaaatgtttactgagcatccaccaagttgacagcactgtaaatacagacacactttcagacgggggctgcctgcaaagaggcttcccttctagttagaaagccagaagacacattttacaacagtcacttttctctgggtcacatatttgataatactaccttatctttacgtacttctataggcttatgcctgtaatcccagctattgggaggctgaggcaggagaattgcttgaaaccaggaggcggaggttgcagtgagccgagatcgcgcctctgcactgcagcctgggcaacagagggagactctgtctcaaaaagaaagaaaagaaagaacagaacaacagaacagaacagaacagaacagaacagaacagaacagaacagaacagaacagaaaaaagaaagaacttccctaacacagttctccctcctcctttcatttgcagaacagaccacagggccgaggcttcttccattagaaacagcccatctgttctactgattctgagatttttgcctacacggagcaccaatttgtagtgggtgtaaggttacccgcaaatcaatgtgatggtccagttgttactgttccttttgtttcacgagcgattgctcattagatgaggtgactgatagctctgactttttctagaccacaaggactctaggtggctgccctaagtacagttgtggcagctgggatttcctgtttatatggtgcccggcaccatcagcttttgtcctctgctgcagctaaagtgtcttcctcctggaccagggagagggggagggggtgtggacaggacccgcctgctgacggtgacacctcttcgacaccacgtccacgccagtcctcagctccaggagctgggcgggatccctcatcccgctcagctgggagatgccccgggagggcgtcccccggctccgggcggcgagggtagtagccgaccccaatccactccgggggccgccgggggccgcgtgaaggcaggtgttccggggagaaacgtggaagggaggcgcggcctggggccggtggcgctcggctgggggccgcagttggctcccctgggggctctgggcggcggcagctcccgcctgtggggaggagaaggagccggatgggcgggttcaggcgcgcgcggcggcggtcccggggccgccggctcctccccgcgagggtgcctgtccgccgctcgccgcgctgaggcagtgcggggcgggcgcgcctaggctgccgcccagcgccctcgccgcggccatgcccgggccctagagcgcctgccgcagcttgcgccccgcagccccgcagccccgcgcccgccgccgcctcttcaatgggcaacctgctcggcggggtcagcttccgcgagcccaccaccgtggaggactgcgactccacctggcagaccgactcggagcccgagcccgaagaaccagggccgggcggcggcagcgagggcccggggcaggagtccgagcagcccgcgcagcccccggagcaagccggcgggcggcccggcgccagccccgcgccggacgaggacgccgaggcggcgggcgccgagcaggtacgcggcccagcggtggcctcgggtcgggctggggcgccccgacaccccagaggggcaagtgccaagccgccctcgcgctcggaggccaggggcgccaggtggctgctcgccgctgcgacccgacccctccgcgccgcggctgacctgtctcccggtggagcccgggggcctgcaggagcccaaagcgccggaccctcccactgccggcctggggcctggccgagggcacggcgaggaagtccctcaaggcagaacccaacttgaatgggtgttttctttgcctctgcagagcagctggattatgcgaaggtggggtgggaggaacctgtctaaaaatagaggattttgacaacccctctagtgtgtgttattggtaaaaaaaaaaaaaaaaaaaaaaaaaaaaaaattactcagaataaggtggggctacaagtgcaagcagccagcgctctcccctacagtggggtctaagccgtcagaagtgtaggccctcatctgaagttcatacgtcactgttctgcccaactcaggcctttcaacctaggattcagggcattcttcacgaatcttatttcaccagaagacttgttgatccaactgtgtttgaactgtttgactaatacagcttggaggagaggttagtcaagagataagccccttaacctctgatggactgaaaataatcaggaactttaaaaaggaggaaatatgtagccgaccccctgaagaagtgtgcatcctggaggtggttcaggtttgccgctccacattaggcccttctctttatcagctaggggcgatggagattgggaaaatggagcccaaagtccaatgtgaccacagggttttgggggaatcataacctaaatattacagctaacaccgcctcagccatcttgatgatcaattctatttaggtaaggaggaaatcataaagtcttagtgcaggctctgtgttaaacgtgttatttaaatgaactacaattttggggtgggtgtttgctgtgtggtctccattttagagaaaactgaggcttagagagaaaggaaaacttgcccaagatcactgagggagaggatgatgcaaacccaagtctatctatcactgatatcagcgccttggacctgtggaattctgaatttccatctgcccctgtgtctggtttgccgctgttgttttgcattgctaattcaatcttattaaattattagatgctgcattctcatgtttttcccttacgtttgtctcccaattaagtaacctcctacagaaatttggaatatcaaaaaacaccagctaagattcaatccaactaaccaggtccatctatataaaacattttaataatgttcagtcagttaactgcaaccccagtaactagtagactacaccagccctccctattcccttttaatgattaatttttcttgttagtatcaccatctgacttccccaaaaaatctgcttttcaattttgccttttgactgccaaccctatttgttgtctattcctcagagtcaatccacttgcaggtaatactggagctacttttaaagcgtatcccagactgactccttcacaccacttccattgcatcatcctagtccctctgaatactgaacaaatgatggtgacattaaccaagacagggaagtctagggagaatgcagctatggaggttaaatcaacgattctcttgagtttgatatcctattacacatccaagtagagttgttgggtagttaatcatttgttgggtagttaaattacatctatgaatggagacagtccaggactagagtcctcagcatctgagatcaatggtatttaaaggcatgggaagataaggggttatcaaggagtgatgacgactgaggaccttaggcacccctccatttagagggtatgaagaggaggaggagccaaaaaaggaggctgacaaggggagcccaatgagacagaaagtaaactaagaaagttatagtagcctgtaagccaaatactgacagtgtttcaggaaggagggatgctttaattggcccagttctgttgggaggtcacctgaggtgaacactaagaaatggtttggcaagatggagacttattggtgaagttcacaagaactattttgttggagtgctgaggacaaaagcctgattgaggtgggtcaggggaaaatggggaaagaaaagaaggaaacaaagtatgggcaattctttggtggtgatttgctataaaaaaggagtagatatatggatctgtaattgatggtaggcttgggtcaaggaatgttttgtatgtttattttaagattaaagatactacagcatgtttgtttgagatcgagaagagagggaaattttgatgatccaggaaagaggaacaatattgaacaacagaatccttgtctgagcaggtgaaaggggtctgggtagagagtccaaagggaataggggttggaagagcaggagcagatgctggcaggacacagacattcttatgataatcctgagaaataggtagggcttgagtcattatctttatttcagagatgataaaactaagattcagctaaatgatttgcttaaggcctcacaaatacaagtaagcagcgttcagattgctagtcttctgactccaagtcttgggctactgatactacaccaaggtttccatatatccttcattttttagtgtgactgagattgattcagacctggacttgggacccagagcctgggattcttgttcttgcactgtcactggactctgggtggtgtgcaacttctctaagcccctgatatcttgtttctaagatggaaacacttattaactgtcaatcaggtgtgttttaagaatcaaatgaaataatgccttttgactgtcaaccctgtttgttgtctattcgctatatatgtaagtgctttgtaaatggagagtgccttctatacaaatgtaggatgatgattcatatggttgtatctcaggctaaatagattcagaaacttgctaggcagagctattttgaaacgtgtggcaaggaccagaattcaagcttttccttgcttatgtaacatgacagcgtaactaatgttaagcatcagaagatttgatgttgaagtaactcggtacttgtagtaatagtgagaatcacaccacttcaaaaatgtgtgaaaattacttagaggatgccaatctgtcaacacagatggaggacaggggttgaggagaaaagaatttggggcaaagcttttaatgactcttaaaggtctaaagtttttctttttcatgattgtcatcagcactttctcatacattataatagtacatatagggaatgcaaatcgattattttaacccacatcttatactttaaaaatcagttcatggtgataggaattttacttaagagtttgaacagtatgagtaaactaccatgtataagttgtttcaattggacaccattccatttaagagcattttattgctttgtgtgtatatattttaaatgtttatatcacattgtattatcattcagtgaacagatgattattcatgcctttgtgtacttgtcatggtattataaaggatggagtttagaaagctagtttgttttaaaatcctttcttttcataaatattacttgacttccaagtacagctaaatgttgcaaatttaatgacaattttctttgtagaattgatttagtaacttaacacattcttagtattatgtaaaatattctaaaataagttttatcatagaatcacttgcataatcatctggtaaataaatgtcttgaattcctttttgagttccatttttgatggatattgatccataacattggcctcttaggtttttggttaataataaagtgttttattcagtaatatatcttaggacaaatgttattggttcaaataagaaaaataggatgctaagaaatattgctagtaagcgttattaaaggaatatttataatattttcattaatctggacagattgacaattttcaggctttctttatggatcttccttaagtttgttctggaaatttctttgtgaaattatcttgcgtcaacatgtaaacggagtttcaccttttatttcagggtggtgattccactgaagcaactgccaaaccaaagagaagtttttatgctgccagggatttgtacaagtaccgacaccagtacccagtaagagtatagaatgctatgttttaaactgtaaactattttccttctgtttttaaatttttatggtgccactgagaaaacatgcatgaagggtccttgtatctttactgtatttctatgtgctggagattgatttattttttcctttagcagaacttcaaagatatccgatatcaaaatgacttgagcaatcttcgtttttataagaataaaattccattcaagccagatggtgagtaacgtactacttgataaattgcactttaaataatcacatacacttggttattctttattttgtggtttgtttcattgattggatttactttgctatgcagtctaatgtgtccccttggtaaattctggaggaagagctatggattaatggtatctttcttatttacattgctattatctgaaagatagtagggacaatttttgtgacaggaagagagaggagatgtatagaaccatagaattttaggttattaaggaacagtagagaagatcaaattcagctttctcatctcaaagattaggtcactaggacttaaagcttaggtcactcgattgcaggttctagagtccactgttctttccattgtgccatagctgaaaactatttagcatgtgattgaaaagtgctgtttgtatttagaattatctttcctgtcagttttcagattcagtatcagcaatctacagcaatccctgtttggagttccaatattctgggaagggaactgcagatacagtagatctccatccaactctgccaaatacacttgtctccttcccaactctgcaattgccctcctaggatattttccaaacccatagtgagaagatgcagctgctatggtaatatgaccacaacattgcatatttcattgaggcatcatgctgtggttcatggtggtcatcctaattttatccaggtcaccctaggaaagctggcttctctcccaagagcccttttctgtgtgaggtggtcagactgccctggcttctgctatttgctctcagtggaaactgagccagttccacagcagtgtgagtcacagaaggaaggagatagactgcaaggctttcaagtggcaggaccttgcattctttggtgaactaactcgaggcaagaggtctaaagcctggattgagtttgggaggagggagtcccagtactgtgtaccaacagacctaccagttgggagttaatatttgagaacatcgttgacgtggccagatctacttgtctttaactttctggtgtcctgaaagtctgctgtgatgtggaatgaaacctctggataaaattgcacagttatatttactaatgatagaaatgtgctgctttatttactaatggaaaaatattggccaaattattcattttgttaggacttggggtagaaaaatattttgaagaaatgcaatgatagattgttaatttgagtctgatttgaatttcatacaattttcctaaaggaatgccttcacatattaaaaatattaaacataaagctatgatagtatttaactctatttttttctactagggaatttattttgtaaatattaatttaaaaagtaatttcaagcaatatattgaatttttggtaatctttactacaaagtttattttgaaatcttatgattggtgggggtcagaagttttagctaaggtcagataaaatgtttatcctagtttattatacaaattatatcaactcactttcctccctagtatacacacacacgcacacacgcacacacacactacttgccagtaagcataatcttgcaatggtatttatttatcaggcaggaggagtggtagttggaaaggaaaacaaatggaaaattacagaggtaaatggtttcaacatgccaataaagccaacattatgattcaaaacaactttttaccaaaccttccgagagtgggcctctactacaaactggtgatctctggaggaaacaagaatgagatgagttatgttcggagaaatattatattgctattttattttctacaacattgactaaatggctagtcaattgtaaggaccttgacagacttaggaacaggaggattttgtttttgtaagttcttgtagaggaaaagtggacagggtgaaaagggcttacttcttggaaccagaaagacctatgttgcactcaagatttacttttttactagtgtgtaactttgaacaaatctcccagtttcttcattgttaaaatgaggatcataacactggcagcattctgtgaagactaagctggaaaatgtgcgctctgtgtaatatgggcacagcatgtagtaagcacttacaactttttcctacatttttcttttctcgttttccttctcctttgttttctccttctcatttcttttcttctatttctactcccctttctttctttttccctaggatgcaattcattttgatccaatttagcatttaaagaactatataactcctaggactgggattggcaaactttctatacaggggcaaatagtaaatattttgggctttgggggacagtgggtctgtattgcaactacacagctctgctactgtagtacaaaaactgccatagacagtacataaatgaatgtgcatagctatattccaataaaactttatttaaaaaacagctggcaggccacagtttgccaagctctgctttagagtacattgcccaacaaagccttgtgcaatttgaggtgctattaattttttttaattagatttatcacataaccgaatatatgggcatagggtattcatctttttaaaagcactattcttgtgtgctattattaaatttaaacaagttttcatataaaactcaagtgattcgaatcttaaaatgccttcacaatgtttgaaatgtctggttcatttttaaatatttactatttaggtgtttacattgaagaagttctaagtaaatggaaaggagattatgaaaaactggagcacaaccacacttacattcaatggtcagttacatattatctatcttgaaccatgtcctatttaatcatgtatgttttccagacaacgttaatagaaaaattttatttttttaaaataaataggcttttccccctgagagaacaaggcttgaacttctatgccaaagaactaactacatatgaaattgaggtaatgcaagctcatttcattttatacagggtggccaaataatattgctatttcactgtccttgtagctactgaatcatttcaggtgacttttttcattttttatattaggaattcaaaaaaacaaaagaagcaattagaagattcctcctggcttataaaatgatgctagaattttttggaataaaactgactgataaaactggaaatgttgctcgggctgttaactggcaggaaagatttcagcatctgaatgagtaagtaaagcccctgtgataaatcaggggccagcacagttattttcccttggtcagagttctctatgaaacgcaggaacaactagcagatgagatgggcccaggaatttggattaaaaagctagtctgaaatgcattacattcctgtaccacattctaaaacaaaacaaaacaacaacaaaaaggaacaaaattctaggtagaaacacagctattcagcttcagacctgtttctccctgaaaccttcctattgcccacagccaaatgttgcttctctccctcctccttatgccacatttctttgagtttattgttattgcttgtgtacaattctgtgtattccttcttgtaggctgtaagcttcttggggcacaatctgtttctaagcataatgccttcttaagattaaattcatgcattaagcctatgatgtataaaaatcattttataagaatgagatgggcccatagtttttactaaaagagagagaaaattacacttgtcttcactattaaggtaaaaaacaaaaactcatttttgggtaataagtcccaaaacttatgaagaacattttaacatagtttatttggaattgttttgctgtattcatttggttggatgtttataacttttgttaatactcataaccaaagtttatttttcttgatattttcttcatattcactgtctattttctttttaattatagttaaattttaactaattatagttacatttaaactaatcatagttgaattatttatgaatgctggcctatacagccaccagctttaaagtacttttaagcatattataattagctaaactgagcaagtactaagagcaaaaaaattaaaactaacctaagcaattttcctttggccacagcagtctacgttttgtgcatcagttaactatttttttatgtgtttttatagaactttcaccttgctttggtaagatgggtataaatatatatatttttaattttattattattatactttaagttttagggtacatgtgcacaacgtgcaggttagttacatatgtatacacgtgccatgttggtgtgctgcacctatttactcgtcatttagcattaggtatatctcctaatgctatccctcccccctccccccaccccacaacagaccccggtgtgtgatgttccccttcctgtgtccatgtgttctcattgttcaattcagatgggtataaatattaatgttataagaagtaaaaagccttctttttactttattacttataatcaatgatattaaaatggtagtttgtactaaaacgctaaagatatgggcataaagctttatattcctgactagaagatccattaactcataactcaaatttgacttatgtagggcacttaaagcataggtatatatacctctacctaagcaatacaggtagctagctctggacagagtttctaaacacttatattacactgtgaaagagctacatgccagcagcctattgacatgaaagacagcaatagtaacagtaaatcttttgaaaggatttgatagtacctcatctttcatgtacttaacgactatcattttagatacctcaaacttgttatttttggttggaatagcaatcttgcttaataaatttttattgaatgaataaatgattaacaaaatatggtcttcagcttaaatcctccttggagttttgttatcatatcctctgatttataggtggaaacagagtctctttttaaggctttaattaaatgatttccagggttgaggcaggggaagggagcctgaactaagtcacttctcactcctctgccccatcctttctttctgccacctattgtcagcatagagcttttccagctgtgaattaactgccttagaatctgccagaaaacactctgtttcttctctagtttagttgcaaaaaatctttactgactagatttgaacaaatgatagaggattctatgaaaacgtctgttctattttcttcttcaattgggtccttttctgacttattcttaaatgtcataacttatttgtattttaatgtatatggcatcttgagtagtttacagtaggcagggaactcaatatatttatagtagctaagcagaggaaaaatattgaatcaaagtaaaataaaataacattgagtgaacaagcgaccttgactaaaagaggcaaaatattttcagacatgagagtacaaatatatggaccaaccactaagaggtgttttcaattttgtttgtaatcaacttggattactgagccatatttagaccctggggagccttttaacttttattttttgtttcctggttctcaccttgtatgtcttctctctttacctacctagacttcttgcaatttcaacactatttgctacccttaacctctgtctggaacctcagcttctttctttttcctatagtgtaaccctaagatggtttatacactataaggatttttgccactctcttctataccatttagtctttcactatgacatttattacaaatcatactgaaacacccaattgctttattttgtagttttgttctgggatactcatcatcattttttaacccaagtctttttccttttatactgttgtgtaaatatttttaattggagcatatatagatatagtaaatgtgtacagaaattttaacttcagcattcatctaagattggctatataaaattgagctggttgcaaatatagtaaattttgtttagtcatagagctcctcttttttaaaaaaagaattcttccacctttttatacatctttttctcatagatatatgaggcagaattgcccaagggttttgtcagtaagtatttagagtatgcaaactccataggaatgtaacaactaagttgttcctgctgttagtgacacattgtcttaactgtacccaaatttgtattgtctcaagagtgttacttcctattcaaaaatacagatgtgtaaaactgagacatctgtgctgcattttaccctctgggcttcacagttgaatgttaagacaataattttttagtaaacatccagaaagatgaagatgatgaactgttgggcttagcttttccagtgtttggttagtatgaatcattaaggtttttgttttgtccaaagaaactttctcattgaaacataagaccatggaaccatactctgccatcccttaattcatcaacatctttctccctgcttcccaagtaatttgctaattatttcaaagtaaaatcttcaagcatttttggaagctaggacaggtatatataatgtttgcagaaagttccatgtctgagatataaaacaggctttaggaagttagaaataagtgatggttattgttatgtggcaatattgggtaaataaatacctgggctgttgacaacacctatgattaatacatgtggctgatgattcttttggaatttgaccaggcatgtgtaataaagcaaagattgagctgagtgagtttggggagttacattatgaattgtgacaaaatagatttggaaaacattcatccagtaatggcattagttttgtgatagagaggaaagatgttagtgtaatctgggggaaaatgtacccttggaatcaagaccattagaaataagatttaaaattatcagatagggaaagaggaggaaagaatgaccagagattgaagaaaattaggttaagttggataggtacaaatatggtggtccctaatctcgtatctttaaatgataatactaatagttttaaatagtatctagtacttatcgagttctatatacccagcatgtgtatcatctcatttgattcttacaacagtcctgtaagttgtgggcacttttccccattttacagatgaggatattgagacatagagaaacatagtttcacttagctgctaagttacagagccagggtgtgaactcaggtctgactccaaagcccatgctcttaactgttaaactaagctctgctaaataagtcagttttgtgtcctttgtcagaactgttttagcaaagtagagtagtttttgccgccatccttatgagttggcttacgtggtggattttgcttatcagctggcactataaattgtaccagtcagctgttagctaatgtgtttatgtttagcaatggttacctctgatgagtacagtacattgatgttggtgcaaataaatgctctgttagatcattcatcttcagtgtattttcagtaataagcaacaatttgacagtggtaataaatttaaacctaaatatttttctaatatgaagaactcaacagacaagggaagtttattttatacatttgactttcacatagattgacattacattgtggcctaaggatttaataccctctggtttattcttaatggtatcaaatatggcattaggaagtcattacacagcatatttccatggcttacatttccataaaaaatattttcccaatagttttcattctcctgccttcctacacctgatttcccccactcattttattcaatcctctcttccaggtcccagcacaactatttaagaatcactcgtattcttaaaagccttggtgagcttggatatgaaagttttaaatctcctcttgtaaaatttattcttcatgaagctcttgtggagaatactattcccaatattaagcagagtgctctagagtattttgtttatacaattagagacagaagagaaaggagaaagctcctgcggttcgcccagaaacactacacgccttcagagaactttatctggggaccgcctcgaaaagaacagtcggagggaagcaaagcccagaaaatgtcttcccctctcgcctccagtcataacagtcaaacttctatgcacaaaaaagccaaggactccaaaaattcctcctcagctgttcatttaaatagcaaaacagctgaagacaaaaaagtggcaccaaaagagcctgtggaagagacagacaggcccagcccagagcccagcaatgaagctgccaagccaagaaatacagagaaggacagtaatgctgagaacatgaattctcaacctgagaaaacagttactactcccacagaaaaaaaggagagtgtatctcctgagaataacgaagaaggtggaaatgataaccaagacaatgaaaatcctggaaatacaaattgccatgatgttgtactagtacagtgaattatcagaaaacccagaagccagtttaggctagagaggaaaaaactactgtatcatttatcctaaagaacagagatgaggtcaatttcaaattttagccatctgtttgtgatttctgtcataagcattttgttgtttgtttttttattttggatgacaatgaattgaatatctaataaggagatttaagataagacccaataaatgaatgtattctgtaatgcttttaggatgtgaattttcaaattttgtatataataattactttgagaatattttcagagtatctagaaattaccatgtagtatttggtatacaaaatacattcttttgagacattatagtctacatgaaggaaatcaagaggataatttcattggattgctacacttttacctgatttatggctttattttactttattttattttattattattttttgagacggagtctctgttgcccaggctggagtgcagtggcatgatctcggctcactgcaacctctgcctcctggactcaaacgattctcctgcctcagcctcctgagtagctgggattacaggcgtgtgccaccacgcctggctaatttttgtatttttagtagagacggggtttcaccatgttggtcaggctggtctcaaactcctgacctcatgatccacccgcctcggcctcccaaagtgctgggattacaggcatgagccaccatgtctggctgattaattttttttttaactgtaagagtttgatcttttcaaatgtgttcagaaactaatttggattctttgattctagtatctcaacgtgtttatttttagattctgataagtgaaatggatgtccttgtggagctctggcctccccagcttatctatcagtcctgctgtcctcacctccttgcctctttccatgcttacccttaagccaccatctttctcagctagcgtgtgtgtttctagtgtagttggccctccatattcaggggtccagcatctgtggattcaaccaaccgcagattgaaaatatttgttggaaaaaatggatggttacatctctactaaatatgtgcagtccttttatttgtcattattctctaaacaatacagtataacaactattgacatagcatttatattgtatgtattaggtattgtaagtaatttagagatgatttaaagtattttacataagggacttgagcattcctagattttggtaactgcagagggtcctggaaccaaccccctacagatatcaagggaccactatacacattaggatgatctatattgaaatctacatggaacagagtgggacttctaattgtatgacttcaagattttgctttgtttaaattaataactgttttcagaattaagtgcttaaaaacaaatttgattgaaaagttcaagacaagaattttgctctctatggctgttccatataaatttgatggttgattctgaatgtaaatgactgaagaattaaaaaataagaaattcctttttaaaaggcatgcctcttgcactgtgaacaagacagtagtcccttaaaccatgaatatgtcagtgttctatggattacgaaattagtaatgttgcttagcccaaacgtgttttttaaaaagtatagttttgtacatctctaagttatcaaacttcaaaattgagaacaaatttaaaagtccatatatgcaactctagtaagcacttaataggttacatagcactggttaagaacaattaattttgtttctatattattactaattattattacaaatcaaaaaacactgtgataagaacttcaaagcatatatacaaatatagttaaagcaatgaatagatgaaacatgtctactttatttcatttagaaaggaattaacttttttgttaggcttttaagaaaagttctattcattttaatcccctagggaatttgtaatatgtcctacttcatatcatcttctgttgcctctattgatccacattttctgcagtggatttcttgaaaagaatcacacttatagtatgcctctagaaatatgattttactgctttgaagtttacatgaaacatgccagttgcttaactctaattttttatatgaatctcagtagcacttttgttgtacattgtgttccaataagtatagtatggaacactttctcatttttagttcccataatatgccagtttttgctttcctagtgttctgtgagtattaggatttggcaatctgcttttgcatttcaatttctgttttacatgcaagaaaaacatggacactcttatgtggtgcttgtagctgtgtctccgtagagctcagtaaatagttctacagggtttagaggatgagaagcgattgtcaaattaggctgaattgtagaacacaaataatttaattcaaaataacttaccaattttatatacatgataaagtattcagacaactttctaaatgcataatagtaaaagattgtgaccagatattatgatattaataaagttaccagatactaaaatcaatgaatgtaatttgaattacttagaaattgtatattagagcccttatgagtaaaaacatttcatttagcaacttaacttttagaatattcttcctacttagggattttgattagattgtaacattaaattcgagaatatttagtctcaagagaaacacttcctggcatccatcttaaatagtggccttttcccactatggtgtttttaaatgcatattcatatataatagtatgtttcttacatttaatccctaaataacttagataatcattcagtggagaacaagtaaaaggatatcattccttttggagataaacattgagtgtctagaatttttttctattaatgctttgtatattagttttttaaataagatctatagatatgtatttatgtgtgtcttatatatgaaacagtgctctgggtttgactcctatgttttgtaattttaaaaactacgatatgcttgcagaaattcattgagaagctgttataaaaaatgcagtgaagcatgaccaaatagctaaaaatattactgaatctttacaaatatataatctttattgttgtactgtggagtgcaaggatactaaatattggctattgataaaatactaacttgcatttcatggcaaatagatgttatatcgcttgattagtctagaacatttctaatattttgtgctttcatatatcaaaggagattatgtgaaactatttttaaatactgtaaagtgacatatagttataagatatatttctgtacagtagagaaagagtttataacatgaagaatattgtaccattatacattttcattctcgatctcataagaaattcaaaagaataatgatagaggtgaaaatatgtttactttctctaaatcaagcctagttgtcaactcaaaaattatgttgcatagttttattttgaatttaggttttgggactacttttttccagcttcaatgagaaaataaaatctacaactcaggagttactagagaagttctaagtatttttttgctaagtagtaaaaatataaacatatgaaaatgccataatgcctgtcatagtcattgtttcatattttgtcatataaaatcacctaccctgcttctagttttatactttaatctgagtgaaagtatgatgtggtggaaagaaaaaacagtacagtattacatctgagttagtctttgaaaaatcatagtagtaaatgaacctcaacactgagtggtcaaaaattgggttaaccaatggggggagaatatttggttaattgttttaatattaaattttcaagtttataatagagttatggttgagtagtcatccatactgagtaatcacgcattttttaaactataattgaggctcttctaaagctttgttttctaatctaagatacaaaggatattcttgatcttgcttgattgtaactacatctaccagtctttaatgtctgtttggggtgagtggcgatcctctgttgtaggaatgtttttgaagatttctattttgttttccacttaggaaattcccctctctcatttggggtatatgcgttgagtataaggtaggctgtatttagacacactagaatcattaaatgtaggtgaagttgtagagaaaaatggcctgggtcaatgtaggatctagaaaattaggagtgtacatttgctggcttctttttgagttttgtactgtttattacaggaacatatttgtgtggctaatctctagggtgacagtgagtactaccctgctccttctgcattctagttatccaacacacccagcagattgtgttcagggacagaatgtgtttttagaaatcccttattattgaaatgaataataatatagctataaatatgaatgtctggaggtatccagatgtgccttaacaaatgtaaatggttttcattcagaagtttacatttttattacattataaaatctcatcattgggaactttctaaaccatgaatatcagttcttttaatgaaatttaggtggtgctttatcattttggagaagttgctgtttgggacaatagcatcagtttatcaagaagtgtactcaccatgatattcaacaatgtgttacatttgacaaaacgtgtttagagtaagaaagactaactatactgtctgttatatttatttatgctttttgtagtttagctacatactataattttcattttaaacgttccttagttactacaaataatatttatgttttgcttcttcttagatgtaggcggatgcagaaatagaattatgttagagaaattattaaaagtttaattccagtaggcagttggagaaatctgaaactaatttgaaaaacttttatgctgtagtctcattagaatcattttaaaagcactgttcttgcatttttcctagactacagagagtgttctttgtcattttttttcctattctgttgtgaagtttattgtttcagttatttgagggaaataacctcttaatatgtttattttcctgaactaaagttttcatgtagagaatacaattaaatgttttgtgttatgacccaaactggctggaagtagagttcagagagggagaagggacaagaatcagtgtgggcatctcaggaaagtggcgccagtgctgggctccagccttctccactggcatgatgggtcctcagattctcctctggataatgagggtgttgggcactgtgagctctgacttctggggaggataggccatcatggactccatacacaattttgatgggtatcagttctcataaaatacctgctacaatttatttattttgtagttgtttagaaaactgtgagcagttgggcattagtaaattgtagttatatcttaacgatcttgggaatcattgaaatatgagtttttttccctcactcctatttatttaattaaaaaattagggaagttgttcattcacagctgtatattaatataaaatctctttataaaatgattcagagaaaaggcagtagtggtcacttactgtgctaaaatacctttttctctaaaaatatttaagctttagggtttgtcatagttttactttttaaattatactttgtgtaacaatttacgttaactagaaaaattagatatataataagttttggtactaagaaacatttacattctacactcattagtcaaatgaacttttctttcccagtgctaacagattttgtttcatgtgaagaaaaataaaatacaaatgaaataaaagtctagaaacagcaacaggaaactcaccacagaaataaagacataacccttgataagtttgtgtaagtgccagaattattggaagcaggtgacgaatgattaagaaaagctttattgtggggacatgctttaagaatcagctctgtatttgtgccaaggagatcaggtattggtgtgcaaacagatcccattaatactctgatttgaaccatgaattccacctactctgcgttgaagccctccagtagactgatagatgtaatcaaatgatcagctaccaagtttaattcctttgcctgtgtgtagcaacagttggtagttttacaagttaagttgatggtctggctgcagataagagaaagactcagtgataggtggtttgtgagtgaagtaacttccacactgtcaagagttgacagcatattaattgtgtggcattataattgtgagaaacaaatgagagcaaaatgttaggtcctttgacaagcattttcctcctgtttttaaaaagggctttaagttgtttcctatgtaaggtaatctttcttttttagtattatctaagaaggatggtagattatgtcattttggaaactattgtgtcccttgtattttaaatatttcaggaaaatgcctacgattgttacaaagatgtgtgttttacttataacataagctctgattctccagtggccactgggccttctctgtgctctgtattcaactgcagtatgaattacagaatgctgtgcatgttcgttagtaccaataccatgtgtatgtggtagaagttgtaaccagtttctggatctgtatggtactataaaatacttattttataattctgtaaccgtatggcagtgttatgccaaaaatgtataaagagcaatagtttttgttgcttactgctgtattttaaaatattgtttctaaaataatagagttagagttccttttgagtaattatttttaagaactattgccaaatatacatcctgtaaaactaataaaagccactccatcttagataacattttagcattgtgctagagtacattatggtgattttgcacgattaaaatatttttaaagaactagaaaaaatgacttgctgttttcctgtcattaagcatgtattttttatgattaacacataagactaacattattttcttttatcctcaaaaataaatattgtgaagggtgaatcatatatatgaagttatttttattgtgagattctacagaacagatcacatatgtaaatacttggatgtttattgttatctctttgtgtaatgcagagttttaaaagtatttttcttacagatgaatgaatatgaatagctaatgaaggtgaaagatgtttttcacttaggcgggctaatatttaagtagtcaagtttttgattaagaaaaattgaaattgcaagatgaaagtgaggaggttgctctaagaatcacaggacaatgtagacaaaaatgaggaaaagcataacatttgagcttggctgcattctatataagcagggaaagaggatgaaagaactaagaataagttgtagtaagagtgaagttagattgtgcataactgagaaaatgatagcaaataacagcctcagtggtgaatgagcgtgattttaacttcagccttttgtatgaatggtttagtagagagagaagtgcacacatgcagtcattttcataagggaagaatgaatacattctggtaacagaaaatacgattttcttttccccacagattgaatgtgtgaaggtattgtaaaatctgaagaaaacaaagattcttaggatagtaataaatgcaggactgagtctgcacttctgcaagaatgtaaattttaatatgggagagattttgggaaaagattcataacattttccttattttaattctaaagtggatgcaaaacagacaagctggtatttcaagcatggagggaaatcccagcctggataaaaatgatgacaggcagtttggcttcttgtgggcgattttaggctttggcaacggtgactgaatgagttgtcagactaatatggggaacaagtaaagattaccctgctcttaggattatccccatgaatatgtaggattaattggaagaggattttaaaataggatactaaagagacagatttgagagtcagcatggattcaacttaactattcaggaaaactgggtttattaattttgctacagtagttaacattcttctattttttacagctttattgcatattcaacactaccaaatatacaaatattttctcctcaaatggtattattgaaataataactagttattattgaaatagctagttttatctactctcagctttggaaaagaaagaggttacaagaagaatgaataaacaaaggataagtggtagacaaggtgaaccaaatgagatctgacaactcaccttagaacacggaggttgtttgacatctttaaatggatgatttaactgttgtgaggaagagaagttcaagaaaaagccctgaagggaaaaaaaagtaagggcagagagacattttgttgaatggggagagagcaggctttgaagccagatggactttggtacaagtggcaacatcatcagttataattgactgtgtggtattggggaaggagtgtaaattctcagggtgtctggtctcttgttggtaataatacctgctttgtgagtttcttggaaggattggagagagggtaggtgaaatgccaggaacatattccagacactcattaatagtagctgctggggctctagaaaaaacaaaacaaaacaaaaaacaagaagatgcttagttatgacaggtcttgtgtagcacttattttaatgaaaaccaatctaatctaatggatgttaaccaggtttataggtcgaaacaaatactgtaagttttacttttaattttaatatagttttactaaaaaagctagcaggtatggaattaatgattttagattagatacactgatattgacaggacagaacatttccctcaccgtgaatgtaatgaatgtacaaaacagccctttgttgctcccttaataattttttgaaacggtttcttctcttccaagaaaagagctggagtgtgagacagaggtgaagcctttcaatcagatgaccttagtttatttttagtacactatcagtttgattcttattgaaagctggaaattttactttctaatcctccaaatagatatgtacttcatatcttagtgggaggccacttaaagttaacactatttaaaaatgtgtatgtaattaattctatgaacatggtggcctaattgcgattattttcttacaactggagttagaagaatgaagaattttgtgctaaagaaacattcacctttcaaaattcaaaattatagatattataatactgtgacattaaaatggggcctactggaagtcctgggtcattgtcttgttcagctgtttatcccctcaaagcaccacccctgtactatacagaagaaatgaaataaattctcattgttttcaatagaaattgaacatttttatcttctttgaaaaacaaaaatctaggccaggcgtggtggctcacacctgtaatcccagcactttggtaggctgaggcaggtggatcacctgagatcaggagtttgagaccagcctggtcaacatggggaaaccccgtctctactaaaaatacaaaagttagctgggcatggtggtgtgcgcctgtaatcccagccactcgggaggctgaggcaggaaaatcgcttgagcctgggaggcagaggttgcagtgagccgagatcgtgccactgtactccagcctgggtgacaagagcaagactccgtctacaaaaaaaaaaaaaaaaaatctagcattcaactaatttctcattttatctgtttcaatgtccagaaatgagaagggaaattatagacttgtataattggcagggagtgtggatcctaattttgcagataatgaaggtgaaggatggataggtgtcataattctgctcctctaaaagctgcagatggaagagtttgaggaacccaagctatgtgggtctttacagtgggtttgctatgtgtggttctttttaactcagggaacacctcttaatagaatgcattcaagagcatcagcccagacagtgggctgacccatgctgcggtactaacctaagaccagagtcctcttcctgaaagaggctttctcaccacttaatgtgtttgctacctggccagtgcttatgtttggtaagttctgaagtaggtccaaatacttccatttaggaaacaaaccactgggtctctgaaaaatggtctttggatataatcatctctgacagcatgccttactgtacatagtagctcttccagatctcatctctgggacaatgtggagcctgctgtactgctgtaaccctgacatttctaatctcattgaatgacacagcctgatccccaaactggaaaccagggagctattcctggcttttcattcatcaacacatgtaatttgataacaaattctgtcgatgctattccttgaatttgtctccaatcctcacttcatcatcacctccagtgtcttcacagatctttacctattgcaagaaactcctaattcttccctctgccaccagaaagcatgcagccttcacaaaatgccatggtgtttctttgtatcttaggtgcctaacagtgtccataataaacactcaataaccagtcattgaattaaaaaaaatgttcagcagtaatatcttaaaacaagtaatatcttgaaacaaatatacagctgcttataaatatacaagcagatgtataagtctacaggcagctacttattatgacccctttttgagataagatttcttcaagacaaatagcctccaaagtgaaatatttgtatgatagtacaaagatttatatggaaaggtttcataagtatttaatgttttgttttacaaagcagatcatagttccttcctggtctctcgagtcacttagcaacaagggtcattaattagttttaaactgatttaaaagcaggttcaaatttgaggttaaaagaaaggaagggaagtacatggtctcacttttcctgcttggcttgcaattttaaataagatgaagtaattttacaatcatatttagtagatcaatgaagtacctgtttcagtgcctggccgagagttagatgcatgggaataaacaactgcaagcatgaaatgaagtttctctgtaagaaaaccatctggagcatctggcagaataaagacaattcccttggcagttcacagcaaagctgatttcccctcctctgtttttacagtttagacagaaatactgattgacagcaaaggctactcttcaaggtatggcttttccccttaatgtttaattttcagattgtattataactttgatttcagctttccttttttctgcatgttgacaaccaaattgaaactaaaagctcccttattttaaggttttcttaaatagaaaccctaaggatgttctagttgatggaagtaaatgatcactcaaattcctttaaccttcctgagcttgagtgttttgtaggctggaaaacacttgcacctaaaagactttgtgaaacggttggttcctcattttgtttatcctcttttagcttatggtgatgaattcaaattataaaaactgtaatgaggtcacaagatcattcacaccaaactcaggtcaagaaatgtagcacccgttcttaatagcttatctgatcttcatgagccccgccctgctgatggttagggacatcttccatttgccattgggaactactatcacttcatgtttgtatttctcctttcagtttaaacattcagactattgaaaatttaaatcagggccagtataacagcctctttggaatgactatttcttttggtaaattactagtcatccaaattttacacccacctctttttcctgcccaagatggcttcttgggggcattgaggaggtttcatctgtggtagcagggaccaggtgaaaagatttatgtggtgtcctctagatgctctcaaattgcagctgtggagtggctgggttaggctgctcctctgaactggtaactgccaaggttcaagtggtctcatctgtctgtttgagtttaaagctagtggtgcccatggtggagccaatagcccaatagccttcggtctcaaagttgttactaatagcagccacataatttagactccaagcttctgtaaagtcacaggcaatgtgggaggcatctgtatgatggagagagatttggccctgtaatttgaattttatctttgagatttggccatgtgactttgggaaaggtaagtgacactctatgaacttcggtttctttgtaaagtggaagtaataatacctggcagaggcctgaaggttataaaatcggaatgtttattcctgacacagactggataatacatgactattattgttgttaatatttcttgaatatttgtggtttctgagtgttcttttaaggcccaaaatcaaaaaaagaagagtaaggagggaaaaaagaaaggaaagaaaggacacagagccagatctctatttaatattttagattgctctttgacttttgtttagagttttttcctgattaaataacactgaatccttctttatctaatttgattcatatgagaaaagactgagaccacaaatatagaagaaacattatataagtaatgttattattatatttataatataattattctaggaatcttgggtaatctacttttaaaatgaagaacaatctataaaatacctatcttgggatttggtgagataaatgatattacatttaatggttcagaaagttagtttcctctttaacatcaatatttctgtgtggaaagaaaaacatcagttaggtagttagatttcccaaaagtgttttcaagagaattttgtacatctaggaaaaaccttgctgataaaacatttttctctactcttagtttttaggcctcctacaagcactctgtaattgcacaaatgcaattgctgattcaaactaaagcatgagaattatgctaaaaaaaaatccagccctagaaaaaacatttttatagtgcccattaatgtgataaatctgataattttaaaatagtaaccatatgtagacttgcagactgggtaatccataaaagagctgctttcaactttaaagacctaattatcttggtaagtagcttcatagttgacaccagggagacttgttcatttatagtctttgtatgtgtatgtattgacatgctggcaagctggggttcagtgaggcttcatctagagagacttttttctagtatggcaggaaattatcttctaattggagatatatatatatatatatatatatatccaattagatatgtatcattccaattgagaagtacccctcctccattacaacccttcctccattaccaccaatttgaagaaattgttattctggtaattaaactaataaaactgacaaataatgagagagattactttcctcaatagttaactcctaagacaggctgtctgaaatacttcaggataagtttaacaaaatacgtacaagatccatacattgaaaactacaaaagattgttaagagaaaatttaaaagtcaaataaaaaggaaaaatatcatattcttgaactaggaaactcatattgttaagaaatcaattttccccaaattgatctttagattcaatgcaagtcttcccagaggacttctttgtagaaacacgcaagctgattctaata

SEQ ID NO: 683 - DNA, 5115 bp, Homo sapiens
taggctgccgcccagcgccctcgccgcggccatgcccgggccctagagcgcctgccgcagcttgcgccccgcagccccgcagccccgcgcccgccgccgcctcttcaatgggcaacctgctcggcggggtcagcttccgcgagcccaccaccgtggaggactgcgactccacctggcagaccgactcggagcccgagcccgaagaaccagggccgggcggcggcagcgagggcccggggcaggagtccgagcagcccgcgcagcccccggagcaagccggcgggcggcccggcgccagccccgcgccggacgaggacgccgaggcggcgggcgccgagcagggtggtgattccactgaagcaactgccaaaccaaagagaagtttttatgctgccagggatttgtacaagtaccgacaccagtacccaaacttcaaagatatccgatatcaaaatgacttgagcaatcttcgtttttataagaataaaattccattcaagccagatggtgtttacattgaagaagttctaagtaaatggaaaggagattatgaaaaactggagcacaaccacacttacattcaatggcttttccccctgagagaacaaggcttgaacttctatgccaaagaactaactacatatgaaattgaggaattcaaaaaaacaaaagaagcaattagaagattcctcctggcttataaaatgatgctagaattttttggaataaaactgactgataaaactggaaatgttgctcgggctgttaactggcaggaaagatttcagcatctgaatgagtcccagcacaactatttaagaatcactcgtattcttaaaagccttggtgagcttggatatgaaagttttaaatctcctcttgtaaaatttattcttcatgaagctcttgtggagaatactattcccaatattaagcagagtgctctagagtattttgtttatacaattagagacagaagagaaaggagaaagctcctgcggttcgcccagaaacactacacgccttcagagaactttatctggggaccgcctcgaaaagaacagtcggagggaagcaaagcccagaaaatgtcttcccctctcgcctccagtcataacagtcaaacttctatgcacaaaaaagccaaggactccaaaaattcctcctcagctgttcatttaaatagcaaaacagctgaagacaaaaaagtggcaccaaaagagcctgtggaagagacagacaggcccagcccagagcccagcaatgaagctgccaagccaagaaatacagagaaggacagtaatgctgagaacatgaattctcaacctgagaaaacagttactactcccacagaaaaaaaggagagtgtatctcctgagaataacgaagaaggtggaaatgataaccaagacaatgaaaatcctggaaatacaaattgccatgatgttgtactagtacagtgaattatcagaaaacccagaagccagtttaggctagagaggaaaaaactactgtatcatttatcctaaagaacagagatgaggtcaatttcaaattttagccatctgtttgtgatttctgtcataagcattttgttgtttgtttttttattttggatgacaatgaattgaatatctaataaggagatttaagataagacccaataaatgaatgtattctgtaatgcttttaggatgtgaattttcaaattttgtatataataattactttgagaatattttcagagtatctagaaattaccatgtagtatttggtatacaaaatacattcttttgagacattatagtctacatgaaggaaatcaagaggataatttcattggattgctacacttttacctgatttatggctttattttactttattttattttattattattttttgagacggagtctctgttgcccaggctggagtgcagtggcatgatctcggctcactgcaacctctgcctcctggactcaaacgattctcctgcctcagcctcctgagtagctgggattacaggcgtgtgccaccacgcctggctaatttttgtatttttagtagagacggggtttcaccatgttggtcaggctggtctcaaactcctgacctcatgatccacccgcctcggcctcccaaagtgctgggattacaggcatgagccaccatgtctggctgattaattttttttttaactgtaagagtttgatcttttcaaatgtgttcagaaactaatttggattctttgattctagtatctcaacgtgtttatttttagattctgataagtgaaatggatgtccttgtggagctctggcctccccagcttatctatcagtcctgctgtcctcacctccttgcctctttccatgcttacccttaagccaccatctttctcagctagcgtgtgtgtttctagtgtagttggccctccatattcaggggtccagcatctgtggattcaaccaaccgcagattgaaaatatttgttggaaaaaatggatggttacatctctactaaatatgtgcagtccttttatttgtcattattctctaaacaatacagtataacaactattgacatagcatttatattgtatgtattaggtattgtaagtaatttagagatgatttaaagtattttacataagggacttgagcattcctagattttggtaactgcagagggtcctggaaccaaccccctacagatatcaagggaccactatacacattaggatgatctatattgaaatctacatggaacagagtgggacttctaattgtatgacttcaagattttgctttgtttaaattaataactgttttcagaattaagtgcttaaaaacaaatttgattgaaaagttcaagacaagaattttgctctctatggctgttccatataaatttgatggttgattctgaatgtaaatgactgaagaattaaaaaataagaaattcctttttaaaaggcatgcctcttgcactgtgaacaagacagtagtcccttaaaccatgaatatgtcagtgttctatggattacgaaattagtaatgttgcttagcccaaacgtgttttttaaaaagtatagttttgtacatctctaagttatcaaacttcaaaattgagaacaaatttaaaagtccatatatgcaactctagtaagcacttaataggttacatagcactggttaagaacaattaattttgtttctatattattactaattattattacaaatcaaaaaacactgtgataagaacttcaaagcatatatacaaatatagttaaagcaatgaatagatgaaacatgtctactttatttcatttagaaaggaattaacttttttgttaggcttttaagaaaagttctattcattttaatcccctagggaatttgtaatatgtcctacttcatatcatcttctgttgcctctattgatccacattttctgcagtggatttcttgaaaagaatcacacttatagtatgcctctagaaatatgattttactgctttgaagtttacatgaaacatgccagttgcttaactctaattttttatatgaatctcagtagcacttttgttgtacattgtgttccaataagtatagtatggaacactttctcatttttagttcccataatatgccagtttttgctttcctagtgttctgtgagtattaggatttggcaatctgcttttgcatttcaatttctgttttacatgcaagaaaaacatggacactcttatgtggtgcttgtagctgtgtctccgtagagctcagtaaatagttctacagggtttagaggatgagaagcgattgtcaaattaggctgaattgtagaacacaaataatttaattcaaaataacttaccaattttatatacatgataaagtattcagacaactttctaaatgcataatagtaaaagattgtgaccagatattatgatattaataaagttaccagatactaaaatcaatgaatgtaatttgaattacttagaaattgtatattagagcccttatgagtaaaaacatttcatttagcaacttaacttttagaatattcttcctacttagggattttgattagattgtaacattaaattcgagaatatttagtctcaagagaaacacttcctggcatccatcttaaatagtggccttttcccactatggtgtttttaaatgcatattcatatataatagtatgtttcttacatttaatccctaaataacttagataatcattcagtggagaacaagtaaaaggatatcattccttttggagataaacattgagtgtctagaatttttttctattaatgctttgtatattagttttttaaataagatctatagatatgtatttatgtgtgtcttatatatgaaacagtgctctgggtttgactcctatgttttgtaattttaaaaactacgatatgcttgcagaaattcattgagaagctgttataaaaaatgcagtgaagcatgaccaaatagctaaaaatattactgaatctttacaaatatataatctttattgttgtactgtggagtgcaaggatactaaatattggctattgataaaatactaacttgcatttcatggcaaatagatgttatatcgcttgattagtctagaacatttctaatattttgtgctttcatatatcaaaggagattatgtgaaactatttttaaatactgtaaagtgacatatagttataagatatatttctgtacagtagagaaagagtttataacatgaagaatattgtaccattatacattttcattctcgatctcataagaaattcaaaagaataatgatagaggtgaaaatatgtttactttctctaaatcaagcctagttgtcaactcaaaaattatgttgcatagttttattttgaatttaggttttgggactacttttttccagcttcaatgagaaaataaaatctacaactcaggagttactagagaagttctaagtatttttttgctaagtagtaaaaatataaacatatgaaaatgccataatgcctgtcatagtcattgtttcatattttgtcatataaaatcacctaccctgcttct

SEQ ID NO: 684 - protein, 447 aa, Homo sapiens
MGNLLGGVSFREPTTVEDCDSTWQTDSEPEPEEPGPGGGSEGPGQESEQPAQPPEQAGGRPGDAPDEDAEAAGAEQGGDSTEATAKPKRSFYAARDLYKYRHQYPNFKDIRYQNDLSNLRFYKNKIPFKPDGVYIEEVLSKWKGDYEKLEHNHTYIQWLFPLREQQFYAKELTTYEIEEFKKTKEAIRRFLLAYKMMLEFFGIKLTDKTGNVARAVNWQERFQHLNESQHNYLRITRILKSLGELGYESFKSPLVKFILHEALVENTIPNIKQSALEYFVYTIRDRRERRKLLRFAQKHYTPSENFIWGPPRKEQSEGSKAQKMSSPLASSHNSQTSMHKKAKDSKNSSSAVHLNSKTAEDKKVAPKEPVEETDRPSPEPSNEAAKPRNTEKDSNAENMNSQPEKTVTTPTEKKESVSPENNEEGGNDNQDNENPGNTNCHDVVLVQ

SEQ ID NO: 685 - DNA, 52594 bp, Mus musculus
  misc_feature (1)...(52594): n = A,T,C or G
agcttccctttcctctctcatctcatgagaggtgggcatacccaattctgtcaaatctttctctgattcatcactttgtctgccactcagttagacatcacttttaaacttgggtgcttccttctacaaactagctttaccttcactgtttgggattaaagagatatactaagggtgggtttttactccagtcagagggattaaaggtgtccattaagggataaatagcaccacaactagtagcaggttttttcagtaaataatggtggagccagctcagtcagtcagtcaacaggttgtccagggcaggcgagaggattaaaaaaaattagataacactgtagcatgaccctagtcagtgctaaggctgaagcaggtttatttttttccccaatctgcttttataccattttaattacatgcagataataaggtcagtttctaggttaaggaactagcaagacagtaaacacaaatagtcaaggaacaagcaaggcaataaatcctgttcactggttttttttttttttttttttttttttggacttatcagaatgaccaagatgtctaagtctacttccgtgtcctagtccaaagtcaaacacttgcctgaagcctacttctttgttctagcccaaaatcagattcctgtctgagcttacttccgagttctggtccattatcagattcctgactgtagcctacttccttgtcctggcccaaagtcaaattcctgccaagcaaccccaaaagctctccacaaaataacacgatctcagaggtcatggtgtgatcaaatatcctgcaacaggtataaaccttaaggaaagatttttaaaactggagttagacacatacagatatctgtgagtgtgtggagtaagaatagtatgagttgaagttagagaagacaaaagtgtttttgagagagaagattggtccttgagagcttggtaagccacttttaggaaatatggattggttaggcccagaatgaggcaagatgtcaggtttatagaatgaaaaaaaagtgtatctagatatatatttaaaggtatgttaaaaattaattaacttactagtattttgtgtgtatgggaattttgtctgcatttacatcatctatgttccatgtgtgtgtagtggctgtggagggagcttcatagtctgtgttagtttcttttctatgctgtgataaaacaccatgactggggctggtgagatggctcagcaggtaagagcacctgactgctcttccaaaggtcctgagttcaaatcccagcaaccacatggtagctcacaaccatctgtaatgagatctgatgccctcttctggtgtgtctgaagacagctacagtgtacttacatataaaaaataaaaaaaataaaaaacaaaaaacaaaaaaaacaccatgaccaaggcaatgtataggaggaagattttagtggggacttacattttcagaggctggcgaacatggcagcagacaatcaggcatgaggcacagaaggctaactgggaatggcatgagtttttggaacctcaaaaccagtgacacacctcttcctacaaggccaaacctcctgatacattccaaataattctaccaactggagaccaagtattacaatatttgagcctgtgggaaccattttcattcaaagcatcacattccactccctggttcccaaaggctgtgaccatatcataacgcagaatgtatttagttcaaatttgaagtttccataggttttcccagcttcaacacagttcaaacgtctaaactccaaattctcttttaactgcaaaacccctgtaaaattttttttaaaaaagacatattccaacatgcaatgacacagaatatacattaccattctaaagaggaagggataggggcatagtgaagaaacactagaccaaagcaaagccaaatcccagcatggtaactccaaatcctgtgactctatacctgatgtcaaagggcttagatagctcttccctttcagttttgctgacttcaacacacttctcttggactggttccctctctgtctgcagctttttttggtcaggtatcccacaattctggtacctccaacaaacacctcggtgtctccgatgcaatctaggcttcaccttcaaagcttcaggcaatggtctctcctggcctccatgtagggactcccccactacacatccatgtaatctcagtgactcgagtcattccttaagcacagaggacgattccaaacccctctctactcctgtatctttcatgaccctaaagccagaactgcatggccaatgctgcctgtttgggatggaacctaaccctctccaagaattacatttgcctaaactttggtttgttcttgctttttaggatcagaaaatcccttagtccctttcctttcacaaatcacagggccacctgagtagaaatcttgccccgagatcacttcctttatttcttttagaatacagtctttccttacctgtgtcaacacaagtgttggctccaatattacatttcctggtacctttttctcctgtagctttatcttttctatttcttctttccctccttgctcttttttattataggtctacataagaataatcactagtaactgagcccacaaggtcaatagcaggctgctttaaaatctcctcagccaatgaaattagccccaaactcttccaacttagcctcagactgatccttaggacaggggaaaagaacagccacagtcttggccaaaataccagacggctggtttatagtgcagttgctaatatagtctcctctgaaacctcttgagctaaatatccatggtccatgctgctctcatcaccattgtcctccaatctcctaatagggtagccaattaagcccgacttatagcattcaagcacttacttagttcaaagtcttccacgttcctccccagatcagtatagtcaggactattacagcaataggctgcttcatggcaccaaattccatcttggttactttcctatggctgtgacaaatcaccatagccaaggcaatttatagaagaaagactttattgagggcttacagttttaaagggtgagttcatgaccatcatggcagggagcacggcatctggcaggcaggtatggtgctagagcagtagctgagaacttcccatcctgattcatagacatgaggaagagaggtgctgagaatggagtgagtgggcatttgaagtttcaagaccttcccccagggacacatctcctccaacaagggcacatcctctgatctttctcaaacagctccatgcactgcggaccaagcattaaaacatattaacacatgggaactattctcatacaaaccaccaaaaaagcccttaggactggagttgcagatggctgtgaaccatgtgggtgctaggaatcaaacctgagtccttttaaccacagggccatctctccagccctcaacatgttgttttcaaaccttttttttttcatcacttgacaacacttttgacacactgtggcaatagtgatagtcaagtgggtggtatagaaaagaatattgaaacaacttgatagtaccagggcaagtgtatttgaccacccttctgtggtcatcccaaatacaagtgtatccctcaaccagattctatgcataataaacatatgataaagagctaaaaattagaccagaagaaaaaggtagcagggcagtggtggtacacgcctttaatcccagcacttgggaggcataagcagggggatttctgagttggaggccagcctggtctacagagtgagttccaggacagccagagctacacagagaaaccctgtgtcgaaaagtcaaaagaaagaaagagagagagagagagagagagagagagagagagagagagagaggagaggggagaggtgagagagagagacgggagagagagagaggggagaggggagaggcccctccccccccccccctcctattttctccctctcttcttcgtattcccgtttccctttcccccccccccatttcctacaaccttatacctacggctcggcttctagtttcaccggttccccatctgcgaattctcttcttttcccctctttattcttccttcgatccagttagccttatgcctctgctactcgccttccgcccctctctcccgcttcctccttttccctcctctttccccccccccccctccattcccctccacccaccccccaccccttcccccccgtcccctccccgttattccctccattccccttcgcatttctctcctagcctccgttggctctgcgggctcgtaggctctcgcctcccttttccccccatacccccatatactcataagccgtggtctccccccccccccctctttttttgcctcgtcactaacacgagcgagcgccccccgaatctttttnnnnnnnnnnnnnnnnnnnngattctaagataattgaacaagtgttaccatgtaccgtgtttttatttgagaaaacacaaactattctattccttagtgttacatggtaaaataattaccctccccctcaaataaaacctcgttaaaggaaacaacagggctagatggatggttgggggtgattattacccttgcagaagacccaagttcagtatccagtattcacatggtggctgacaatacacatatggtagttctcacctgtcctttaggggatctgatgccatgttctggcctgacgggcactgtgccactctatacacatggtgcacatacatatacaggcaaaacactcacacataaaaacaaaacaaatgtttaagagaaaacaataatacaatcatggattttgagttgaaagggagggtattcccccacaaagccatggctatatatatttaaacataagcaaacacgatatagttttaaggtacaaagcatttttttaaagcagagattttgaaggaactaccaattttcaaaatggcatagagataaatagctaatgtccacgtgcgcttgaatgtgtgtgtgtgtgtgtgtgtgtgtgtgtgtgtgtacatctctggaagtcactttacataacagcatagggcattaggtgactcctatgtggttattctcaacctagtgagccaaggttactgataatacaattttccagaaaataattctagatttgctctttccttttttttctacatgtgtagtttatatgggcatataattaatcataaggtcgctaaataaacaaaaagtgattttttttttacctaagtaaatgaatacacaataatgtaactacaaatctttttttttaacattggtaaatgtagcctcatctagaggagtgttatctttaattaccacttatttgttagaaaatagtgactataaatcaattcaaggtctccagactctccgaatattaatgcagatttctactaacaaaggcaatccgtgggagcatgtaggttaaaaggccagtgtcacagtaaaataatattctccattcacaataaggtcagatgaagtttagtcagtccctgatggtttcttttcaacagacaaacaagttcaaacaggaaaactgaaggatggcttctttcagatgtgtggtaattacaatttgtccatgatgtaatgaagcatctcagctgttatttctttaagataaaagtaacatacaatgtcgacggtggggtggaaacagcacagggattagcttgctttggaaacgagcaactgaagcactcattttgcgagtacagcaagagcatataggaacgggttccttcagcgagaagactaaaactgagttactgacaaaggttatgaagacgttaatgatctctcaaaaaatagacaaatgtctacccttattgttttctataactattacactctctctggtgcacaagacttgcaatttgctctaataatgaaatttgtctgctttctgactgctgtcattggtgttattatacaacaacatatgctaaaaccaagaagctgttttaatggaaaatattcaaagctcagattgcattaggagaggaaacaaatgacctttggaaatgtatcaaaaaaaaaaaaataagatcggctgatgtccagctagatggtgaaatgtattatgaagcaaatacagccacctcttaacagctgtggaatctaggaagctgtggaggcttattgtaaaattacttcacctttcctaagaataagttattggagacagggggaaagacaatcatatttgaaaactgtttaaaagagtgagggagaaacagccaacccccaccccatacccccagaatggctctataaaaacagactaggtaagatttgctgcttgtgtttgttacgctgaagagggaaaagattgccataacttttctttttgacacccaggaaagaaaaaggtattggtctcccatgagacaaagctggtagaaaagtgggtttattacacatttcacaccaaagttaaggctttctttctgggaaaattttgagtagaaactattatctaaaaatatgatatttaacatcttactgaagaggaccccttcatttcccccctatagtttggattacctaaatattctttttggccatatctacttactatgaataaataagaaagtagtcaatgaaatctaaagtcataaaaaggacattgtaaactttgaaaattttgctgtacattaaaactttgctgacatactccaaggtctgtgaataaaatgtgcatggtatgtatcacaagccgttcaaccccagcagcttcctgaagaggtgtgaacaagacatactaatgtctgaggttttgtcagtgaatttctagtacttatttagaacatatcacacactggcatcacagaagacaggatatataattcaaagaaatcgcttggctactaatgaatgcataatgatctataaatataccctgactgtaaacttactgtaggtacacacagtgctaagcctagagaatcggacacaaggaaatcacactcaatgacttcagaaaattactttcatgaagcagaaatacaggaagacaattttatctgtttatttttatttttcattaaaagttcatgcaatatattcttactgtggtttcccctctcccacctcctagatccctcacctccccatccaactctatgccttctttatctttttagaaaacaaacagcaaataaaaaagcaaaacaaaatttctttaaaaagcgaaaaaagcacagaaaccacacggacacacataaacataaaaacaaaaaccataaaaaaacaaaactagaaaccttagtacactagcaaaaaagtaggaagacaaaacaacaacaacaaaaaccacccaagcaaatcaatgtaagacacacatttacagatatacccttgagtttgttttgtgtgggccattgacagctggacatgggacctatacaggtatgcagttttaaagagactcagctattttatagacacattactttagtagaggagactcctttgcttagaggctggagacctctggggagacttcctgagtgtaaaggatcggtagtgggaatctaggctgatgacgagacaggctttaatgttcagatgagctgaggtgtcagcagggtgcatgtggctgcatgctttgggcacagaactacaggtgggtcaataccactgaaagaacgctcatggtatgtaaggggaccagggaggcaggtactcaacatcccatagatgggaaatttaagagcatggggtttcttttgccaaagtttttttttttttttttagaagggggatactatttttagggtgtatctttactagtcctccctggtttctgtgaagacacatttgaagggaacaagatgggaagctaacagagtaatagagctaggatctgaaccaacacagtgatagtcagtatggtttctgacagagaagacctggcagtacgtgtgggggtgactaatatctgggttgggggaatgtcaaacctacccgatacagagtcagataccacgcaggtaaagaaggtgatgaatccagctctggatgtatagaactggataggtttccggattatcaggtttgattcccagcactcacatggtggcttataaacatctgtaactccagttccagagattttggtaccgtcttctgacctccatgggcacaggaacacatatggtacacagacatacagacagggaaaacattcacacacataaaataatctaaaaagaactttgaaaaccatttctctagatttttttttgggcgggggcggggttcaagactcactctgtagaccaggctggcctcaaactcagaaacctgcctgcatctgcctcccgagtgctgggattaaaggtgtgcacctccactgcccggctagacaagttttaaaatgcttatctgttattagcctatcttatttgttatcactcaaaatcttttgtacatttttccacattgagttgttttcttgttccatttaagaatccattagatttgaattcatcttcagtttattattaatttgtttgtgtgtgggggggtgtgggggtgtgtgtgggtgtgccagcctgtggtggtcaggggagacctctgtggagttgtttttcttccacctttaactgggttccaggattaaactcaggttgtcagacttgcgtgacaagttcctttaccagcatcttgatagccttcctttggtttgtttgtttgctctgttgacaagtcttttgtcaaatttctggtttgcaaacattttctctcagtgtacgacttcagtcttttgaagggagtttttattattaaagtatgactttttttcctctctctttgcaacatgccttttatagcatacctgagaaatctctccctggataggtcagattttcttttcttttcttttttttttttcttctgttataattttaggtctttccatttacaccatgatctattttgaggtgtatgtattttaatatggtgcaaagaataaatcaatttagtgggaacagggagaatcaggtcttcgtgcacccttggaggaaaaggctagacttaagaaaaatctgaaaggccattacattgtgccaagagaagcaatgaactgtcttcccaacttggataaagttaccagtgaatttaggaagagcatctgcagtgtaaacttttcgcttactggagctgcgtgtaaccaatctttaagaatctctgcaacaaccgctgagaggtttaaagcactttcctttttgttatgcgcttcccgccatagaactactttcttttttaaaattatcctttggttagcatactaagtaatgggcttcattatggcatttttcatccgtatatgtcatcacattcgtatttagtcatcccttgagcactcttaaaaggtcactctccaccgagggtgactaaggcagattcccttgaggcattctggtatcagatcccagggacaaacccctagaaggagtcacagccccccccccccccctgggaacttaacaaccacactcagcagggcaagccaacctgtcccctcaccagggtgacttctggttaaattgcgacagatctacagagcgggaattcaaagctgagcaaacgcggggtcggtcagggaagtccctccggttgttcctgccagtgtgcgtctggagggcgattgggagctatcgtcatcagcccggacgccctttggggatgtttgagtcctggcttgccgggagcgtgggcacgctgggtcctttccaggcgcacagctggacccattcctgacccttgacccctgcccgggagtcagcgagtcctggagggccttgcgggggtatgcgatcgctctatagctcgttcctggagcggtctgtcatctccgcctcctgccagtcgtaaagtgctgtgaagggctctgcgctttacggcgccgttaggtgagacccggaagctctgtctctgatgggcacatggtttggggactgcaattattaaaaggctgcagtgagactttgagggacgtcagcgaatcacctccgagtctctaagcgggtaatcggatcacacttttaaaaacagtcattccattattttctaagagtatgcaggagtgtcggacgcacgcagggtgccaccttggtttttatgttcatccctagactttaggtccccggtgttagctgacgtttttctgttgttcacttcgctctgcagtctccccatccctggagttcggaatgctttacttgatcggcttgggcctgggagatgccaaggacatcacagtcaagggcctggaagttgtgagacgatgcagtcgcgtgtatctggaagcctacacctcagtcctgactgtagggaaggaagccctggtacgtgattaaagtccccaggcctctggggaagacatctagctagcgtccgattctcctaccctagactgcacagactctaagcgtctgcttttttttttttttttaagcccctgtaaaacacacaccctgtccattaagatctacttcatactcagtgacttgggaaatgaaacggtagtttgtcctactttacaagtctaattttgtgcctttctccagtaaataaaaaaaaaaaagttattttacactcttggggatagttatcaaatccgttatttcatgagctagccagacatcctttccgagttgagtgctaatgaggtgctgacacaggcttaatgagttgcttatacattcagcaagcgatctgaaagcttccgtctttgaagtagttccatagggaacagcgatctcatttttttttgtctgcaacatagccaaagagaccttacatgtactctcccaggaaggctgtcattcccacatgtacatatagagtgactaagtaaccagaggatgtattagtgcattatataccttaaacagggtaaatatgtaaataatagttacaacaagaagggtcagtttctgcttgattgtcaaacttaaagtgaaccctatattgagataagatgctgatgtgttgttagaggaggagaggaaggtttttttgttttgttttgtttttttaaattgtcaagtcttccatataaaagtgtgggccagagaacttccggtcatatctctcagattcacaactcagaattttgaaggtttcagggttatgttaaaaatcttgaatcctaaataggcttcttcttaagttggtcatgaattagaaaaaaaaaaaaaaaagtagtgtttaatggtcagtttgacttgctggccacacttgtcggtgtttatacttacttcaagatgatagaaatatgtcttggatcagtgatcagaaactataatggacctaaaaccatttgagaaaatagataactggcaggttaatcgaatagaatattaaacacagccagggctacacagagaaaccctgtctctaaaacaaaaacaaaaaccaaaaacaaacaaaaagggaagacaggcagtcgtggcacacacctttaatcccagcacttgggaggcagaggcaggcaggtttctgagttcaaggccagcctggtctacagagtaagttccaggacagccagggctacacagagaaatcctgtctcaaccccccacccccaaaaaagcaaaaaacaaaagaatattagacaatagcttagagcaaaattgggacataacttgttttgccttgtgacatgtccctggacaattcctttacatttaatttcttataaattgaggtcaggatgtgtttgccttctaggctcttagaacagtgtccatcacaaaagttttcagacattttagctgctagcagatatatttccaaatttctaaatgctagtttctccatttgtcaaagaaaaaataaccaattgaaagttatatagtatttattaaggtgtatgtgaaaatgctttataaattataagtgttagtaaatattaatttttcaaggttttcccctaagcataaatgtaattattaggggtctgggcttaccttacctataagtaaattttgtgtagtttttttaaggtaccagaatatctgttatttcatagtgataagtgttgatatttttggaacatttattttgctgttttgtgtattttcctgacagtgcttggaattgaacccaaggtctctcaacatgctccacaattgctttgccacagagctacaatacccagccctctatagttactgctcccattttgtgggatgttccaaaaacttgtccagtatcatacagatagtgacagaacaacattcaaactaaagtatctctgagttgagaattatccttccagactttcatacattctctctgcattcttagctttagatagtaactacacaaagtataacagagaagttatagcaagcaaaatggtttggactggatcttattttattacagaattcttctagtattgtcttcatgtcctccaggttcttagttcctgttcttccccgagtagcttgccacaggatcccatctgtaccatccgcctcaagtcactcatttataagttcatgccttatatttccagtacaattgtagaacctctttctcttcagtcttcttctgtttttcacttgcacattttcttgttaaaacaaactgattttttttaaactgttgatgtatatctttatgaagtctggtttcagctaaagatcattatattgcagggaaaagatagttctattttctataatgaacatatgctttcattttgttaataatcagccagtcaagattttataaaagacacatacagatgttggtaaagaaattccaagtttgtctgttcgctgttgttgtagtgttttaatatagtctccaaaagaagtgtagagatagcagacctgagaaagagttatcatcatttttggtatatgcaactttagcttccttcaggtaattactgttgatcctttaaatcttacatgcttattcgttgaatgcatttgtactttatataaaaatgtataagcagtagagtctacaagtggttcagggtctgtctgcattatacctaagaaaacttaatgaaagacttaagttatttataaaagtagtgggaggaagaaactataacatgtctgtaaataactgaaataaatagctggttatttaaaccggtgtcttggaaacccataatctaaaccagttcctgagcccacatgggaaaagaagggaaccaactccttccggttgtcctctgacctccgtatgtaagagcccggattatgtttagcattacgttggtggcatgtggcttcttgattgttttcagggtacgttagttgagtaaagaccattgtacttggtatccagtgaccacgtgtgttctctgagatatatggatacagtcgtcctgggactgtaagttttctggtttctaaagtggaagttaaacatgtaaagaataatgattaagaaaaaggcacacagcaaaagtgaaaataaagagtgcatttttattttatcaatgtaagcagtgttattatgagtttatgaaacagttctatagggtgaggttgttttcctgtctgggtaatagattttatgtaggtgttagaaataattcccacatttggaattgtagcatttatctttggatacttatttctcatggatttctttgatcaatcttggataccattactctttaactgtagcatccctgcaacttttaataactcagacttctcagtgtgaaggaataattttatatacttatttatgcatcttcttccatgtttgaattgcatgggaactcagttataagattcagttatatgatcttgcacaatatcattaaacagtgtcataccagttcactggctcactctcctggctttgttctctagaattgaacttcaagaaattaattgacaaaacagcttgggtgggaacttcctttgtatttaaattcatttcttttcctatagttatatgagactgttcatttttttgtgaacagctaaattgtaattttctgtcatttcttgacattgccttttattatctcctgtacaccaaaaatattcctgtggagattggtagaaacatctgccctaccatgtatcattattgctaatgtattccatattttcatgtttctggaatagggctcatgaatacatattctctgttcatcctttagtgttctgcctagtctattagacacaaatttagaggcctcagatgttaagaggtctgctttctctagggatatgatgctagccccaaagacagagtttaattgcatcatgatatggagtgctggctcactgatgagttgcttcgactgatacgtgtttggacggttgccagtatctgcacccagttctagacaaagattgttctgcatggggtgtgtgtgtgtgtgtgtgtgtgtgtgtgtgtgtgtgtgttttaaagcctcgcctgctgtatatcattttgatattttgatatcctacttcaatctgtaggaagagttttatggaagaaaattgattcttgctgacagagaagaagtagaacaagaagcagataatatttttaaggatgcagatgtcagtgatgttgcgttccttgtggttggtgatccatttgggtaagtgaaaatagacattgtgagtttctatttatcagcaatgattattctgctcaaacatttctttgtcagggcctgttaagtttacctgaattttacttaaaaattttccgtgaagagtatctacttgttaaaaatgacatcgtaagtatgatcctagtaagccttaagtccagcatttgtttctttcgtgcctttgtctttgtacagggttataaaggtgtcagacacctttaactaatgtgtcattattaaataaggctttacactatcgaaagtcaggtctccatttgctttgataattgcagccatctttggcttccattgttctaggcttcccccgccccttctcttttaataatctaatatttggcaataatgctgtcacttacttgccttggatttatcatttatcaaacctctgatttcaatgtcccttctccattgggagcactgctcctcctcattaccaagaagatgggtttctacttgtccagtcaagcctcatcaatctctagtgtcaagccaaacacaagagttctttgtctacagctggtgacccaagatttatgtcacagatttggggaacataaggacaattaaatcactctgggcccaccatcaaggatatttctcaaaacaatggagttacattgttttgcgtctgtcataaggaaataatttatgtcagtatgcagggccatagagtctgtatggttattatatttaattgcaaattatattgggaagtcactataaaatatttaaattactttagcccctgtctaacattgttttctgtaaaattaaggcttcatactacctttctctttctttttagcaataggataataaaaggaaaagaaaataaaaaaatcgtattcagcaaatgtctcctttgatatagaattttctcagtaatacgttgactccatctgtctaaaacctgtgtcttttatagagaaactctggcccagacttcctaacatggtggtactgcagatcttacagtcacctgatgagctggctcagtcactgatagtgtccattttacagtaaaattgctgctcaaagcaaggcttctagattggtgtcagcccacaaatttgccaggctagatgaaataagtagagaaatctagagtaagcattaaaactagtctaaccacttaaaaagtaaaatttgttatctactgatataataagaaattggagtttatactttatattatctcattcacattatattttaagtagtttttttattctagagaacttatgactatatacaacaacaacaaaaaagttttcaccatattctgagaaacacaacagttggtttttatctatttatttacttattattagctagatttttcatattttttatttctttttacttttaatacattattttaaccaggttaatatattctgccccctttgcttagtctacatatagacataacagactgttaactcatttcccatgttatggtcaaatatgtatgtgtaaagccataacaatttgaaaacatcagctgaaaactgcaagtccattattagccaaatatggaaattttcccaacctgctcttcaagtctgggtcctgccattcttgtcctgagaacacacagatgccagccaacacatgacatcacactctttcactctcacaccttagatcgggctcctcccttcacctgtgtctgtcagaggcccccacatctgcagctcacggctctccatgaatggtcctttctcactctaacctgaagttatagctccacttggtagattgaagttattattgacagctgtattcgttacctaatggaactgtgaccaaagttccccagggagcagcgagaggaaagatttattatggttcatggtttgaggggtttcacactggggttgcctggccccatgctcttgggtatcatgacagaggtagcaggtgatagaggagctgcttcatctcatgccagtcaggaagctgagagagacaagatgccaccaaggacctgtccccagcagtctgcttcaggtagtcctaccttctgaaatattcagaacctcccagatagcaccccaggtcgctggggaacaagccacagtctatgagtcttttcaggggatactttagacttaaaccctcactctgtcagctttcacacagttcctcacaatattttacaataactgcgtgcctttactacatgtggatttgtagatagtccttcatgtctctagctcttttgttttattcataatacttggcatgcagttgctattgattaatattaattgaagaactttggaatagcttactgaaagtcaataaagaaagacaagcatattttgaattgacagttacctgttcacccagatctttctcatacacctcctgggatatgacgttctattttactgagttggcaagatacggactcatggtagagtgggaggggtcaacagtaatgacggaaaaagaaagagttaagtttggggaagtctgtacagaggaggggagagaggtagagagagacttacctatgcagggtaatatgggaaagcctttctttgacggttctacataggcaagtgactgaaatggggtcagaggcctgtcgttccaggcagagcaggcagaagactggggaaggtgctgaaggccacagcggctggagcaggggtggagggaataagaaggtgctacacagataaacaggagctgtccgtcgctaaggctttgaagggatgaggaatcttatttgaaagacagtggtaaacctttggaggattttaaagcaagaaacaccataatttttgttaaaaatgtttgacttgcttagtgtgagtagatttctaaggaggcaggggtgtttctaatgaaggaagaaaggaacagtatagaacatatttagaagaaaggcattgtatggatttaatagatgtggaaaaggaaggaaagaactctgacttaaggactggttttagaagcaggaaagccggtcattgtggtcatgaagtcactgatacatgagtggtatttaaagctagaagagtgggtaggatccccagagaagacaaacctaggaacaaaaacagccctaggaaaggtgggcattctgtgctgtgtggccagagcagaggggaaacaacaggatgtccttacagaagctggaaaagacgcgagtgtgctagtagaagaatgtgcgtgagtgggcgtcgagttggatctggataaggctctaaagagaggcctgcagggtgggtggtgggaaggaagggggacagtgatgtgcaaagaaaactgatgggcagagcaagtggcttcctgataattgcagtggcgtgcttcattctgtgactctctacttttccctgcggtaccctcgtcattgctatgttagaccataagttttacggtggacgtttctcaggtgtgtttgcagtgttgcactatttgaggacttgctcatctacctgggtttgagataatctcctgcaacccaggctaccattagtgtccaaaaccagccttgagctccttctggtcctctggcctctgccttccaggtgccatccagttgctaactgtagattctttgggactgttcctctctgttttgttcctttagaactcttttaattaatttgtcccatctcagtgactgattatctagagcttcgtgttagagtaaagtttaagtaatgtttcctacactgtagttgttttctggtttctgctgggttcctggtcagatatagttggaaatgggatgttaagaaagatgtcattaaatccaattagttaattaaatttgtttgttcctgagttttatttttaaaatgagatctcagtatgctgcccaggctagccttactccagtgattctcctgcctcagctttctaagtgactaactgggactgaagtcacataaataactacactaaaattttgtctcattagtcaggccatgatgaacacattcactgacttgctgaaaccaggaaaaacatgaaatgcaacaaaatactagcatttttattacaatatgtatgacaaaatgtttaagttcaagcatctttctgtttccttgagtggcatctgaaaagatgattggcaagatgggttatataggagagtgtctactgtgacagcctgggaacctataaagagataattaaaagccataaactccccactccccttggatccaggctattgaaagggaagtagaaattaaccacaggcgagtgtactgattctaaatggtacatcaatacccagcttagacatgcagagatatcaagagtatcaggcaatctgttccttactgtccatagaaggagttatcattaaagacccttctaatgttggttctgtttcattattcattttatattttaacatacactgtgactataaatatatatactgaatttataatttttattttcatgctgtgtatcttttccataatggatcacgtgtacagctgttcctttattgacctgtcctctccgtgtaacttatctgacccgcatttggtactcaatagctaactgtccagtacatggtgtcaatatattagtctgttctgttaagcaatacaaataaagctgttggtttctccaaaatacataaagcttgttatacaaatgtgtacggacactcagtttcttttctacaatttgcattatctctttgtggtagataggttttaaaataaaaataaagatctgtagatatggacattttctagcatataaagcaactttttttttgtttttgtttttgtttttttttcagtttttctagacagggtttctctgtgtagccctgcctgtcctggaactcactttgtagaccaggctggccttgaactcagaaatcttcctgcctttacctcccaagtgctgggattaaaggtgtgcgccaccacgctgggcataaagcaactttcaaatgacttttcaacttataatgtttctggtagttcttgattgtttccatccactttgaaacagtaaatttccagaacaccacccccaccaagggcccctctggcccactctatctcccccccccccccccccccgttgggggggcttggttgaaaagccctttcattttggcccctggggtttccctccccttggtttttttggctttttttttttgaaattgcctcttaaacatttctatttgcaagggggcgctataaggacaattggcttgactggtttggtttttgccctcatcccctaatttgggggttggaagccttttcggggtggggtgtgttccggtgtttccaaatggatgtgggtggggttaatttttagcagggttttttttcgttgtttggggcttccctctgggggattttaaattaaaaaaatatcccttttcaaaagctaatgtttttttctttggtcttaattgggggtaggtttttttggtgggggtttaaactctttttccttgggaatttttaattattcttaaaacaannnnnnnnnnnnnnnnnnnntcccaatcgccctccagacgcacactggcaggaacaaccggagggacttccctgaccgaccccgcgtttgctcagctttgaattcccgctctgtagatctgtcgcaatttaaccagaagtcaccctggtgaggggacagcccccccccccccccccgtcatggtagcattgctgcagatgccctttcatcatgtacctgggtatttccatccactgcatcattttgcatcttttcttttgaaattgcctttaaaacaattcgatatgacaagtgtgctgttaaggcaaaatgtcctgactagttctggttatgtagctcagttcctacatttggtggatagtaagcctatctgtgtgtgtgttgtttactgattatttcaaatgagtttgtgatgatgataaattttaaaccagtttttctttcatctatttaagtaactcacccataggcaatttaaattaaaaaaaataacaccctcatcaaataactaatttacttttccttgtacttaaatttggtagtaagattctgttcaaggtagtattaaaaacattctttacatttgacattcttgttattttttttaaacacttactataaatgaaattgctgatcatttttatactggttttattttatgttgtgtgattgaacacaggcttccctggtgggcacgttttaatctgtagctggctgcctcatggggtgtaagcccttgatctgcctacttggtatgcattgaccagttgacagattctgcttatttctaagtactttctcaaacatgctaatgttgctttccccagtagggcttagcatttttatcaagatgaaaaaaacctctagtaatgccattctaaattgatgtgagattacatgtcacagtattcaatttatatgtacataaactcccttcccccacaccaccgccagcctacttaggtataatcacacatttcaaaagggaaagttaatagtcagaacacacacacacacacacacacatacacacacacactgtacagtaaccagactgaaaggacctacagatggaaagattgcacataattatgaactccaaatggaattctatcaggcagaattttaatacgttgaaggaacaacaggctgtgaacatgtcctgtgttttacctgtagttttaaaatatgaaaacaaatcccagtggggcagaattggtttagctgcaccacatatagaactgtaaaggagaaaactcagtcatgtaagttgtcccacttccatgtggaagccaaacattaatgtatagaaatagctattaggataactgttccccgtgcctgggaagagtccggggaaggggctggagtgacgatggtcgtcactggcacgggcactggcacagggcgaagcggagacagagcaattctaataacttacaatgcaaaggaaactatggttggtgacaattggatatcctgaaataaatagtaaagaagagtctgagtattctgaacacaggaaaatgataaatgaggtaataagtcattttgatcattactcatatacatgtattgaaatgccagttggattcattactaatggccagctaaagtttcttaaaactaatctaaagaagtcctgagacaagaatcaaattgctgagtttatatactcgaagcatctttagcagacatcaggatatggcatgtccctttctgtaagtgctgccattggaattccatcttgtgagggatgtggatagacgaacactgcatccctaaaagacccgaataaaggaccactgcaggtgcctagtggaatccgaggaagaacagttgtctctttgacttgaattcatgagttggatggaagattaatgccattcacttaactcaacctgttttctcactacagggctacaacacacagtgatcttattctgagagcaacaaagttgggcatcccttatcaagttattcacaatgcctccataatgaacgctgtaggctgctgtggtttgcaggtaatgccacaaaggaagtgtgttctgtttcctggaagctataagttgattttatttcatgaactgtaaagcttaaaaatttgagaatgtactcttcatcaatatgctggattttttaatactgtttccctataacttattatctttcctttcttgcagttctctctctctctttttttttagccctttctttcaactggccatataaacttagctacagaattattttaactttatgtaatcttgtacatacataaaaaggaaagattaaccacattgcattaagtattcctaaactctttttgtagtctttcagtgacctcatcagtacggttgagcctgagtttcccacacagtatccctttctctttcactgagagcaagtgatgctgtgtttcttaaatgaatgccgagttgtaagccagtgatgaaggcattaaggccatgtcacaagtgctggtgtgtagagttagttacttttaactctaacaattgtggctcagagagctggaaagagtgctctattgatgtttccaggacttagtcttaagctatcagcagccacttccccagtatggtatctgttctgatgctcagatccgaacaatccatggccgctgtggtccctgcatagtaggcagcagtagcttttaagaaactgtctatgaggatatactcaatctctatggatcttaataggaaaaaaaaaaaagcgcatcttagcatccatgaaataatgccttccctgatatatcttgctgaaatccatcacctctggctagatattctttaaaagatacacttggtaccatgagatagtccagtgactatgcctccaagtgcagcagcctgagttctaactctgggacccacccacatggagggagtgctgactcttgcaagctgattcccatgtgcatggtatggcacgccccctctccagttcaacaaatgtttacaaagaatgttaaaaccagctacttgttactttggaagaatatcttagttttgtttactaattaatactcatcatgcattttaaaataatttgattgtgaagaatcacataaaacatttacacgagtctgtttggtacttaaccccgtggtcttagttatttattacatgtgcactggtgtaaaaatttgtatgctttttgtttaaatgtatactacaactcttgccagtttgtatagttgaaagcatttctatattggagcagggtggaactctaaaatgttaatgctacaaagaacgtgtggggtagagaaaatggactcctagaaatgtttctgagttggtaacagagatagaaagaaaagaaaaaaaaacaaacttaaaaaaaaaaaacaacccttccctttgggcagtaataccttgaaagatttaatggttactaaaaacaaaaaacaaaaacaaaaaaatcaaaacaaaaaaccacacaagaagaaataaattaacatgtgatttaaaaaaatgacacagaaatatcagattaatggagtatacacttttcatgttggttttaattttcggccttgtgaagaaagtagccctttattgtgtttccccacaagtattgtttttgttttattttcttaaacattaaaaaccaaatacctccaacagtatctgttgtgcagactaaggactaaatttgctcgccctgtccttacaatcttggattgtatcaagaggtgactgaagaggtctgtttgggaagggatttgctgtgagatttgaccgtttccttataagcccctgagattgtatttacacttaatatattgctttaaaagatttagctttcatgattgactatgtctttctctagacagctgtgactctgtccccgtcttatgtcatagtatctgtctgtgaaatgatagcgtctgtgcggagccggctgtgccctactcctctgcagagccatctcgagctccaagagcatttacattttagcgagtactcaagtgctgctgcatctgtaggacacgccttgagaaccaccaacacaggccagtgaaggacttagaaagtgaacgtattgactgagagagcagaagctgcctaccagaactacacctgccacgtggaggatgttagcgggctcttccctgtgttctcttgcttaagattgcaaagggaagtaggtttcacttttgggaggtgtcctgacatctctgaatgctttgccacaatttcaaaaacaggcatcaagttgttgtaacgaaggcctgcttggagtgccgtggaagacctagcaaacatgcctcctgtcatcttcacctcagtgcagagcagctacagactccaaaccaagagtaggcacaggcttttccactgtcggtttgtcgcccctctgaagctggtctgtttttgttattttctgaaggagctggcaagggctgttcagaaatagagtagactactgagtagtctccttatcttggtagtttattggacagcgggagattgttgtaggtcagtgttattgatggcagtggagggtcgtagggttctgtaccacaagtatcatccttagtgagcatttctgttttagaagcttacaagttagacatccattcagcaaatactgtatctctcctcagtgcctgctgggtaagcgccttgggatgcagtaatgaacctgtcctccaggaccttgcggatggtagtctaacttcctcattcttgtgaacttcccctttctctggccgttgcctaagtattgccatgtgtccctttgtttatgtaatgcacgtctactctagaaaagtgtagatcactttcaaaaagtaacaggctgttttctgttttcatcccatgacactaatacttgttactgttgatgtgtagcattcctaatgttaggcttcccagcttcaggtagcttcattgtgggctaggacacatgtatgtagtaatggatggaaatacagcaccgcaaagggacactgagctgggtaatgaggagagcagagctctgcatagccgtcgccacagaactcacctaagctctgtcttagtatttaacaactcattagcatagttattaaacattttctattcccattaactttcttttttaatttttatttaactttattttgatttcgtttctatttttattttccttcagtgtaatttgccttttaatttgtgtgtgtggtggggtgcatgtgtgtcatagtaaatacatataggtcatgtgacagcttgtattataggttcagtccttccaccatgtgcatctcaggggtcaaagtcaggtcattacagttagagagaggcaggtggctttaccctctgagccagcttgctggcccttggtttaattttctgagacatggcctggttatatggctgaggctggctatgaacttgccatctctctaccttagtctcccaagtgctgacatgccatgtgtaccaccactgctcctctacccactgttttcgagcaccgagtcatcgctctttctagattgtgggtctcactgagctgttctgctcagacagctcggcagatgcctctcccatgtgcagtgtcaggggtcacagatgcctctcccacgtgcagtgttgggggtcacagatgcctttcccatgggcattgttggggtcacagatgcctcttccatgggcagtgtcgggggtcacatagttactatcagatctttagcttactcaccttcacattccccattgcatttatcacagcaccataaaaacagcctatgtaaaaccggtatttcctgaggcagactgcttatgtgtcttctgctttccaaatctgttattgtctttgaagtaatatgctttaaaatagaattctttatagttagtccacaaatggattcccacttatatatgaaatcaagatttttatagttcttctctgacatgtcatagtcaacatatgtacctcatatgtaaccatatttatcatcttagtatcagcaaaaatcaatgtaatatcattgaaataaagttcattctggataagagcaatgacaacaaaatgtctccaggatcagtactctgaacagacaagaaaactagtcgttcttgagtctgtgggtttgtggtgggcagtttgggctgactttgctttctcttcgtgttcacggatttaacatgtggaacctaatggatttcttttaagcaaattacaatttctaatatatatatataatatatatatatatatatattctcacatttaagaaaacagtaaaccacagaaaatattttaaatacaagataacaagtgttaaatcctaatagagtagagttttacagagtacctgtactgggtacttgtactgtacacgatggctcaggaggtaaaagcgcccagaacctacagtgtggaaagagagccagcttgcacaggtggtctttgtgtgccacatgcatgtctgcacatgtgtgcatacacacgaaatagatgcataaatgtaacagtgttgtgtctggacttgtgagtagatggcactggtggtagcagtgaggtgactttgaggctgtcagagccattcagacaagtggtgtcaggggcgcaaagcagtggagagctgtttgagtagtcagcatccttgggactcatgcagctggagtagatgggactgggtgctggggaagctatcagaaatgtgagctgcagattagaggccagccaggcacagctcgtctttctaggtaattgtttaagacccctgtccgtagtccatcctcattcttccccgtgctcaccctgcaccttcatcccttttcctctttaactttcacttcacagtctctttctggactctttcgggggctttttctctgagtgtggcaaatgtcctctcagaataggtagtgtccacgtgtcatatcggcagggccgggttacagcctggcagtcatcttccttatgcatcctccccctccgtctcaatagtgagtaccttacacggtggctggttggatggatgaagggttctgtcttcctgattttgtttttcttttttctttagcaaaacatgatccagcatcaagttagattggctgctttctctctaagttattgcagatgaaagcagaacagatctatgtttcccctagtatttctgaaaaaatagctgcttttgtagtttccaaacttaggtttaagcagtaacattgccagatctgagacaataatattgtcgggaagaatggtggtagcacacaggccagagctgtaagacagctggtgttcaggcttctgcaacctaaattcttgctgctgagatttgctccagttgctttttacagtttgctggtaagaccttcggttgtgaaacgcagaaagctgatctttctgctctttgaggtactagcatctcagtggtgaaactgtttgcataatgttccagcatccattgaagaagtttgcacccttgccacaggaggcagagtagccacagttataaatcagggtcctaaaggcagtgcctaagtgagatggggcagctcacagtctttcacacagaacactcctgttctgttagatgtgactagcatcccaattctctattcaaggcttgctcaccctctctttgaataaagaacttagcttccttgcttccatggttttgtttccatgtttcttaaaatgttagagcctcttaagtatataaaaatacagttttctcctgaaggcttttatggaataagtgtttcaagtttgatgggaggtgataagtcccctttaagatgtctagttgaacttgtactaagagtagttgtgcatatttagtagttttgatctcagctaatgaagagagcagtttgattttatcaagacacagcagttcagaacatcttcatttagtcatgagcattattacatcatatactcagccctagccgtgtttcgaggcatgactgggtactcagtacgcacttgggtattcaatctttacaaggattctgattatgctcactgtgcaggagggtcctttccagatccaaggtgtcatttgatttatcactgacctcatagctaaccagaaccgctgttgtgagcccagagcctttgtcagctctgagagctatcacctttttcacagggccagagattcatttcctcatcattttaaacatgtgtctactatgtgccttgcacatagtaggtgatttatagtcactctttgttgggtgaattggtttcacacaggacagaggaaatcctgctagacagggcaggaagtcacaacgctgaaaacttggagcagcatggtctttgtacagtgacctgtgaacacagctcttacagcatgtaacatgtagcttggcttctctgaggatgatttgtttggataactttcaaatgggctttgagaataaagctccttaataagtaaattggtgtctatatcacactaaggacgtgatgaccatcccttcaggactcaggaagtgatgtgactgtgagcttgtaagacccggcatacagaacttgtaaggcccggcatacagagcctgagaactgtaagacccggcatacagaactgtgagacccggcatacagagcctgagaactgtgagacccggcatacagaactgtaagacccggcatacagagcctgagaactgtaagacccggcatacagaactgtgagacccggcatacagagcctgagaactgtaagacccggcatacagagcctgagaactgtaagacccggcatacagaactgtgagacccggcatacagaactgtgagacccggcatacagagcctgagaactgtaagacccggcatacagagcctgagaactgtaagacccggcatacagagcctgagaactgtaaggcccggcatacagagcctgagaactgtgagacccggcatacagagcctgagaactgtaagacccggcatacagagcctgagaactgtaagacccggcatacagaactgtgagacccggcatacagaactgtaagacccggcatacagaactgtgagacccggcatacagaactgtaagacccggcatacagagcctgagaactgtaagacccggcatacagaactgtaagacccggcatacagagcctgagaactgtaaggcccggcatacagagcctgagaactgtaagacccggcatacagagcctgagaactgtgagacccggcatacagagcctgagaactgtaagacccggcatacagaactgtgagacccggcatacagaactgtgagacccggcatacagaactgtaagacccggcatacagaactataagacccggcatacagagcctgagaactgtaagacccggcatacagagcctgagaactgtaagacccggcatacagagcctgagaactgtaagacccggcatacagagcctgagaactgtaagacccagcatacagagcctgagaactgtaagacccggcatacagagcctgagaactgtaagacccggcatacagaactgtaagacccggcatacagagcctgagaactgtaagacccggcatacagaactgtaagacccggcatacagagcctgagaactgtaagacccggcatacagagcctgagaactgtaaggcccggcatacagagcctgagaactgtgagacccggcatacagagcctgagaactgtaaggcccggcatacagagcctgagaactgtaagacccggcatacagagcctgagaactgtgagacccggcatacagaactgtgagacccggcatacagagcctgagaactgtaagacccggcatacagagcctgagaactgtaagacccggcatacagaactgtgagacccggcatacagaactgtgagacccggcatacagagcctgagaactgtaagacccggcatacagagcctgagaactgtaagacccggcatacagagcctgagaactgtaagacccggcatacagaactgtgagacccggcatacagagcctgagaactgtgagacccggcatacagaactgtaagacccggcatacagagcctgagaactgtaagatccggcatacagagcctgagaactgtaagacccggcatacagagcctgagaactgtaagacccggcatacagaactgtgagacccggcatacagaactgtgagacccggcatacagagcctgagaactgtaagacccggcatacagagcctgagaactgtaagacccggcatacagagcctgagaactgtaagacccggcatacagagcctgagaactgtaagacccggcatacagagcctgagaactgtaagacccggcatacagagcctgagaactgtgagaccccggcatacagagcctgagaactgtaagacccggcatacagagcctgagaactgtaagacccggcatacagagcctgagaactgtaagacccggcatacagaactgtaagacccggcatacagagcctgagaactgtaagacccggcatacagaactgtaagacccggcatacagagcctgagaactgtaagacccggcatacagagcctgagaactgtaagacccggcatacagagcctgagaactgtaaggcccggcatacagagcctgagaactgtgagacccggcatacagagcctgagaactgtaaggcccggcatacagagcctgagaactgtaagacccggcatacagagcctgagaactgtgagacccggcatacagaactgtgagacccggcatacagagcttgagaactgtaagacccggcatacagagcctgagaactgtaagacccggcatacagaactgtgagacccggcatacagaactgtgagacccggcatacagagcttgagaactgtaagacccggcatacagagcctgagaactgtaagacccggcatacagagcctgagaactgtaagacccggcatacagaactgtgagacccggcatacagagcctgagaactgtgagacccggcatacagaactgtaagacccggcatacagagcctgagaactgtaagatccggcatacagagcctgagaactgtaagacccggcatacagagcctgagaactgtaagacccggcatacagaactgtgagacccggcatacagaactgtgagacccggcatacagagcctgagaactgtaagacccggcatacagagcctgagaactgtaagacccggcatacagagcctgagaactgtaagacccggcatacagagcctgagaactgtaagacccggcatacagagcctgagaactgtaagacccggcatacagagcctgagaactgtgagaccccggcatacagagcctgagaactgtaagacccggcatacagagcctgagaactgtaagacccggcatacagagcctgagaactgtaagacccggcatacagaactgtgagacccggcatacagaactgtaagacccggcatacagaactgtgagacccggcatacagaactgtgagacccggcatacagagcctgagaactgtaagacccggcatacagaactgtaagacccggcatacagagcctgagaactgtaagacccggcatacagagcctgagaactgtaagacccggcatacagagcctgagaactgtaagacccggcatacagaactgaaactgagacccggcatacagaactgtgagacccggcatacagagcctgagaactgtaagacccggcatacagagcctgagaactgtgagacccggcatacagagcctgagaactgtaagacccggcatacagagcctgagaactgtaagacccggcatacagagcctgagaactgtaagacccggcatacagagcctgagaactgtgagacccggcatacagagcctgagaactgtaagacccggcatacagagcctgagaactgtaagacccggcatacagagcctgagaactgtaagacccggcatacagaactgtaagacccggcatacagagcctgagaactgtaagacccggcatacagaactgtgagacccggcatacagaactgtgagacccggcatacagagcctgagaactgtaagacccggcatacagagcctgagaactgtaagacccggcatacagagcctgagaactgtaagacccggcatacagagcctgagaactgtaagacccggcatacagagcctgagaactgtaagaaccggcatacagagcctgagaactgtaagacccggcatacagagcctgagaactgtgagacccggcatacagagcctgagaactgtaaggcccggcatacagagcctgagaactgtaagacccggcatacagagcctgagaactgtaagacccggcatacagagcctgagaactgtaagacccggcatacagagcctgagaactgtgagacccggcatacagagcctgagaactgtgagacccggcatacagagcctgagaactgtaagacccggcatacagaactgtgagacccggcatacagaactgtaagacccggcatacagaactgtgagacccggcatacagaactgtaagacccggcatacagagcctgagaactgtaagacccggcatacagagcctgagaactgtaaggcccggcatacagagcctgagaactgtaagacccggcatacagagcctgagaactgtaagacccggcatacagagcctgagaactgtaagacccggcatacagaaatgtgagaccgggcatacagaactgtgagacccggcatacagagcctgagaactgtaagacccagcatacagagcctgagaactgtaagacccggcatacagagcctgagaactgtaagacccggcatacagaactgtgagacccggcatacagagcctgagaactgtgagacccggcatacagaactgtaagacccggcatacagagcctgagaactgtaagacccggcatacagagcctgagaactgtaagacccggcatacagagcctgagaactgtaagacccggcatacagaactgtgagacccggcatacagaactgtgagacccggcatacagaactgtgagacccggcatacagaactgtaagacccggcatacagagcctgagaactgtaagacccggcatacagagcctgagaactgtaaggcccggcatacagagcctgagaactgtgagacccggcatacagagcctgagaactgtaaggcccggcatacagagcctgagaactgtgagacccggcatacagagcctgagaactataagacccggcatacagaactgtgagacccggcatacagaactgtgagacccggcatacagaactgtaagacccggcatacagagcctgagaactgtaagacccggcatacagagcctgagaactgtaaggcccggcatacagagcctgagaactgtgagacccggcatacagagcctgagaactgtaagacccggcatacagagcctgagaactgtaagacccggcatacagaactgtgagacccggcatacagaactgtaagacccggcatacagaactgtgagacccggcatacagaactgtaagacccggcatacagagcctgagaactgtaagacccggcatacagaactgtaagacccggcatacagagcctgagaactgtaaggcccggcatacagagcctgagaactgtaagacccggcatacagagcctgagaactgtgagacccggcatacaggagcctgagaactgtaagacccggcatacagaactgtgagacccggcatacagaactgtgagacccgnnnnnnnnnnnnnnnnnnnncaggagtgagtatgtgggttgtgattttattgagctgatattatggataagaacctatgttcaaacctaagtttgtgtatttatttatctttacctgtgtgaccttaggttagtcaattgttcttagtcttatcagtgaaagggaatattaaacttgaaacctattgtaagtcctgaaagctatttttatttctgtggttttttttccttaggtttgattaattgattgactgactattgatttttagtttgtaatgtgtatatgggagcagtaagatcatgcagtgcaggtgcccacagaggccagagggctgacatcttcctggcgctggagttgctggtgactatgagcttctcagccttgggttccctgcaagtgtgatactagcaattgatgctgagccttctctcagcctaaaccatgtcttcagcctgatttcagggttcttgacctaacagtagtgattgtcgtatcattaagtacggttttctttttctagttgtacaggtttggagaaacagtttctattgtgttttggacggacacttggcgaccagagagcttctttgacaaggtgaagaggaaccgggccaatggcatgcacacgctgtgcttactcggtgagcgttgggaaggccttagacccccacacggtgcagctgtcacaagcctcctatgttcattttgtgatagaactaaaactaaacctagtaaataactaggtaggggtggcagggaaagaacacaggctagccaatgtatgcactcagcgctcttcagatgctcagcaccaaatagcacataaattcatgtccatgctgagacacgctgctcccaagagcctgtatttacaagtttgtccatagttcttacagttcagcatttattcttgtcaccaactattctgctgcttctaggatattgtgcatccaagtcacaaaatgctccttctggaagacactccaagatcatttagttcgaagctgttatgcagatgatgttgaatactgagcttttcccagtaccgttcatttactcgttaacaggacagaatccaaacgccccgcaattcccagctcccttcactgtactgtcgtgcccaagggttatttcctgtgtaacatagatggctaggcctgccttgtacaacacgataatcgtgcatttcagatgtgcgtgggctttgcctttctagcagtgatcacaaggtttaacannnnnnnnnnnnnnnnnnnntaaataactaggtaggggtggcagggaaagaacacaggctagccaatgtatgcactcagcgctcttcagatgctcagcaccaaatagcacataaattcatgtccatgctgagacacgctgctcccaagagcctgtatttacaagtttgtccatagttcttacagttcagcatttattcttgtcaccaactattctgctgcttctaggatattgtgcatccaagtcacaaaatgctccttctggaagacactccaagatcatttagttcgaagctgttatgcagatgatgttgaatactgagcttttcccagtaccgttcatttactcgttaacaggacagaatccaaacgccccgcaattcccagctcccttcactgtactgtcgtgcccaagggttatttcctgtgtaacatagatggctaggcctgccttgtacaacacgataatcgtgcatttcagatgtgcgtgggctttgccttctagcagtgatcacaaggtttaacatgtcacgtgtctcagagcctctgccgagcttatataatctagaaaggaatactgggaacatgttcatgtttctccagatgcccagaacatagctggcatcttaaattaaccttgaaatgatatttagagttggaaccagaagataaaatcctagagtctctacttaccagctagaaaataattgagaagcaattcttggcttttgccttcatattgtcaaattaaaaacgacaacaacaaaaccataaaacaaaccagttggggtagatttctttattattctatttgtatgtgtgtatatacatgtgcatgccacagcacatgtgtggaagtcagaggataacatgtggaatcagttcattagctctctccttatactgtaaagctcctctgaatcaaattcacgctatccttgtaagcagcaagcatgtgtagccatccttgtaagcagcaagcatgtgtgtttgcttagccatcataccaaccccagtcacaggtcaatcctttttttttttcttggttgtttatactatgatggtggttgagtaagaatggcccccataagcccatgtatttgagtgcttagtcatcagggagtgggaatctggaaggattagaaggattaagaggtgtggcctgttggtgtgggtatatccttactggaggaagtgtatcaatgggggtgggtcttgaggtttccccattgtatcttcctgctgcctatacatcagaatgtggaattctcagctacttctccagcactgtatgtgcctgcatgctgccgtgctccctaatatgatgataatggnnnnnnnnnnnnnnnnnnnnatttctttattattctatttgtatgtgtgtatatacatgtgcatgccacagcacatgtgtggaagtcagaggataacatgtggaatcagttcattagctctctccttatactgtaaagctcctctgaatcaaattcacgctatccttgtaagcagcaagcatgtgtagccatccttgtaagcagcaagcatgtgtgtttgcttagccatcataccaaccccagtcacaggtcaatcctttttttttttcttggttgtttatactatgatggtggttgagtaagaatggcccccataagcccatgtatttgagtgcttagtcatcagggagtgggaatctggaaggattagaaggattaagaggtgtggcctgttggtgtgggtatatccttactggaggaagtgtatcaatgggggtgggtcttgaggtttccccattgtatcttcctgctgcctatacatcagaatgtggaattctcagctacttctccagcactgtatgtgcctgcatgctgccgtgctccctaatatgatgataatggactgagcctctgaaactgttagcaagccccagttagtgctttgttttataagaattggtcctggtgtttcttcatgacaatgaaatgactcaggcagttgttgtttgccttattaaacttcatttatttatttgagtatggagtgtagggtggcagcttccatattctcaagccatggagctcgtcatgtaagttagcatgtggttgttgaatgccagctgtgagcctgcctctttagggttaggaagaaaaagcttcggaggaaactatacagaacttatcatttatttaaagacaagatatacgtgatattgttagaggttagtagaacattagttacatacatatttttaagtacaaagcattagagtagaaatcaacaaaggctgcatgaaataactggcacttactgcttcagcatggtttcagatgggcctgggagtaggtagtaggggagcaatgcccacactctcagtagacatctggggttccatctctttcagtaaacgtgttacgttttacaagttcaaggtgaatgagttaatagaggtgtttaccttagtattgaagacatcatttaaagtaaagcatggtttctactactaattgtatctgaggccattttttcaataacattcttttttttttttacgtgccaagcaaatagaactattaaataatatttcacatttgggaaatccttaccattagtaccccaaacattgaaaaccagataagaggttgatcattgttttaatttctaggtaaactttttagtatttgtcaataaggaaagcttttgctatcactttagaaagttgtagaagcctgtcagagactcttcagttgtaacatatttatttctacaggaacaaactttggctgagccattcattttgcatgtaaaacaggaagcagctgttgaccttgtgtgaagttcctgtgaggacacagagccagtctggcttttcagcatttccaagtagttcagcgaggcagcagtgggagtgtatgctaaggcccaaatctttgccatggggccctgtcagatatcatgagtatagtgattgtgtgcaggtcactgttgtacctggtatctggcatagaccccggaagccctttactaaagtattcattccatattatggtatgttgtgccctttgtaagaaagcaaacatttcttttgaaaatatggtaagaatctatttttgacctaggtgtcatcgttgaggcttctatagtctgatgcctgcaacacagatcagtgtaggagtatgcgctattaggtattagctattaggcagcacacatgctgctgttagctaatgctttcccttatcttttccagcaggaactagatccctgcagggtggtgtcagggccaaactcctgtttgctttctagcatggggcctttccgcagccacaggcttccactcctctctaaccttagtaggaaagtagccacacacaaatctgagcagacaccacaagctcaaagatctgcatttagagggctctggaagatgaaggatgtgtggtaaaataactggactgaaagaggtgtttttctccctgcagatatcaaagtgaaggagcagtctctggagaacctcatcaggtgaggctgctgaggggagcacttctggtttaactcgctgacaaagtccgtaagttctactttagttacccaagtctaaagatgcttgagaaatgagctctcagaacagttccacggtgaatatttgcctcatacaaaagagagagcggggtgatcgggtgaaagaaacaatagaattcatagctccaacactgagaacagtgacgggcatttattggtcacccagtaaatgtgggtggaaccagttaatgtgttgggagttcaagcccttggctttgagtctgacatcagcttctgcttgctgctccctttgggctcactcccccgtgtatgaggacggggtcctctctcagtgaggaggcagcgtggactacagcagctccctcacacatgccagtgagcacctggaatacggctgatgaagctgaggaacccaaggttttatttcattttacactagtaagttcaaaaccttcaggctgtttgagacaactttaatatataaatctattttttaaatatacttttattccttgagaatttcatacatgtgtacaatatatttagttatgccctccctccagtgaatcctcagaagtctattttatgaccaaacattttatatacatactaaatatttctgataaaaacataataatgaaaaagtgctgaaagtgcctctcagattcaaagacttggtataaaacaatgtttaatacttatctaatgttgtgatattagattaaatatgtttacatgtttttaaagccagttttgcctctaactggctcatgtagtgcctggagcgtttgccacgcttctgctggttagtgttgacttggagaattgttggacaataaaatgatcagtgcagactgaaactttcaggacctctcatttttttgttattgatcatttggtaaacttgccaggcttttgaagcatgcagaaataaacatacatcacttctgagaattttcagatcttgatagttccttttcttagaagtaaaaagaaaaaaatatatatataagaacatattaatacagaaatcgctaacatgctctgggtcctgggtccagccccagccccatgaaaatagcaaaccctgaagcatcccgggtgtaggctgcgtcgactcttgggatggctgtagctaaagcatcacttttaataaacataaccttgattcagacgtgtatccttgtcagaatgtccatcttgctctcattgtggtgccattgggggcagctcaggtagaacaacagaaaaagtttaagaaactcagtcactgggcacagacttggtttctacagcagtgggtatcatgtgaaggctgctgagtgagagctatgccactcgggaggacctggggaggacctagggaggacctgcactgaatgctacaccgggaaagaaggctgacatctgctctgtgcttacagaggaagaaagatctatgaaccccctcggtacatgagtgtgaaccaggcggcccagcagcttctagagattgttcagaatcacagagcacgcggggaggaaccaggtacttaggacctcgtgagagtctcctgttatccctacagatacatacgtcatatttgatacacactcagaccacacttaagcaggatcagtgcttttaccttcttacatatttcttggtgtttatttgtttgtttttgttttttatttaaaattccataggattcaagctcttcaaactaaaactgtcataatttaaattcttaaaaatgacttcttatcaaggacttataatcagattttatgttaaaatgctaatgtataaatgtttgataaaatagagagctagataccactcatttctagtctatattctgtcctacataaatacagttattctgcttttttcctgaacaacactgaaatacagaacagttttctttaggataaagacaagagtttatcttgcatgcctaataggtaggccaagtgtgtgatctacagcacagtgcgtctgcactggactgtttgctgagaactgcttgaatggtcctgtctcattctcctgtgggcactgtcttttgagctcctggcctctcttgaaaacatgcattgaggtagttttgagccatcattctctatttttaagtctctattccatgtatttattttcatgtgtgcacacttgccctagtgtacatgtggaagtcggaggaaaacctttgaagagcctctccattcaccatgtgggtcccaggaatcgagctcaggccatcagcgcatagcagcgagtcctttccctccagagagagcctgcctgctggccccgccattgcatattgtatccctgctgtgtttctttcagggccctctttgccttgtatgaatcctgtcccacttctttttaaatcacttgtcagtgaggacagctttcctaaccaagggataaaagcaatgagaagtcagctctccagctgtagctcctaaatgaatgatcatgaaaagagaaggatctttttcctgaatttaaaagctgaagtctccagaaatgcctgttatttgttatgggatctatagttcatgaagttctcttgtattaacccttgttggtagaacgtactctatcacagctaccacttaaaatacaaaacatcttttaaaatttaaaaaaaaaaagtgaagttagtatttaattagatggctgagcagaaactcacatcagtgaagttttctgagtctcctgattttgactgtgtcttggtcagtataaatgtacatcaagaatttatttaaaatataagtgtgttggggcaggagggatggttcagtccttacaagcacttgctgttcttaaagaggccccaagttaggttccaagcacgcaattgactggttcccaaccacctgtaattccagcctcaggagacacagctccctcttctgccttcatggggacctgtaagcacatacatgcatgcattcatgtgtgcatatagcaacacacacacacacacacacacacacacacacacacacacacagttaaaccaaaatctttatagtatgtgtgcgtcataaagatgtacactcagaacttgttttaggataaatattatatcattatgtggagtgtaaattccaaatggtaacgtgactagtcagcagcgacatttcagaagtcagcgtgtgcactgttactgtgaaagttgactaaggcgatggatgcacttgctgagctgacgtgctgctctctgtctccctccccaaaaacagcaatcactgaggagacactctgtgtcggcttagccagagtgggagctgaagatcagaaaattgcagcaggcacgttacagcagatgtgcacagtgagcttgggagaaccactgcattctttggtcattacagggggcaacctgcacccactggagatggagatgctaagtctcttctctataccggaatcccagagtactgatggactctgagcatggacattttctgttgtctcacgatcatttcagtgagattggggtgtgtgtggtatttatatgtcaaatggcatggctctgtcatttatgaagaagatataaccgaagtgaccaagaagaagcaggttgaacgacagcgtttggtttcctgcggcagcttcccccattccatcgtgagtttcctactcgtcagggtgcacacacgtgggcagatggagctgaaaaagggagccaagtcgatgcaaggaggtggagaccaagaataacgtgaggaaactggacaatgaatcacttgaactctgattttcagggacaaagcagcatgaatcagcaagaaaagcaaataaaagattgctaactcttcatatattgttttataatctcctttataaaaggtagctgtcaggctggagagatggctcagtggttaagagcactgactgctcttccagaggtcctgagttcaattcccagcaaccacatggtggctcacaaccatctgtaatgggatctgatgctctcttctggtgtgtctgaagacaggtaatcgtgtattcatatatataaaataaataaataagtctttttttttttttttttttaaaaaaaaggtagcagtcagcgactgagaacataccttatttggtgtaaaaattcaagtgtggcagtgtatggctgtaaccctgatgcagggtgggagcaggcagattccctgaagctttctggttagtctgtgtgtgccttattcaatgtgagacagtttcaaaagataaggtgatagctgagtgtggtgactcactccttaaatcccagtactcaggaggcagaggcaggcggatttctgagtttgaggccagcctgatctacatagcaagttccagactaccttatgaataataataataataataataataataataataatagtggaacaggatagaggaagaggatacccaatgttgatgtttgtcatcgcacgtgcacacatgaatacacatttactaaataccaattttaaaaggctcgtttgtttaatagccgtaaagtgctttgcctttgcccatctgcaatagaagtagcttcatgacagtcatgagtatttccatagcctaatcaactccatctttttgctcagtctattcatgaatattggttgaaatttttttctactttctggtattatatatgcattagctagaaaatattttgacatttcatttaggatgaaatattgtaatgtgtacaaaacatcccattttcaaattattgtgcacacaagaagaaagagacaagtagcttaaggcagttctatgttgttttcttcgggggtgttaaaccaaacacttaaatgttttaaatataaaggacttgcaggtttggtattcgaatggcactcattccctccagttaaaaactcttttacactgcatgattgttggaagacactggggagccagagggcaggctgagaactttgcctatgtggcttttcctgttgagacttttccagacattcaaccaagctagtgtcctactggcttgagatggttagtggatggaactgtgggctccaaagggagctggacactgaagaaggagcccttagaaagtaaggtgctctggagtggtgagtcttctgacctctgtcctacgtcctcagcttactccttactttctgtatgtgtacaaagagccacagatctaggtgaaaaacctggccaggggctaaagaaacagacattgctctccattgtgagagaagacagcttcaagcttgaattctgacaagttaggagggcttgataagtatgcatgctttccttcagaaacccagaatgaccgtgtactagtaaaggccgagcctggaactcaattaaggacaaagtgtttcatataatgtgaagttcagcctccataggatgaaggtggtaagcagtgggttaatgtctacaaggacaaagtttaagatggttcagaaaatggtgacagaaattagtatagtatcaataatagccttagaacagaatatacggtatggctttatgactagaaaggaagaacactgggtgacagagatgttaacataccctagactctgccactttagaactgtgcatggatggaaagcaaaggtgtttttatgagtgcagacaatgagtcttgtcatccaagaacaaaaagaaaaagcaaattggccgaagtacagaggaagagaaatttttccaacctgaggaagactaaaattaaaaaaaattaatcagaattgtaatgtcatgggggcaagatcaagtcatttttaaaatctccacactggtggacagaaaatgactgcatgtgtgtgtgcaagtgcatgtgtgtgcactcacgcatacacacgtgtgcatgtgccagtgcctgtttagaggtgacaggacagcttctagaagcaggttgtggggattgagctcggattgttaggtttggcagcgagcacttttacctggtgacccacctcagcggctccaatatcaaacagttttaaaaagcatgtcgggccaggcagtggtggcgcacacctttaatcccagcacttgggaggcagaggcaggcggatttctgagttcgaggccagcttggtctacagagtgagttccaggacagccagcagggctatacagagaaaccctgttttgaaaaaccaaaaccaaacaaacaaaaaccaaaagcatgtcggtaatgagatgtgagagcgagggagggagcagagtagagcagagcagagcaggtagaaatgacagctaaaatttcctcatttggtaaacatcaatacattgatccaatatactcagtgaactacaagcaaaataagtaggaaattcatacctgtcagttaaaactgagaaaagtcaaagttagctggaaagcaagcaaaaatgcttgtaggattagagcttaccaaatgtaatttgaaattaaaatttaggtttgtttgtttgtttgtttctcagcttggcaaacctgcatgtaatttaacctcaatgtaaatgagttaaagaatgaaaacttcaccagtactaagagatgatcagtgctggagtcccagggttgagacagagaccggagaaaggagtgcacatttggtgtttctttagcagttgagctctttattggctttggctgtcttgaagtttggtctcgatttgctttggctcttgcagtgccggggtaaaggaagttagatcacacagctttggccttgtgtgtgttaggcacggattttaccatgctgttgcccatagctaggtgtcaatgtatcaacagaaagattcagtgaatcgccttgatagtaacactgctgtcaccaagaattccttctctctgtccctttgcccgttgccctaactgttggaaaccagtgatctattcttcttcaagagctttgcctttttgagaaggtcaaaaatatgagactggcttccataagctcggtgttctggatattcatgcagactgtcccaggtatcaagagtgtgtcccttttttactggttagtagaggtctccgcatggagagactgcagtagtcatgataattgctaaagcattcacatcgaagcttttgtgtggttgttctagaagagatacccaagaatgggatttctggttcagatgatagtaatacatttacttctgaaggaaactacctgtttactggcctagcgagatatgtttgttggtgcaatagtgacatgaatattatagggataaccaatcactttctgactggatttaaggcctgctccacaggagaaaccgatctggagagctcatacatcccaggagtgaatctgccactatttgctaaataggtacaatatcaaagtacattctaagtagctatttctatacccacaggcaagtgtaactctcaggtctcctcagacaaaagtccttgtgtagtgcatggttaatacagagattcgccactggccaaagtgcgaagacacgtatgtgtggagctctcagccatacatgggacatctgtattatacaaccaccctgccaaggctcagggaacgtagagaaagagggaacaaaaacattattcaaagagccagagataggaaaggatcagagtgaaactgtcttttagacataagcactggacctctgagtttgtggtggctgtggtcaaccttccagcatggaccagagaggagcagatgagcctcaccccagcttaagagtgatcggatagccatggccgaccagaggagggagactgagtttgtctaggagtgtagttcctggtgggttgcccatgctccagtaggaacgacatacaaatcagactctggttataagaggcaaacagaaggcaagctgggaagggttgtggtgaatgtccaccggagctgaaggtgcagagcgggagccaaagttgctcaaatacattgtatgcatttatgcagtgctgaaaaattaatatatctttcattgtgaagatcagtctggttgcataaaggaattcctagagcattggatgtgtggtcaaatgttaaatccatgttgagtgtattgagggtatttacaaaagatccactgaaggagggaaccctatcctcaatagggacagtaccgtaaacctgaggtcaagaccaaacaacgatggggaaaggagaaagcgaatactccaacaccagcatcttcctctctttttcccatccaccaataggtgagcaacccaccccatgccgtcaaggacaaggagctggttctgccacagcgccaccacaccgtgtaagccaaatagaaccacccccttctttacattgcctacttgagcaatgacgagagtgactcaacactgcccaaatgacctccaaactggccttttctttctgcgttctcacagtatcacacgtgagttctcattgttcgtctcttacaggtcagctctggagagattgactgcctctgtctcgctctccccaaacactgctagcggaagactagatgtaaggttgtttataaaggatgtcatttgccaccctctcagatcacagattgtagtaaaatgcaacttcaactcagttcctgtatgctcattgccttttggagacaggtggcacagcgccccacccttttgacctttttagttttggggcaaatgttaaaaagaggtagtgtgcttccttcgcttctttttgaagctgtttgctttctagctcctccacttttcccgtacatgatagcagaactttactggcactgcagtgaggcccgtgggagtttgactgcaagtcttccatatggtgtggatagtctggagtttatcccatgtgggaagaatacagccattcttcaaatatctcttttgcactgaatgctttatcctctttcttgatctctgatgaatctgagaataggagtgtcggacattgcttatcccacagtcgctgagctgtgttctgtttctgtagtttctttcttgaaatggtttttgtgttctgaatgggtaacttttcctgatctgtcttcacggttattgactcttgcttcttctatactgctattgagttcatttgatatgcttttaaattttttcttattgtcctgaattttcatcttttttaaaaaataaaattttgatgtgcatacatgtgctattatgtgagttatctgtaggagaccacagggacagaaaaggatgtcagatctgctagaactggagttacaaaccactctgaagccatcctataggaaccagtcctgggttctcttgaagaacagtagctgttagccacagagcaagctcagccctagtctccaatttctttcattagtctttgttgcagggttatttgttactgtgcagttgtgtgttttcatagtggctacatcaagatctttattagcttactccaaagctcacgtggttacagcacttgttcaactcccctgggatttaaactggacgttctggatatcatatattaggtcctaagtcctctaaaactctgtggtgaagtcagccgttctgttctcagaagcaagcaacgtggtgaagggcagggtgtgagtgcttgtctgtcccttctgtacactggtcaaagaccgcaggtctggccccgtgtagtttgttctacttagtctggaacttggggagttggatagggcttttttagtttgctaagtaggatcaacatcaaagcattaatgagttgaaggtgatccttggagttcataaattactcacatggttcttctgggctctgtgcccctcagtctcgccctaccccacggtaccctgggctccctttccccatccccagccaggagcctggcagtcttactactcttcagttcatcatctcctgagtgggactgcaccctcacctatgcaggagagagattagttgtctttttgaagccatagcttttccaataaaaactaaaatctgctctttccaggagttgacacttctgttggtttccgtagctgctggctatcagccaccacagtgctgtgtccgacaagtctcaagctaacagatgtgttaacttagccttctggagtcttcctaagccagtgcgacctttatactaattactcgtcaggggaagtaacatgacatagagaattcctgtaaagtcgaacatggtgagctagctcactgcctagggtgaggacgtaaggctatcagattgtccctaatttacttaaaaatttagatgatcacatttctaaaagttaaaaaaaaaatggcaagaccaaagtgtggacactttgccccttcctagaaatgggaacaaaacacccatggaaggagttacagagacaaaatttggagctgtgacgaaaggatggaccatctagtgattgccatatccagggatccatcccataatcagcttccaaacgctgacaccattgcatacactagcaagattttgctgtaaggacctagatatagctgtctcttgtgagactatgccggggcctagcaaacacagaagtggatgctcacagtcagctattggatgggtcacacggaccccaatggaggagctagagaaagtacccaaggagctaaagggaactgcaaccctatatgtggaacaacaatatgaactaaccagtacccctgagctcttgtctctagctgcgtatgtatcaaaagatggcctagtcagccatcactggaaaaagaggcccattggacttgcaaactttatatgccccagtacaggggaacgccagggccaaaaagggggagtgggtgggtaggggattgggggggtgggtatggggggactttttgggtagcattggaaatgtaaacgaggaaaatacctaattaaaaaaaatggcaaagttgtaattataattgccatgaaactgtatttatgcttatatagaaatatgattctatttataaaatgttatactttaaaagataatatgccttgccaaattcaggaaataccatttggaatgcttttagctttgtattgtcttatttttaatctttaaaaattttttttgatgtgcatatgtgtgcaactgtgtgttatctgtagaccacagggacagaaaaggatgtttgatccgctggttttaagtttagcaatagctggcttacaaacaaaacaaggttcatcttagtaattcattcaatactactttcaaagatttaaatttcccattaaaacatttttcgtgttgggtgtatgtatgtatgcatataaagtatatgctcacatgtggaagccagaggacactgggtcctttgactcaattatccaactattcctttgagacagtctctcactgaacttggagctagtttggtggttaatgaacccctgcgagcctcgtctgtgctggcattctagccaccagtgggccatgcccaggtttttacgtggatcctgggatctgaactcatgacagcatgcttgtccagcaaaccttttatccaccaagctatctcgccagcttgttttttctttttcttttttatccatagattttggcttcctactgtgctgggctatatccttctagtggtatggattcatcaagttcctagatatacttgtctatttaaatgttggtgacacaagcaagcatgaatttcatggtagccttatacttattttaatgtgtatggttgttttcttgtacacatgtctgtgtaccacatgcatgcagtacccatggtggccagaagaggtcaccagcttcaccgagactgaagttacacgtggttgtgagctgggtgtggggaactgagcattgatcctttggaagaggatcactggtagatttttttttttttaaggcttggagatagggccagtcaaactgacagtgttcaaaagaaccatcaaaaatgttaatttactatttctcccttgactagaatgcaaaatagtaaattgctgatattggtcccacctgttatgtttgcttgtccatcttcattgtttctccagtctaggtgaaaagcatgcttattgctaccctgtgagaagtacaacaaaattacaaaacacaaacatttaagtttccataggggttggagaagtagctcagtggttaagagcattggctgccctactcttctaaaggctctgagatgaaatcccagggaccacatttggcttacaactatctataaaggggttcagtgcccccttctggtgtatgggtaaagcacttgtatatataaacaaacccttagctggacctggtacattcagcaggcagagacaaaggcagagaggcaggtggatccctatgaggccagcctggtctacatagcgaattccaggacagccacctgtttaagataaaaaattaaaaaaatcccagagttcataggaagttgtgttgtggcagcactatataccagggatttatacaccccctaccaatcaaaccaagaatgtaggctcagagtttaaaacaagaaagtaataatgattattttcagattagactaaaaaaaacttagaagggggcagtgagaaaaagagccaacgttctgagctagagaatgcaagtgctcggggaagctcaccttggcagccaaggtgacacaggcaggcttctggggaaggaagcagactcctttaaaaagcaagattgctatagcagtgaactgtagaaaactacttgtgtcaacccatgtgagagatgaaaaggttatagcaacttgacagaccactgtggccttggactcggaggctgattctaggaaacagacaggcagaccttccctgacctagccagtcaccgtgcagcgaacggcagggccagcgaggcgagcaggagggctgtagagcaagcggaaggccagcccagcagattgctcatggtcccggcctgcccagggccaggtctttctctggtggtggaaggggctgaagggggaaaatgagcaatactcaaaggcgatcctgtttttagtcaagtccgggaagccagtaatattcctggaaaggaaaaggtgatttcagaagattggaaaggaagggtccagacttggtgttgggaggctaaggaaggaggtggtggcgtttcaatttcaaggattctataaggaattctgcattaagcagtcactccagagcagtttggatgggaggactttatttctgttctgacttttatgttggcaaaacatgtacaaaactgaccaaacagaagtgaaaccagagtactgggagctgtgtaatctcagacagaataagcacatatccactctgaaaatgcaggaggcagccgaggctgtagctacaggacgggcaagactgacaattgaggctgttctgataggcttccctttgacaagatggcatgagagttttctggaagacaattttttcatcttaaaaattatttatttaaaaaattatttatttatattggactggccttaaactcacagatgcccaccggcctatacctccttggcattgagattaaagatgtataccgtcatacttggtatacataccctggaagggtcatgtatactggtgtcatatgcagggtcagcttcatgtcacataggtcatcaatagagggtgggataagaacaactcaatgctagtggcagtctcaaaaaggaacaccttacatggatttgaactaaaggaagaggctctgggcaatggaaagacaccttagcatctctcctctgaaaattctgtaagtgttctttttggtccattcaactcaagagtcatgactcaggaagacttttacacagaaatttaattgaaaacaaaatttcaatacagctgtttatgatcattttcaaatacactgcggttaaacaaagtacatatgtcaatgtgtgcaagtagaaaa

SEQ ID NO: 686 - DNA, 1341 bp, Mus musculus
aagctctgtctctgatgggcacatggtttggggactgcaattattaaaaggctgcagtgagactttgagggacgtcagcgaatcacctccgagtctctaagcggtctccccatccctggagttcggaatgctttacttgatcggcttgggcctgggagatgccaaggacatcacagtcaagggcctggaagttgtgagacgatgcagtcgcgtgtatctggaagcctacacctcagtcctgactgtagggaaggaagccctggaagagttttatggaagaaaattgattcttgctgacagagaagaagtagaacaagaagcagataatatttttaaggatgcagatgtcagtgatgttgcgttccttgtggttggtgatccatttggggctacaacacacagtgatcttattctgagagcaacaaagttgggcatcccttatcaagttattcacaatgcctccataatgaacgctgtaggctgctgtggtttgcagttgtacaggtttggagaaacagtttctattgtgttttggacggacacttggcgaccagagagcttctttgacaaggtgaagaggaaccgggccaatggcatgcacacgctgtgcttactcgatatcaaagtgaaggagcagtctctggagaacctcatcagaggaagaaagatctatgaaccccctcggtacatgagtgtgaaccaggcggcccagcagcttctagagattgttcagaatcacagagcacgcggggaggaaccagcaatcactgaggagacactctgtgtcggcttagccagagtgggagctgaagatcagaaaattgcagcaggcacgttacagcagatgtgcacagtgagcttgggagaaccactgcattctttggtcattacagggggcaacctgcacccactggagatggagatgctaagtctcttctctataccggaatcccagagtactgatggactctgagcatggacattttctgttgtctcacgatcatttcagtgagattggggtgtgtgtggtatttatatgtcaaatggcatggctctgtcatttatgaagaagatataaccgaagtgaccaagaagaagcaggttgaacgacagcgtttggtttcctgcggcagcttcccccattccatcgtgagtttcctactcgtcagggtgcacacacgtgggcagatggagctgaaaaagggagccaagtcgatgcaaggaggtggagaccaagaataacgtgaggaaactggacaatgaatcacttgaactctgattttcagggacaaagcagcatgaatcagcaagaaaagcaaataaaagattgctaactcttca

SEQ ID NO: 687 - protein, 288 aa, Mus musculus
AVSPSLEFGMLYLIGLGLGDAKDITVKGLEVVRRCSRVYLEAYTSVLTVGKEALEEFYGRKLILADREEVEQEADNIFKDADVSDVAFLVVGDPFGATTHSDLILRATKLGIPYQVIHNASIMNAVGCCGLQLYRFGETVSIVFWTDTWRPESFFDKVKRNRANGMHTLCLLDIKVKEQSLENLIRGRKIYEPPRYMSVNQAAQQLLEIVQNHRREEPAITEETLCVGLARVGAEDQKIAAGTLQQMCTVSLGEPLHSLVITGGNLHPLEMEMLSLFSIPESQSTDGL

SEQ ID NO: 688 - DNA, 55829 bp, Homo sapiens
ctacacctgttcaaaagtgctcaatgaccctggcaatttcagataggtgagtgtcttcctttgtgggagcctagctttgtaaaagggaacccaatcatgggtagatggggccaaggcaagaacttaagtctctcagaggaatgaaatcagtagcaagttcaacctcttgaaataacaaggcagagatgcaggtcctgatgactaggaagaaggcaaggaactctattactgagatggcagggaggccaggcaggagcacagataataggaaagtaaatgacatctaagtgatgcaaatatcaaaattagtgtgatactaagtaatttctacataggatttcttatagcttctctgtctaagaaaatgactggcctcagtctcagattaccatgccctgaacaccttcaacctactgatgggtttaatcggtcacaggacaaagttattaggaactaaacatcacaccttattcaagaaaaaatttatctttaaaattactaacaccactttctgtttcctttcatgtgcaaataacattgcagctacattataatttttaaaaggtttgagctttagcctggatgtccatgttttcttagtactaaatattctaattacaaattcactttttgtttggtgtcaggagggatggatgatggtcctaaactgcaattttacctagaacacacagaaattctgtaaaaccagctagctagagaatatttttggtagtaatactagctaatgttaattgtgcactatattgcaggcctttagatatacagtttacttatcccatttaatcttcacaaaaccctaaaggtaataatatttataatgattgctaacatttattgaacacttacaaagtgcaaaaacactgttcaaagacactgtttatgtgtagtattacttcatttaatcatcatgatgatcctataagtgcctttattatatgtattttacaggcaatataactaagggttcaagaactttcctaaggtcacattgctagtaagagaagccaaaattcaaatcctgtagtctgactctaaagcccatgacattaaagtccaggcttttaaccacgctattcactgcttctgcaattggtatgcatggagaaaacaatatttttgataccactaatactactactaatattttgatatgataggatttcatcaggttttatttaataaacaccagaagagaggcaatagccagaagcaaagataagattaaaatagaatctatatgagtttgagtctgaatctcaataagcctttatcagaaaatgtaatgagctctgatagtaaggtgtaaaaattgctgaagaaaaaaaaccaatgctactcaaagtatacaatagaaaatattactgcaaaacaagcaaaagaccctaataacataaagcaaaatgtaaggaaataagattagggtgaatcatattctgtgactacctaggatttagaaatgcaaacaaaaatcactctgagaaaattaaatctgtgaaaattctgcaacttgatatagatatcggtttaattttggttgaaaaagtttctagttatgaaaaacatcactgtacttacagtgaagtacagttatgtgaagaataactcaaggtctacagtttattagtataaaaaatttagtaacttaacgttttttaaaaaaaatttatattggttatgctaatttccaggtttaaggaattactgtattgcttgcaattttatatcgaaatctattaaaggaggaagggtagaaaaggaggaggaggggaaagatacttcttattgggttttgagtcatgaaacaaagcaaaggtccacaagtgtaaataacttacattgactgattaccggtctagtgttttttccattctaaccaaaaaggaagctactgaatcctacaatgtgacttagaaatcatctaactaaaagcattcatgttactgatagcaaaaaatggtccaaacccacatagttattggcagcagaggcataatgagaagtgggtgtcctgacaacaggtattctctccaggcaaaacatatatatatattttttttttaaagtatattttaattattttaaaataactttagcacttagtatgtttcaggcactaagtgctttcaatacattaaaacatatttcacacatatttattagtgaatctattaaggcccctttaaaggaagtatcttattcacaaatggatttactcaactacaagtatagattccacatttaaatattgctgtggtgggagaaagaaatatttttgtcttcaaaaataaataaattgactttgaagaggttttaattaatactgactttaaaagcactttcgtccaatacaaaaagtgatattgattttattcatactgaataaagaaaataactgaaaaattaaataactgaaaatttaaaataactgaaaaaaattacatatgaggcaattgacaccaccacagagctgcaaattaaaaccacaacgatatctcactacacacccactaaaattaaaaggtatcacaataccaagtgttgacaaggatacagagcaactgtaacttgcatctattgctggtgggaatgtaaattgtacaaacactttggaaaactgtttagcacaatctgttaaagtgaaaacatatatcctataacccagcaattccaattcctaggtaatataacccaacagaaatgaatacttaaatgtctaacaaaagacagatacaacaatgttcatagcagatttattcatattggccccaaactgaaacatccatcaaaaataaagaagatgaatagtagtacattcatataacagaattctattcagcaaagaatgaactactactacacagaacatggatgagtaaagcagagccaaggaagccagacgcgaaagggtacattttacatgattccgtgtataagaatagccaaaactaacttacagtcaaatagtggttcggttaccttggagaggtggggcggaggcgggggggcatttactgggagaggataaaagggaaccctctgggatgccagaaatgttccacatctttatcagaatgatgggtacatggttatacacatacgtaaaaattgtatacttaaaatttggtggactttgctttatgtaatctatatcccatttctgtgagattcatccaggttgtttcatgtagcagtaattcattctttttgattgctgtatagcattgtattatatgaatgtatcacataacacaatgattctttttattgttgttgggcatctaaaaagcttttttaaaaaaagaattcagttcccaaatgaacattttctctgctcactagcagattttgtttactaaactactaagaagcaaagtccattcacttttttttttgagacagggtttcactctgtcacccaggttagagtgcggtgatgtgatcatagctcattgcagcctcaaattcctgggctcaagcaatcctcctgcctcagcctcctgagcagctgggactacaggtgcatgccaccatgcccagctaacttttttatttttatttttagtagagacgaaatcttggtatgttggccaggctggtctcaaactcctgggctcaagtgattctccctcctcagcctctgaaagtgctaggattatacagctgtaaaccaccacatttggctccatttcctttaagttctactttaagttttaacaaattgccagacaacatttctttggtgccaaccaagtctatagtgttgaactcaatgacagaataattgaaatgaagagcttctctcagaaagaatacctcagagaataatattaaaataataatgcttgcttaagatgacttttgtcaatcagtaaactatttagtggattggtctataattactgaattatgtaaatgattcatataacttttgtgaatggggaaaagaataagaaccaatctaggtggacttgactttcatattataatctgacagacactgtagataattctaaaattaatttcaaactctatatcaatatttgtcaatgttttctgagtctttactagttgtctgaaagtatgctaaaccctttatatgtattttttcatttatcctcacaataatcccatgaaagatgttactattatctctattttatagaataggtaactgaggtttaaaaagggaatgcaaggaatacactactgagtgaaaggcctagactaaacacggtctgaatgacatcaaaatgtgagttctcaatcattataaaaaatcccctctgttcagttcttctcctccagaaatttatttataacttattaccatgtgtagatgtatactcattcattcaatatatatttactgagcatcaaacactgttctagctgtttgtttcacattagagcataacacagacaaaaaaatcctgcctttgtggtgcttatactctaataggatgtggacaaaaaacatcataataaataagtaaactagacagttgtgttacaaagtgagcaatgctacaggggcaaataagcggataaagtgattagaaatgttggttgtagtttacataaaatagccctcactgaggaagtgaattctgaacaatgacttcaaggaagtggagccagagccacacagctatctgtaggggccaggggtacggagacgaggaggtgaggctggagaactaggggagtggtgtagatagtgggggtatgtgtgtgtggctaatatacagcctggtagttcgcttttatgaattttggcttttgaatgaaagggaaaccactccccttctcccaccaaatcttggctagtttagctatgtttccctaaaaaaccttaaagggacactgtaagtttttgtttttgtttttgttttttatttgagacggagtctcgctttgttgcccaggctggagtgcagtggcacgatcttggctcactgcaagctccgcctcccaggttcaggccattctcctgcctcagcctcccaagtagctgggactacaggtgcccgccaccacgcccggctaatttttttgtatttttagtagagacggggtttcaccgtgttagccaggatggtctggatctcctgacctcgtgatccacccgcctcagcctcccaaagtgctgggattacaggcgtaagccaccgtgcctggcctgtagtttttttaaatgcaaaaagagtgaattatgtatccctgattctacctttttagcaatagactttggaggaaggacctgccatatacgaaaatgggttagaaacaaacagaaagtttacacatacatgcacatacacacaggcacttaagggaacattctgggagctcctttacacaaaaacgcagggctctaggtgacttctttacgacagtccatattgttactgattcaatctattaagctaggatgaatgacaataaaaatttccacactttacacagaaaatagctctagatttgttttttatgcatttttacatcatatgattaacatataatgtatggatgagtacttaaaatcactgggtttataaaaagtgactttttctctaagtaaacaagtgtacaataaagtaacttcaaatcttttaaccttagtaaatacaggtccttatcctaaagcaatgttatctttaattatcacttatttgtgaattgttagaaaataatgactccaatcaattaagagtctgagctctacaaatattaaccaagatttcctctaacaaaggcaatttctgggaacatgtaggttaaaaggccagcttcatagtaaaataatattcttcattcacagtaaggtcagatggagtttagtcagtcaccctgatgtcttcttttcaatacacaaactgcttaaacaggacaattgaaggatgacttctcttaaatgtaaggtaattataatttgtccgtaaggtaatgcagtgactcaactatgttattacttcagaataaaagtagcatatgatgtgtctatgacaatgaaatggaaaagccatcagtattaatttcttatgactatctgcatctctctcacattttatgactactgactgtaggtctcaaatataaggaagaatttgccagtaaaaatgagttactggcaaaggttataaaaacatcttaaagatccttcataaaagcataaatgttcaccctcagggatgacttggcatcatctgacctgaaagcaagaatacaaagtagaaaactcttcaggtctaatctatccatgttattcttgaagccaaaaaaggctaaaaatctttctttttttcttttgtcctataatcacctttctctttaaccatcactctctcttctgctagacatgagactacaaatttgctgacataaaagaatttgtcctctaactgctttcattatcattataaaactataatatttgttaaaaactaatttgaaatcgttttacagcaaaattttcaaaatccagcctaaattaggtgaagcaatgatatcatttaatcagctatatgcctaggtatgttttgttaatctattacctaggtgaggagtttatgtttcaagcaaaatgtaatatgtgtattgatggctgcaacttccctggaaatgcatcaacaaataagatgggttgacatctgggtaaaaggataaataagtgataaagcaaaaacagcaaaatgttaaaactttagaaccttggaggtggctatatgggtgttgactgtgacactgtttcaacttttctatatgtttgaaatttttcacaataaattgttggggaaaatgtaatcacatttgaaacctgttttaaatggcaagggaaaaatgtccaaatcccacagaattctgcaaaatccaataggcaagatttttgcagcttatgtttgttgagctgaggaggaaaaacaaaaaagattaccataatccctttatctgtctacctccagaaaagtacaaaaaatttacactcttattgagaaataacggcaggtgaaaggtttgtttgttaagaattctccgtggtaaaactaagttcctctggctacattttgaagcttaaaaacaaattattactgttatttcaggcaatgtttcacttccttgattacccagaataactttattttcaatatagatatatttcctgaaaggagataaaccacaccttcttcagattacttaatcatcctttttggcagtgtccttgcactgtgaatctacctgaaattattatttttttaaatctgaaaacaaaaaacataaatgatcaacacattggaaaatgtgtttacctactcaatagcatgcatatgaactatatgttttgtgtgttgcaagcctttcaatacaaatgaccttctaaagtggcatgagacaggcatatttatatttgatattccattaatgatttttttggtagttttttaaaacataccaccctctgtattaataaagatggaaaaatacgtagctcagctactagtggataataatgatttattcaacaaacatttatttaatacctattatgtgcaagggatagtgctaaacctaagatgagcatacaaataagatgcagtccctgaattaactaaatcaatagtttggtaaagaagaaatacaaatgaacaaatataaaatctcataaattggttagtaagtatatgtagagtaatactgtaatgaagaggagaaacctaaattagcttaggggggtgagggtctctgggaaggcttcctgaacttggtcttaaagaatgggtattagtgatctaggcaggagagaatgggagacaatattctatgatgaggcagcagcgtagaggaacaaagcagcatgttgtgggcagagaactacaagcaattcagtattgctggagagaaagcgagaaagctcatggtatggagtggagagagatgatgctaaaaaggtaggcagtggccacaccacgaatgatcttgtggggtatgttaacaaacctggactttctcttggcctcagaaggatctagaaggggtgtaatattttcagattgttaactataactctctgacccccttgagtgaaggagacattattatcagctacaagagtgacaaaatgaggacctgagaatcaagatggtgatagacggtatggtttctattgagatatacaggcagacatgacagacgatgtgggggtgactcccaagtgtctggctggggttaatctgttgatgacaatactctcctcacccacccccacccccgacccatccaagtagataatatggaaagaaaagcaaaatggaaagggaaggtgatggattcaaccttggatgtgttgaatatgcttccgggttatctaggtgaagatttccagcagaacgttaacatgaagccaagagggaggaagtctggataggaggctgaaatttgaatctacaaaatattagcgatactaggaattctgagtgaacagccagtttttgtgaggttttgtttgttttacttaagccattctaataggtgggttgtggtagctcattgtgatttaaatgtttattttcctaatgtctaatgatgtttaggatctttttttgtttgtttaagatcttttaaaataattatttgctatttgtgtatcttctttggtgtctattcaaatcttttgcccatttttaaacaacgaaatgttttattattgctttctgagtgctccttatatattctccatacaagtccttcatcagatacatgctttgtaaatattttcagtatgtggcttcaagtcttttgaagagcataaatttttactttgttgaagtccaatttatcaatttttttcatcacgcttttggtttaagaaatatttgcctaaataaggtcacgaatatttcctcctatgttttcttctggtataggtttaggttttccatttacatctacgatccattttgagttttttggggtgtgtatgtggtgtgaggaatagatcaacgtaatgagaggggataaaacacagccacgaagagtttatagataggaagtgcaaaaaggtggatggaacctgggaatgaaaaaaagccaaggttcaaggaagcggagttgggcattgtcggggaggcaacaggaaaattctgagtaaccaacactgcctgctaagaaaagcaatgacagctgtcttttttaacttggatgaggtcaccttgggaagagcattttcagtcaaaacaaatcttccctatttctaattacatgtaaccaacagctttataagaattcccccggcagaaacacttgagaggtctgaaatccctgagcactattaaaggtcacttctttaggtacaggaaggtctgggattcctgacactgagggtgactgaaacatccttggggcactccaggcataaggtcttggggacaaacccaaggagtcattgccttgttgggaaatcagaagcacactcactgctgggtttgccaatctcacgcttcaccaggaagacacctagttgaactacaggaggatgagaagactggaattaaaatctgtgcactcggccaaatccggggacaaatcaggaaaatccttcccagccctccctgtttctggagaggaggagtagggcgcagggcccctcccgactctcttccacgtggctcctctcgagcgaagagctactgcacttacccaggcttaggaagcgggtgtttaagccatgggttagagggctcgtgagcacgcccgatcctttccctgaggctatgaaacggtggctccacggactcctctcggccgactgacctttcgccgccctgccccagcagccggcgggtttcttcagtggagccgggctctggtctccgcagcccagtagcccgctagcccggccccctcccgctagtcgtaaagtgcagtaaaggcaccagcattttgcggcaccgtaggtgaggccggcggcgtgggccttttctctgcacggagccggcgcttttgcagttgcttctgcggaaaggtggtagttaagaatttgtaaaggccagagaactacctacgattctctcagcgggtaattggctgctcctaggtttgtgtaacaagaggcaaaactggtagggttgtttaaaacctcttatcccagttcttaagcgtgacataaggttcccaaacccctccttgtgacttgcctcttctcttgtgctactttggttgtcatcgtgttcatcactagattttagatgtcctcggtgttactgacggtttttctgtccacttcgtcttgcagtctctcttctcctcaagtttgaaatgctttatctcatcgggttgggcctgggagatgccaaggacatcacagtcaagggcctggaagttgttagacgctgcagtcgagtgtatctggaagcctacacctcagtcctaactgtagggaaggaagccttggtaggtgctgagcgttccccagcctcctgggaagaaagctatctaacatctgattttcatacactaagctgaacagaattttcaggtctgcttgtttaaaccctttgaaacgcatcccttgttcattaatgatctgaggagcagaagaatggaaattttacaccaaccaagtgacttggaaaatgaaagggtgctttgtcctattttacaagtctaattttgtggctttctccagtaaataggaaagctattttatactcctgggggatagttatcaaaaccccttatttcatgaggtagtcaagaaaccctttctgagttgagtgctaatgaggagctgacacagccttaatgagttggttatatatattcaaaaaccaagctgaaagcttccccctttgaagtgtgtccatagggaatggcgattgcctttttgtatcctatccagagagatcttatcttaaatagactatctcccaataaggcttatactgatacacttgtatatattgagtgagcctggacttaatatataaaaatgtatgagtatacacttacatgagtatacactaagtaaccaaagtatttgttagtatattatacatttatagttggccctcataagggcccagtaaatttgggggaagggtcaacttcaggttcattgtcaaactctaagtagaatgtaaatcaaaggattaatacatatgttatgggaggagggagcagatttattgtcatgtcttccaaacaaaaaatagacttaaaatttttaggcctcagattactttaaaatcttatagaaggaattaagaactgctacttgaattggccatgcatttaaataaaagttgtgtgtaaagaccaactttgatatatacatatatgtggagagagagagaaaataagtcttgctctgttgcccaggctggggtgcaatggtatgatcatggctcactgcagcctcagcctcctgggctcaagtatcctcccacctcaacctctcgagtagctgagactacaggtgggtgccatcatgcccagctaattttttgtattttttgtagagacagggttttgccacattgcccaggctggtcacaagttcctggactctagtgatctgcccacctcggcctcctaaagtgctgggattgtataggcacaagcaaccacacccagcctaaggccagctttgatttaaaaaacatttttttttctcattttttcactcttaggatagaaccaaaatatctaagctcgaaatgatggaaatgtgcgtctctaatcagtgattaaggaaaagtaaaaggaacttaacaccttcaagaaaagacagacaaataacaaaacagcagtttgatagaatgagatatcaggggatggcatagaggaaagtttggttatagttttatctttgttacatgttaatgtgaccttggacaagtcctttaactttagtgtcttttttaaatggggtaaaaaacatctactttaggtgttcagcataattcttagcataggttcttaactatggtatatggcacaaaactgttcagaaatagaaattgtcaatgttcacatttccaaacttctctgaacctcagtttcttcatttgtcaagtggcaattaccagttggagggttatgtagtgttttattgagatgatgtatatgaaagtgctttgtaaattttcagtgctagctaaatgttaattttggctgctgttattttgtaaagtatttttttccaaagacaaaacttctggagttactacttacagagtcaagacctgaagctggacccagccttacctacagtaaattatgtgtactttgttaaggtgctggaatatctgtttcttcacagtaataagtactgacatttatagaacagttacagaacagttactgtgcactgttttaaatgctttacatgtagattaggattattattctaattactgttcattttgcagggatagagaagttaacaaacttgcctaagttcatgcagatagtgaatgatagagccaggagatgaaccaaagcagtcctgagttgaagtctgccactctttttattattattattatttattatatttttttattttgagacggagtcttgctatgttgcctaggctggaatgcagtggtgcgatctcggccccctgcaacctctgcctctcgggttcaagcaattcttctgtcacagccttctgagtagctgggattacaggcgtgtgccattgcgcccggctaatttttgtatttttagtaggatgagatttcaccatgttggccaggctggtctcgaactcctgacctcaggtgatccacctgcctcggcctccaaagtgctgtgattacaggtgagagccactgcgcccggccgaggtctaccactcttgacctctacactgtactgtgtctctgtattcttaaggatagataatagctacacaaagtttaacttcacagaacacctacagagaaggtaggattcaagcaaaatggtcaatgctggatcctgccctgcttaataatttgttcatgtactcatttgtttgacagatattattgagtaccagataccgttgcactacagcaatccttataaattttaataactcactcaaagttctcagtatgtaagaaaccgtattatttatctatgcatccagttttactccatttgaattacttattacttctcaggaaatcagttttaagattcatgatccttcattctgtactggctgacgagatgaaaaaaaagaaaaggattcatgatcttgcataatagcccgtaaccactatcagatgactactagcttactagctcactctctactggatttgttctctagagttgagctgcagggaattaaatcacaaagcagtttgtttgcaaacttcctacatatttagaattcagttactgctcctgcaactctgcctttttagcagaaactaaggaatatagttttaaattagtatcttctgcatttatgtaggaatgttcactggttctgtaaacagctaattttctattgtttctcattggtgctgccttttttttctagctgagttgccatatgtttaaccattgaaaatttaataaaagctaaaccaccatgtttgtttaaacttattgtttaatatatttattctgtattacatcatgtttctgaagtagggctcatgtgtacatattccgcattcatcctacagtgttctatttggcctttagaaccaaatttagaaataaatttaaaatgcaaaaagcctcagatgttaagagttccgcctcctttgggatattaagacagccccaaatacagagtttaattgcaacatgacataaagtactggcttactgatgagttgtattgaatgatctgcatttgggtggttgccaacatatgcaccagtcccaaacaaagagtgtgtgtgtgtgtgtgtgtgtgtgtgtgtgtgtgtgtgttagaatggtcacctgctgtctctttatcttgatattggacttatatctgtaggaagagttttatggaagaaaattggttgttgctgatagagaagaagtggaacaagaagcagataatattttaaaggatgctgatatcagtgatgttgcattccttgtggttggtgatccatttgggtaagtcaaggcagatattttgagtttttaactcatttacttttttttaatcagtaagaattattctattgcatttaacacttttacctgccaggtcctgataaggaactctggttacttaagcgctatctaaaatgtcatagtttaaactttcatgatctttgagattagtgaagaaaagctagttggtaaatatatcatcatatgtatcactacattatcaagtgtcaactctaaagtttgtatcattgcttctgctgttttagaaggtcatgtagggcaacaaatgccttaactgctatatcattattaaatagttcattacattatcaaaagtcatgcctgccattttctgctgataatttcaggcatcttcgacttcttttgtcctaggttttttttccttttgtaatcatctactatttggcaatactgccgtcactttgcttgccttgaatttatcatttatcaagtctctgatttcagtttcttatatccattgggaaccctgttctttgtcattaccacgaagatgggcatctactgcctagtcaagcatcatcaatctctaatgtcaagccaaacagaagagttctttgtctacagctggttacctaagatttatatcacagatttaaggaacataaggaccatgtaagaccttggaggggactaggaatttaatttaaatacagtggtaaacttttgcaggattcaaagcaggaaaaagtcaaaatctgattagcattaaaaggtcactttaagtgcttaggtaaatggattttagggaggcaagaacgtttttggtggaaaagagaaaaagatgggaacatatttagaagaagaatgccaagatgaatgtggtggataaggaaaaggaaaggagtaaatctgattcccaggattctagctttacaaatgagtggttggtagtgtcacttgaaaactggtagagaacaggatttggagaaacaagaattggttctggaaatatgtttactttgagatgtcaagtaggcagttagctgctgctagagcttgggatgggaggtcatcctagataaatggcttttgaagtcatcagtatgtttatggtgtttaaagctggaggaatggatagaatcagcttaggagagaagagtgggaaaagaggacctaggatggccctaggaaaccttggaatttcatcgtgtacctggagccagaggaggagggagaaaaagcaagagagtatgttgtcacagaagccaggaaaagagactattcaaaaaggaaagactgaataccttcaatataatactgaaagtttgactgtaagatgaggacagaaatatgtgtatgaatttaaagacatgatgtttggagttgattagtggtggttttatggaggagctggaacttgcgctgggtctggatagggttcaacagatggagattatagggtgggccaggagaaaggtagaaggaagaatgctcatataaatgaaaaaactgaggcacagagaaagtaccttgatgtaattaattgctcccatgctcaaaaaccttcagtgacttctcatggccttaaatcttgaagtctttcttttttctctagctactctttaaccgctatgctagaaccaaatggtacaactttccatttcataagtgttttgtaatattcttcccctatttctttgctcaagctttttccttaaaagagttcttctcagttcctaattatacctaattgtactataaaattagtatacagctcagatgctacctctttcattcctgttttattccggagtgccttttttttttccattttagacttctttaatttgccctttcttagtgattcatcgtatatagccttgtatttgaattcagatttaaggaatatttactgtactgcagttattttttatttaccggcagattatagttaggatatgatagttggaaatggcatgatggggaatgtgtaattttaattggaatatgagtggattaaatggaggagaaatcaggtaaggaatatagaatgcagcaaggcactgaaattcttagatatgagcaaaaaatatcccttatttaattttaagaccccttcttatttaaataaaatatataaaaagaagattgtttaagatgctgaatcttaaattctttttttcagtacttttaaaatggtaaaatgacacatgacaaaatgtgtcattttaaccattttagtgtacagttcagtggcatactaagtacattcacattgttgtgcaactatcagcactgtccatctccagcaatatgaagttcttgaagacaatttaaagtcatagttaagtaagttcatgtagtctcatctttgttcttttacccaggttattgaaaggaatatggaaatagatcacacaaagaaagtaaatgagtctaaaaatatatactaaatcaatagaacttaatcactgtgagagttgacagtctcaaacattctatccctaaatctctgcataagaagtctttattaaacacactgtttctaatgatggttctgttttattattccattctgtatttcaatatgctctgtaactatattattataatgaatacaaaatttttatccctatgttgtatgccttttccttagtggcatccatatacagataatatgtcctgatgtaggctgactgcttccattccatgtaatgaatgtgaacagtgcttgatacctaataactataaaatcaatggcagcattattattagtctatttttcttcaatataaataaagctgtcacatgtaaatttatgtatatgataccttcctgcctcccacttctttatccccatgttttaggttgtttccttatggtagatcctccaaaataggtttttaggaataaaatatcaaaaggtgtggacatggacattttgtagaataaagcatattgtcaattatttttcaaaaggatagtgccaagtgttagtgcttccatagttcatgaaaacgtcatttgcgctatatcattgcaaacattactaaatttctggcccaccagccacacttatgtcaaaaacggagacactataaaatttaaaacaaacataccagccggcgcagtggctcatgcttgtaatcccagcaactttgggaggctgaggcgggtggattgcccgagcccaggagtttgaaaccagcctgggcaatgtggcgaaaccccatctctactaaaaatacaaaaaagtagccagacgtggtggcaggcacctgtaatcccagctactcaggaggctgaggcaggagaattgattgaacccgggaggcggaggttgcatgagccaagatcgtgccactgcactccagcctgggcaatggagcaagactctgtctcaaaaaaaaaaaaaaaaaatcaaattttgtatattcaaattggtcacctttgtgtactttattttattgattccattaatcaaaacatttttggatctcctttcttgaaattgcctttagaacaatttcaagtaacaagcatgttattacagacagatttattactatttctgagcatacatacatatacacatatatgattttagatagagccatatacctagaaatagtaaatttgtttgtgtgtatatgtatgtgtctactcattttaaataaacttgtgatagagatgtaattttgagccagtttttcatttgcttaaataactcaccaagtaactaatttagttttctttactcttaatgttaagtagtgagattctgttgaaggtgatattaaaaacaattctttataattgacattcatgttattttttaaaagcttatttgaaatcaaattaatgattatttttcataccagttttattttatgtatgtgattaaaaacaggcttccctggtgggcatttgttaatttgttaatatatatctgactgctccatggggtgaaagccctttatcttcctacttggtatgcattgaccagtccacaggttctacttgtttgcatgtggtttctcagacatgctaatgttgctttacccagtagggcctggaatttttatcaggagggaaaaaggcctttaaaatgaagttctaaattgataagcggttacatttcactgtgtccatgtttatatttatctatagtctctctttactccaatctacctacttacaatcttgagattttatcttaaaaatggaaaggcaacaggtcaaatatgcacacatacgtacatacgcatacacacatcctaattacacacagtaaccaaataaaaacagttaaaatgactgctggacagatataaaatccaatattataggagataggactctcatataaagactgagtgacaagctgtgaaaatttatgtacaggcatacctcgttttattgtgttttgctttatttcatttcacatacattgcattttttaaaaattgaaggtttgtggcaactttgcattgagcaatcctattggtgccatttttttctgacagcatgttctcacttcctgtctctgtgttacattttggtaattattgtgatatttcaagctttttcattattacatctgttaatgatgatttgtgatcagtgatctttgatgttactgttgtactttgggttgccacaaaccaagcgcatataaaatggcgaacttaattgataaatgttgtgtgtgttctgactgctccccaccaaccagccattcccccaactctctctctcttcttgggcctcccttttaccagagacccaacaatattgaagttaggtcaattaataaccctacaatggcctcaaagtgtttaagtgaaagagtcacatgtctctcactttgaatcaaaagctagaaatgaggaaggcatatagaaagccaagaggctgggtgtggtggctcacacctgtaatcccagcactttgggaggctgaggtgggcagatcacctccagtcaggagttcaagaccagcctggccaacatgatgaaaccccgtctctaccaaaaaatacaaaaattagctgggcgtggtggcgggtgcctgtaatcccagctacccgagaggctgagggagggacaattgcttgaacccaggaggtggaggttgcagtgagccaagatcatgctactgcactccagcctgggtgatatagtgagattccgtgtcaaaaaaaaaaaaaaagaaagaaagaaaaggaaagccaagataagctggaaactaggcctttttcatcaaacagccaagttatgtatgcaaaggaaaagttcttttttttgagaaggagtctcattctgttgcccaggctggagtgcagtggcacaatctcagctcactgcaagctccgcctcccgggttcacgccattctcctgcctcaccctcccgagtagctgggactacaggcgcctgccaccacgcccagctaactttttgtatttttagtagagacggggtttcaccgtgttggtcaggatggtcccgatctcctgacctcgtgatctgtctgcctcagcctcccaaagtgctgggattacagatgtgagccactgcacctggctggaaaagttcttaatggaaattaaaagtgctactcttacgaatgctctaatgataaggtagtaaaacagacttattgctgatagggagaacgttttagtgttctgtatagaagatcaaacctgccacaatattcccttaagctaaagtctaatccagggcaaggctcgaactctcttcaagtctatgaaggctgacaggggtgaggaagctgcagaaaaattgttccaagctagccgaggttggttcatgaggtttaaggaaaaaagttgtctctataacataaatgtatgagctgtggaaacaagttatccagaaggtctagctaaggtaactgatgaatcactacacagtagattttcagtgtggatgaaacagccttctattggaagaggatgccttgtaggactttaattgctagagaggagaagtgaatgccggacttaaaaggactggctaactcttggtagggctaatgcagctggtgactctagattgaagccagtgctcatatatatagccttatgaaaatcctaggtcctgtaagaattatgctaaatctattctccctgtgcgctgtaagtggaacaagaaaagctgaatgacagcacatctgtttacagcatggttcactgaatattttaaacccacccttgagacctgctgctcaaaaacatagatttctttcaaaacattattgccattgacaatgcacttggtcacccaagagctcaggcagtgtacaagaagattactattgtttttatgcctgctaacccaacacctattctacagcccatggatcaaggagtaattttgactttcaagtctttctatctaagaaatatattttgtgaggctgtagctgccctagatagtgatttctctgatgagtctgggcaaagtaaattgaaaaccttctggaaaggattcaccattctagatgtcatttaaaatattcatgattcatgagaagaggtgaaaatacccacattaatgggagtttgggaggggtcgattccaaccctcctgaatgactttgagggcttcaagacttcactgcaggaagtaactgtagatatggtagaaataccaagagaactagaattagaagtggagcctgaagatatgaaggaattacttcaatcttaggataaaacttgaacagatgaagagttgcttcttatggacaggcaaagaaagtggtttcatgagatgaaatctattcttgatgaagatgctgtgaacattgttgagatgacaacaaaggatttagaatatcatataaacttagttgatagattactagcagggtttgagaagattggctccagttttgaaagaggttccactgtgggtaaaatggtatcacacaatgttgcatgctacagagaaatctttcatgaaaggaaaagtcaatcaatgcagcaaatttcattgttttattttaagaaattgccacagccacccccatctttagcaaccaccaccctgatcagttagcagccatcaacatggagccaagaccatccactagcaaaaagattaaactcactgaaggctcagatgattgttggcattttgtagcaataaagtgtttttaaactaaggtatgcacattttctcgacataatgctgttacacacttaacagactacagtatagtataaacataacttttatatgcactaagaaaccaaaaaaattaatgtggctggctatattttgatattcacattattgtggttatcttgacccaaacttgcaatatcttcatggtatacgtgtatattctgccttatattttaaatacaaagacaaagtcttcaaaatagagcagtgattctagttatgccctaatttagaattttagagcagtaattttaagaatttaaaagggctctgagaccaaagagcttaagaattgctgctcaagagttaagttgctgagcttatatttcatagatgtctttttcacgtatttacaggacagtgggcaagtaaaggtccctttcttaagtagctgccaaggctgctttaggagtgttacagtagcaactcagcattttgaagggcatgtttagtcttgcattttcttgctaaaaagctcagatgaaagccttatgcaggtgtgtggaagaatttgaagaaaggcagtgctcctgcctctttaattgacatgaactcaggaaatatagctttactgtcttaaaagtgttgtttgctttaatccaatctaatcttttctcactacagggccacaacacacagtgatcttgttctaagagcaacaaagctgggaattccttatagagttattcacaatgcctccataatgaatgctgtaggctgctgtggtttacaggtaatgcaacaaaggaggtttttcagtggaattaaataaaaatgttttatttttccacaaattgaaaatacatttaattgtattttatgaatcataaaacatactactatttgatactaggctgcttagtatatacatagactgaattttttaacactaatttttttatgctaggttttcccccttattggaatcgaatgtttagatttagctagaaaatgattttaaccttaaatccaacttgtacttacataaaaaggaaaatataaactaatccaaatgacatactcagcattgtcgaggcccatgatttttcatatagtattgttttgtgtgctgtcaagagcattgtgatgctgcatttcttaatagaatcagtataaaagctaaaagccagtgatatgggcttttaaaccaggtttgcagttattgatgtgtaaagttagttatttttgtgtccaacagtcttggttctgaggggttagagtgccccacaattgtttccaagatttacttcttagctactatcatttatatctttatcatttatatcttagctactatcattttccaagcttggtgtttgtattctgatgttcacacatggataatccatgacaactatgactgctgcttggctaacagtggttttaagacatcatcaattgttaagacacattcctattttcagatatatcataataggaaaacaacatgcatcttagaagctgtgaaataagtatttcccagtgtgtcttcctgaaacacataatttaaaaatagatattttcaagaagatacattagcatcaggcaccaatgctatgtctgtagctttagaggactatattttctgtatgacttggagagaatagttcaatttaattgactaatactggctttttatgtcaaaatgttgcctgtgtttatgaagaactagagaaaaagtataaatgattgacctgacctgacagtattcaccacttgctcttagttgttatgtttaaattagcatggaattttgctatcttttttgtccaaaatgcatactttttaaaaaaccttgcccattcaagtctttttttcccattttgaaacccttctgaacatttctgtgttggagtaagtcaaatgctgttcatagaactataaaatgttagcactacaaagaatgctatagggatggagaaaatgatgccaaaatatgttcccaaggtcattcaggtaggtagatggagctaaaactcttgatccctagtccagtattcttcccttctgggggtgtccaagggagagagtacagtcatgggttcttagtttctgttgctggttcggccagtaaagccccttcctcatccctcttttctgcttatcactagagacagaaactaaaaaccatggcttcaggctgctaaaagcctaaaacaaaacaaaacagaaaaacaacaacaaaataaggcagactggacaagcttgtgacaatgctgccttttaagaactgatgacggatggctgggcgtggtagctcacgcctgtaatcccagcactttgggaggccgaggcaggtggatcacctgaagtcagaaattcaagaacagcctggccaacatggtgaaaccccgtctctactaaaaatacaagaattagctgggcgtggtggcagggacctgtaatcccagctactggggaggctgaggcaggagaatcaccctaatccacaaggcggaggttgcagtgagctgagatcgcgccattgcactccagcctgggtgacaagagtgaaaactccatctcaaaaaaaaaaaaaaaaaaaaagaattgataattgctagaagaaagaaaaaaaggagagaaattatcatttgataaataaagatatgtaaaccttaagctaataggacatacatttttaccatatttcatataattttgtgtcttgtaaagaaagttaactagccctttctccatattttgctctaaattaagctatttttaattaatttttttgcttctttattaagcataaaaatagaacacatcccatataaatctgttttatagactggttaaaactaaacctgggtgaccctgtccttctgatcctccacactgatagacaggtaaagtgtaattgttctcgtgtctaaattgggtgaaggtatttgagtgggaatttacggtgagaattagcagtctttatgtaagcacctacagtcatatccacatatattatttttcaaaaaactttctcacaattgtgtatgggatttctctaaacagccacacaccattttccccccagcttagttttattatctaatctggatatgaaatggctatttgtgtgaaaaacaggaggtgccttttaaggttctgtcttatatagtgatcacatttctatgaagatatacttcttataccactgaaattattcatatcagaagaggtaattgttgattcatttttgtacagttttttaacataaaaagcattaaaaatcatatgcatgacacacttaaattttaaaataaatgtatagatatcctgcataatgcaagtactttgacaaagtcttcttccttataatagctggcctttttctctttactttttggactagcgcttatggaagaaaaaataacctaaatctgtggttctcagacttagtatttattagaatcacctagagggcttgtaagacaggttgctgggcttcatattcagactttctgatatagtagatctgggatggggtctgagaatttgtatttgtaacaaagtctcaggtgatactgaagctattgctacaggtaccatactttgagaattaccaacctagacaaattaaaaacttagaaagtgaaagaactgtgttgtcttttttttggcatggcaggattggaagagtaggtttttaattcccagtatacacttgttaaatgtaggatgttgagaggttatcttgccatgctctcttgctcaattttttaaaagggagataagaaccactgtgaaaaggcattctgtcatctccatgaaagagctttccatgagttcaaaaacagccatcaagttattgaacagagtagattaaagagtagcagtatgaaatttctaacctagaaatagacagacttttcagctatcaatttatcaaccccctttgaactattctgttgtttttgttattttctaaagaaacaacatgcagagttcagaatcaaccactgagtattgttcattacctttgtagtttattagccaacagaaaatttttgtttatcactatgatggtaaaaattgttgtataactatctaacactccttcatacacacagacattcacacacacagccagttgatacacactatcttacagacttgccataaaataaaattctctaccacaaactccatattcctgatgaaaattttccttgtaaaataaaaagtgtattagaggcttccaagttagacatctttaaagagaatagtgatccattcattcaacaaatactgttaacctacttatttttctaagtgcctttggatacagtgataaacttgaccaatagggtccttgctctcaaagagattctattttagtgggcagaagagacaacatcaataaaatgataaatattagataatggtaagcataagaaattcaagtagactggtatttagagagtgactaagtcactactgaggtcgggaaggtatctctaagaaggtgacatttgagattcgatatgaatcaagaaggaactagcatattccatacagaggaaacagtgcaaaggccctgaagtgagaatgagcttggcttgttaaaggaaccaaggaagggcttgttggaccatagcaggcaagggaaagagtgacctgaggttggataggtggatagggctgtatcactaggctctcattcaacattaggagtttagatgttatcctaagtgacataaattgacattgaagggttttaagcagtataaatacttgatctgataaattttttaaaacataagctttggccaatatgtggagattgaattactgccaggcaagattggaattgaggaaattctctaaattacagtcatttagaggaaagatgatggtggcttgtactgtatggagtagggcataagagaagatttagaaagtgaacttgtaagagcattttctattaagagaattgagatttggggagatgtagagagccatttctgccttactgatagtcctaggaaaggaattggggtctttatgctaatgggtccttttccaccatctccactaccacagttattatggtttgtacccccaaagacttgtctataggcctggattcttctattactactgctcgattggcttcctactttgattggttctgttaaacttgttattgctagagcagttgcctcctgtcactaagagccctgtgccagtctttctgtgctttcaggaccatagattaatcatagaattgattatgtggaagagtatgattaggtttatcttactcctagactcttgagggtatggatgttgccttgaagtctctactaatgtcttgggaagagttaaagtcatggggtaggtattaaatacatgtatgttaaatgaaagaagccagacatagaagatcatgtattatttgattctgtttacatgaagtgtccccaaaaggcaaatctgtagagacagaaagtaattaatggttgtttggggctgggcattacagggattgactgtgaatggacataaggggtcttagttgggtgatgaaaaatgttctaaaactaagtatggcagtggttgcacagcgtggtaatttactaaaaagcattgaatcatatgcttggaagagttattgttatgtgatgataatgcagtaaagtggttaaaaaaatgaattatacgaagttagctagataggcaagagggcagaaggcattcctaacagagagagaagtgtagttaaaagagagagtcttggaagcactttagggaatctgtaaggtattgcagtaacacacacacacatacaaatatgtgcatacataaataccaaagaaaccttggctgtctagggagtcagttaacacgaggcttagaatatatctatgttgaataagaatagactacatattgggtagaattggtagaggaaaaatataatggaaaagatttagaattgaacttcaacttaaaagcccttgttttacttcttgcctaggcagtaactaaggcgtcatcttctctggatctcagattactttactgtaagggtatgtggtgaggattgggagggagactggatgagaatgttggttttcaaaccacaccatgatgtatgaagatgctttagggattctgcagacaatgaagtaatgacataacactaaataacagagatttagatcctcagggagcccaatcattatctttaactctattgatgttttacttaagagtagttcatttagaaaaaaagaactaaatgtacactaagtgccagtaagatgtatgaaaattactaaactagataaggtctaatatagatttggaagccaaaaagccagcctcttttccaacatttagcaaagattatcttgactgagatactttaggtactcaaattttcattcaataaattttaggatttttcacattaaaataatagttataaacacatatactttaaaatcatgtttttaaattcctaacatatttctaacacttgtatttgtttaacattttgcagatttttctaatgaaagaaaagcctatttgtatgtctaaagccaggcatgttggttgtgtttagatgtcctggtaatgaaaatttgcttaataaattgaggatcactcttaataaatccgagatttttctcaatacacagaagataggagaataaagcacttttctttgttttttttttttggtttttgtttttgtttctgtttttttgtttttttcgggggggacggagtcttgctctgtcgcccaggctggagtgcaatggcgcgatctcagctcactgcaagctccacctcccgggttcatgccattctcctgcctcagcctcccgagtagctgggactacaggcgcccaccaccacacccagcaaatttttttcatatttttagtagagacggggtttcactgtgttagccaggatggtctcaatctcctgacctcgtgatctgcctgcctaggcctcccaaagtgctgggattacaggcatgagccaccgcgcccggccaaagtccttttcttgaattcttgagtttaacatttctgcagaagcagttagcttagacatacagaatcagaattgcttccatttagcattgttcctgctttagaagaaccattttccttgataataaatgatttctatgctcacagaaaattaggaagatatattgagtataaaaagaaaataaaaaagcatccatagtaccaccacctagagatatccacagttaccaattttggcacatttcagtctttttattcaacacttagtatgtgtatatttacttgatcttataggccaaacaaatattagaaaaaattacaaattctgaaatacttctttgtatagaattttattatctttcttaatcatttgtgtgatagaatatattagttctcttgtagaaatttggtgactgaaatggttttaaaacattttaaaaggcagataaatgagacagttccatgaaaccaggtagcaatgatttcagataaaaactgcattatcagttgtggctgacttcagagaaaaggttgtataatttcctatcattgtgaaatgtttccactttctcttgctattgcatgagtgaccttgagtattgccatatgttcatctgtttatataatgcatttctagtttggaaaaatgtatattactttcagaaagtaacaactcatttcctctcttttttttaataccacaacattcattgtgatagtcagcattgtcgaccttgtagtgattcttatcgttacttttcagaagcattaattggtttcattgttgtccagggactaatgtagtcatgaaaaaccctagcttaatacaaagaacacctagttttagtgttctttgtattaagctagattttatcatctagagttctatatccttccgtggtcttagaagaaaataatctaagctctttctattcttttagtcacttaggaacagtttttgactacctgctaagtcatgagcatatttaattttttttcttcctttctgtttccacttattactggttctaatcattatttttttaaatagccaccttaccatcatttttttcctacttcatagttttctttttaaatcgtaaatataattgtgccattcttctattaaaacaattttggtaaattaatccccatcctatatagaatgttcagttacttgtatgttgtattagtccattctcatgcttctaataaagacatacccaagactgggaaattgactttgaggtcaattgtgactcaattttgaggtcaaattgactttgaggtcaataaactgtggagtttaattgaatcacagttcagcatggctggggaggcctcagaacacttacaattatgtctgtaggggaagcaaacacatccttcttcacatgacagcagcaaagagatgcgcagagtaaacgggggaaatccctttatgaaaccatcagatcttgtgagaactcactatcacgagaacagcatggaggtaactgctccccccctcacctcccccactaccgggtccctcccacaacatgtggggattataggaactacaattcaagatgagatttggttggggacacagccaagccatgttatatatgtttatgactttatcatattataaactctttgatttactcattttcctatctgccattgcattctatcacagtgccatgcatataatgaatatgtcacaagtacttgctgagttgaatttcttatttattttttcccccaaccccctgccttccaccctggagttcgatcttgtctttgaaattatatgctgtaaattgtcattttaaaatttaatttacaagtggctctcatttatgtgtgagaataaatcttgtagctcttctgtctacgtagtcattcaactttatgtacctagtgtgtggccatgtgcatactcttccttagtgtcatcaaaaatcaatgttacatcaatggcatgcaaattgtatgtggggataaaaacaacaacaaacaaaacccatccccaagaacagtattctgtatagaagagaaaactagtcactcttgattatgtggttttgtggtacagtttttgacagttttgctggcttggctttctttcacttcacagatttaactgatttaatttaggatataaatacatgatacttgcagggcttaatagagttcttagcaagtttaatttttcttaacagatttttttagctttaataccacagaaaatatttttatttgttatacaaaataacaaaagcattgaaatctaaaatggagttttacaaagcatctatgcttctaaaaggaaagaaatattgatggctatgagatgagttaggagactgttaaggttattcaggcaagtgatattgagggctcaaaccatggttgtagggaaagaaatgagtagtcagctacataaaatatacagcagaatttacaggaattggcactaaataagatgtcaggaattagatatatgtttagagagaagtcaggcacagttagctatttctgggtaatggcttaatgccattttaaatattgcccaagacttcccgcctctgttactttgttcatagtatctcattctttccccatgttcggcttctccagtcttaaatcttaactgtctttcaaggtctagcttacgccttgtattttcagaagatgccttcagatgccctcttagtgggggaaatgctgaatccttataatgcttagagtctatagcatatttaataataattactactacctactattgtctttcttgagcatcttctaactagattgtgccttatgcctaatgagtggatgttttgagtttttttgggttttgtcctagataaaacataatccaatataagttaggtaaactgctttctctataggttactccaggttaaaatttaaaaaggcctgtgtttacctactgtttcttacaaaacagctgtttttttagtctttaaatttagatttgcagcaataatgttttggaggaaaaatgatcacagcacaaaggcttatatgaatattataggatggttcaatacttaggcttctgcaatctcagttctcatcactgtgtgactttgctctagtatagttcactggtaagcccttcgattgtgaaacacaaagaactggttcttttgttctttgaggtattgacatatggtgaaattgtttgcataatgttccaggattcactgaagaagtttgcaccacagctacaggagtggttacagtttataaatcagggtcctggagagcagtgcttgtgtgaggttttctttaatctctcaaattagacaattcaaagacactgctacacaaaatgctttagtgtttatatgtgacttgcatctcaattctttcttaagtggtctgtcactttctttttgaatgaagaacttatttccttccatgactgtattcccatgactcttaaagtatttaagactcatttaaagtatgtattattgcatatataatttttttaacagttttaccttgaagcttttttatggaataatactaatatttcatagtttgatctgagatgtgaaaaatcctttttagaatgtaaacagttgaacttgtcagaatgaaatcataaatgtagtttcaagtatttagtaatatttttgagcttactccaataaggaaagcagttggattaaagcaggacacagcattttagaacatcttcattattaaaacattatcattattatatcatcaaattcctaacactaagacttttccatgtgcaaggcactactaggcactctgcatactttgtgtcatttaacccttaaaaaccacatttttatgtttacagttattatacccattttgtagaagggttcctcccaaggattgggaatgttacttgacttgtccatgattaatcatagtaagaaccagtgccatgactgcagagcctttctctgctgtatgagacatgagcaagactgcacaatccatgagagccagagctgtgttttgcctgtcattttaaacctgtgactagcataatacctggtacatagtagatgatctgtaataagtatttgttggctaagtttgcctctcatcacccaataataataacaaaacccctcagcagggccaggaccgatcctggtagcttggcacagagtgaacatattcctggcattccacattggaactagaaatacattgtcacagggaaacctgtcacatgtggcaggaagtttcatgactcaatacttggagttacatgggtctttgtacactgacctgtgaatttgattgctactgaatagcataacttctatgagataatatgtttttaggcagctttcaaatggactttgggagtaaaccttgttggtaggtaagatgtaggctgtggcctatgaagaacatgatgaaccttccctttagaactcaaagtcaccattatgagtgttgattatagtttataggacctcattatgtaaaaactgagaaacgttgagctgctgctctagggaattagggatgaaacacctgaatgccccaccttctctgtttccttcctgcttgtcttcccctcatatcttgctgagcctctgaaactgatttgaaaagccttaggctactggaagcagaggatgactaatccttgctccagaccaggttctgcatttttaattgaagaacccaaggctgagaaaagtgacttcctgaagtcacatggctatttcaggcacacggttaatttgtggcagaggactagatgtgagtctagtgcttaccagttctattataaattatttcaagtactatttaaattgaataattaaatctttatacaactttagtattctgttttatattgtctttgaaaataaatgtcctttgctcagtgctgagataagaactaatattaacctattgtttcacagtttgaataactttttacatgtaatatgatcctcacaaccctaggagtaggaaaaacagaattttatcactattcctattttagatataaaatcttacagtaatatcacacagccaacaagttgcagagccagaattcaaaagtagattttctcacataagatttgaaattggactcacttaagtgagctagttcagccagtctggatcagagaagccagcttcttggttgtagtgatggtgaacctgggtgggccacttgtgggttaaagagaaggtttggaaaaaggccctcatccctgaactctatagtgagggaacaaatacaatcttgccaaattaagggactataggtttggaacaatgacaggagtgagcatatgctttgttttcttgagatagtgtgatggaagggagcattccctcaggctagatttaagtgtttatttttatattagttagctatgtgactagctaagtcagttgctctttctaagccttgatggtctcatctgtaaaatgagaacaatattaaccttgtgaaccccgctctgattgctcagaactcttttttttttctcctgggttctttgcatttcagtatttttagcaactatatagctaaattatgaaattgttacacatgttcctatacagaatgcagaaatactagaaacttattactgaaacttacttactactagcatcagaaagacaccagctaccatgaaccaaagagaagttcctgttaccttttttggtgacagatttgatccccaacccatttcgagttggatattcactttttattttggttgtaaaatgattaaattctctccttatctatgaaatagtagttaattgttccatcattaattaatgtttttttttctagttatataagtttggagagacagtttctattgttttttggacagacacttggagaccagaaagcttctttgacaaagtgaagaagaacagacaaaatggcatgcacacattatgtttactaggtaagggttttggaatttccttgaagtaacaatatggaactatcatactgttctcattttgattttgtgttaaggtctgtggataattagctagaggtaagaaaagacacagtctagccattctatgcagaccacactctttcccatgctcttagagagacacgcatcttctgcttcaagtaccacatggctatttctgcatacacaccatagttacactgctccctcttatgccctgccctagtagatcctctccagtattccatatcttactcatttgtccatcaaggatttactgcaatccaatagacatgcactgagcaagccttaccaaggaccatcctgcatcttcctagggaggttctttgaatactgcagtattgatgctatcagattcacaatgatagatctgaaagagactctggagatcatcttattgaggcctgttttacagatgaagttgaggcccagaatattgaattatttccccaatgtcacctagtcaattgttggcagaactggtagaatcagatagccttttaataatagctcatttcactgtaccttcttccccaaatcctatttcctttttagtgtggaaagagctgggatcactgtctttgttttccaagataatagtactgagtttcagaaagccatggtgttttctttctagcagaggcactgaaattttaccgattcacatttgctaatcagcccctattctagtagcatatgttgtagaaagaaatactggtatcaaagacttaatctgtgactaaacagaacacagctaactgacatttttgatgactttgcaatgatacttctacttggaatcagaagacaaaatcccagtgctactacttactagttagagagtactgtaaacattccttagccttcatatttatcaaataggaataattcctcctacttcatggagttatatagagcagtacttctcagactatttgtggtaaagaaccatggttgggttgtttaaaacatatgtttgatttttaaattttcggtcttttatgtcagtgtcaagttactataaattttgtacatattcttactcctgtagttacttcatcatttactggcaacacaaagctcacatactggcattggtcctgagatcatactttgaattgtactgtgttactgaaactgtgtgtgaagtcactcaccaaaatgtctatcacatagcacaagatcagggcagagaataagcccatgattttggcctctgtatattaaatacagatattcagaatataagacaagatttctgtttgccactttttttttttcaagacagagtctcaatctgttgcccaggctggagtgcagtggtgcagtctcggctcactgcaacctctgcctcctggattcaggcaattctcctgccttggctccctgggtagttaggactacaggttcatgccaccacgcccggctaattttttgtattttttttagtagagatggggtttcaccatgttagccagggtggtctccatctcctgacctcatgatccacccgcctcggcctcctaaagtgctgggattacaagcgtgagccactgcactcggccttttattttatttttatttttttgagacggagccttgctcttgttgcccaggctggattgcagtggcgtgatcttggctcactgcaacctccacctcccaggttcaagcgattctcctgcctcagacttccgagtaactgggattacaggtgcctgacaccacacccggctaatttttgtatttttagtaaagatggggtttcgccatattggccaaactggtctcgaactcctgaccttaagatctgcccgcctctgccccccaaagtgctgggattacaggtatgagctactgcacctggccaatttgccaaaaatttttaagctatttgcataatatagccaatctctattatttaacaatatttaattttaagcaacaaaataaattttttgtttgtttgtttgtttaagagacaaggtctcgctctgtctcccaggctggagtgcagtgtcacaatctcagcatactgcagtctcaacctcccatgcccaagtgatcctcccacctcagccttctaggtagctggaaccacaggcatacgccaccacacctagccaatttttgtatgttttgtaaagatggagtttcgccatgttgcccaggctggtctcgaatttctgggctccagcgatccacctaccttggccccccaaagtgctgggcttagatgagtgaaccacggtgcctggctgtatgtcttaatagaaaagattataatacatttttactaatgattggcatttcttaggatagaaattaatatctacagcagggattagcaaacaagtacccatggatcacatctggcctaatgttttgtaaataaggctttattggaacatggccgtgcaccttcatttatatattatctatggctactttcatgccacaacagcagtgatgagtagctgtgacagagaccatatggtcctcaaaacctaaaatatttgctgcctgccccctttcagaagtttgctggctcctgatcttgagtgaaattttatttaatctcatgtgctgcaccctgaatcccttcagtgatgtgttataaccttacactactttcttcatagtcttaccagccatatgaattaccttattaacttgatttcttcactgcttcataagagcagagactttatcttgctcattattctcttcctaatgtctagaagtctagcacagtgtaggcactaaataaatatttatggaagttaatggaagttttatttagtctatattctcagacttggtcttatgacccattggcacagaaaatctttaactcttgctagttcagtcaattgcagccagaatacactccttttaattccttttttttttttttttaagataaggtttaccctgtcatccaggctggagtgcagtagtgcagtctcggctcactgcaacctctgcctaccaggttcaagcaattctcctgcctcagcctcctgaggctgggattacagaagtctgctaccatgcttgtttaatttttgtgtttttagtagagatggggttttgccatgttaaccaggctggtctcaaacccctggcctcaagtgatctgcccgtctcaacctcccaaagtgctgggatgatgggcttgagccactgcacccggccccccttttattcttggcatctaattaattatagatctagattaggccataaacgcttctctaacacattttctttggtcttatgccaatatttgcaatcagctagtatgatgttttcttattttagtttattgccagtgtgatttagtgcttcattcatcattaattatctttataattttgtctttgaattttccttgtaaaaagagactggtcttactttttttatagtccttactaacaaggacactgtaagacttgtgagttggtgtggactatgccatcagatatatccatcttgttatcccaaagttagatccagttaaggccagctgtgggtagaaggtcaaagtagatgacgggcgaaggataatttttaaaaggacttttgctaaagaagtagatgtatctgagggatgaaaaatggggattcattggagctcagatactagaatatatgttttataacagtactgaaaggttctaaaacagaacagggaaggaagaatctgagaggcaggctacctgataacctccccatatatccattaaaaatgacaggaaaggccgggtgcggtggctcacgcctgtaatcccagcactttgggaggctgaggcgggtggatcacgaggtcagaagatcgagaccatcttgactaacacggtgaaaccccatctctactaaaaatacaaaaaattagccgggcgtggtggcaggtgcctgtaatctcagctactcgggaggctgagacaagagaatggtgtgaacccaggaggcggagcttgcattgagctgagattgcaccactgcactccagcctggaccacagagcgagactccttctcaaaagcaaaaaaaaaaagataggaaggagaggaagcagcacttatcttttcagaagctttggaaaggcagatagaagatcagtgtacaggtatttattgagtgcttaccctatgccccatgtagagttagtttcttttggaatactaaggaagtgtagacgtgggtcctgctctcaaagctttgaaatctagtttggaactaatgtgttgtgcacgtgaaagtttaaagaacaaaaattctattgtatggagaggcaggaaggacaaactagaaatgtggctcttgagttgtccttctaagagctgccccttttcttagctttcctgggaaaagacaaacaaggttaaacaatgtatcttccttgctccattaacaaaagcaggaaggaacagagtgtgaagtataggatgtcatgatttcaaatcctcaaaccatagttctcatcgttttatcatctggcattctcattatttaaattagtatgtatttattcaatgcctgctgtgggttaagttccatagggattagtgaggataaaccatggcaggaaaacacagagaatttaaaatttacttagaaagacaagaccaatatatatgatataattagaggttaataaaagatagcattaattgtgtagatctttccaagaacaaaaagcatttgaggagaagtcaacaaagactttatgaaggagttaggacttacgttgcccagagagtggatagtttaatatgggctggtgactgagtggtaggagagtcacttgagtaaatttattcagtagacatttatggagtgtcttctgggtacttcacattatgctaggtcctggtactaagatgaatcagagaaccttacattctagcaagtagaaatagagaggaataattatggactgtgtgaagacaagggaaaagtaatgcggggtctggcttgagacgaagtcacgaatgcactccttgattaaaaaggatttgcgtctaaaaattctcctcaaccctcttccttttaaaaatcagattctatagagcatatttgaaaagtaaagacaactgaaaatatgaaaaatctcatcacaacatttcagaagctcagagtgaatgaattaataaacgggttaaaatttttaaaatcttagaaacgtaatttaaaggaaatctgaaagttgactaacaccattgattatagggaggccacattcttaataacaggcattcgtttttttctccataatgtgacagacaagtagaaatattaaataaataatgatatttcaaacctgaaaaaggctttcaatgctggttccaagaacatttaaaaatatgtatttaatattaactctgctataatttccaagcaaactctttgatatcctttataagaaacacttctataatcacttaggaaatctgcataagtctattaaagactcctcagttgcactatgtttatttttgcaaaaacaaactttggctgaaccatttgttttcagcatgtaaagcaggaagcagctgttgctgttgctgttgtatactgagttcctttgaggatgtagagtgattctgcttttttaccttttaccaaatagttcagttgagcatgagtgattaaaaagtataccgaatcaaatatttgtgatgcttggactgtcaagcttctagagagcagagtttatatctggtcaggtccctgtggtatcccagtctctgacgcagcgtctgacacacagtccatgctcaaatccctgttaaaagcatgaatacttagaattaaagtatttattcaaaattatggcatgtgttaacattcgtcagaaagcaaaagacttttttaaatgtggaaaagatttttttctacttacattacatctatcaaagggctttcagatgggtctgtgcagttactagctggtagaaatgaaaacaaagattgtgattagctgttagtagtgtatatgccaatgtttatctaattctttcccttgtcttcttttccaaaaggaaattagatgttagcaggatggtctcagggccaagttcatgtttgttttctaactagtggcacaaccacaagcttccattcttctctatgttactgtaagaaagtggctaattaaaatgtgagggaagagtgtttccccaaaatttaggtgactcttaactgaggtttacacatagggttttggataaagcttttaattaaattaaaagaactatttttacttcctacagacatcaaagtaaaggagcagtctttggaaaatctaatcaagtaagttattattctgagaatgcatacatgtgttttatttccttgaacaattcaatacattctacttaaatgacctgagttctaaagatggttgaaaatgagctctcattaacagtgtgaacattaagcatttttattcttacgaaatgataagcagtataatagagtagaaatagcaatatattttgtggattcaacactgagaacagtggttggcatctaacagacactcagtgtttgtggaatgaattaatgcgttgggattctgaaaacatgggtgtgaggccgggtgcggttgttcatgcctgtagtcccagcactttgggaggctgaggcaggtggattgtttgaggccaggagttcaaaaccagcctggccaacatggtgaaaccacgtctctactaaaaatggaaaaattagctgggtgtggtggcacgtgcctttaatctcagctacttgggaggttgaggcacgagaatcgcttgaatctgggaggcagaggttgcagtgagctgagatcacgccactgcactccagcctgggtaacagagtgagaaaaaaaaaaaaaaggcatgggtttgagtcctgagtctgcctctagttgagtgctcttgggcaagttacttccatctctgagccttattttcttcagatgtataatgatagtactaatccttttttacttagagaggcagtgtctaatacagtaccccctacccacttgtgactaaggagcatttgaaatgtggctaatgtgactgaggaactgaatttttcatttaattttaattaattaaaaaatgatactctgttattggaaaacttttaagtatgtttggaacagctttagtatataaatcaactgttaaaaccataaattttatgaaagttaaatacagatcaactatttccaatgaaaatttaatatccaaattaaggtgtgctgtaagaacatatcagatttcaaagacttaatataaaaacaatctctttaataatttttatatgagtaggtgttaaattacaacattttggattaattaaaatattaaaatttttgccttttttggctgggcgtggtggctcatgcctgtaatcccagtactttgggaggccgaggcaggtggatcacgaggtcagcagttcgagaccagcctggccaagatggtgaaaccccgtctgtactaaaaatacaaaaaaaattagccaggcatggtggcaggcacctgtaatcccagctactcgggaggctgaggcagagaattgcttgaacccaggaggcagaggttgcagtgaaccaatatcacgccactgtactgcagcctgggcaacagagtgagactgtcttaaaaaaaaaaattgcctttttacaaacttttttgttaatatggctactagaaaacttgattctatatatggcttcatttatatttctattggatagcactgacagaatttttttgagagtcagtaaaataatctatttgaactgtgttgtaagccacaatagctatatatatatatatatatatatatatatatatatatatatatatatatatatatttatattttcgacagagtcttgctctgtcgcccaggctggagtgcagtggtgtcatctcagctcgctgcaacctccgtctcccgggttcaattgattctcctgtctcagtcttctgagtagctgggattacaggcgtgcgccaccaagccacgctaattttttttatttttagtagagacggagtttcaccatgttggtcaggctggtctcaaactcctgactttgtgatccacccgcctctgccttccaaagtgctgggattacaggcatgagccaccacgcctggcctgcaatggctatatttttgttaatatgatagttcggcaagcctgataggcttttgaggcatacagaaataaacgtatgccatcacctgagatttttaagcatccaagatgctttagtttacttttcttagaggaaacagtgaaaagaatatgtggtttaaaaatggtcataaaaaggacactaaataacctgattaagctagagtatagaccaaattgccacttactttgaattgtttttaccaaaggtatcactttgaataaagataactttcatttagacatctatctttatgtgttcctgccatcatttcagtgagatcagaggaaagttaaattagaacaatgaaaaagcttaagaaatgaacaatcatcatgcttttgtgtatgcttaaagtgagtacatgtaaaaaaacatcaaacagaatgtagactgtggtacttgagtatacctgggagagctaattgcattaataacatattatgtagtttcatggctaagaacagtggcatctagttttctgcctataggggaaggaagatctatgaacctccacggtatatgagtgtaaaccaagcagcccagcagcttctggagattgttcaaaatcaaagaatacgaggagaagaaccaggtactcaagacactagaagggctctcatattattcctctgttactacatttagatgtgtatatgacttaatatctcataccactatggaagcaagagtcagtatttttgtattgtactatttcttgtcatttttgtccaactttaacttaaatcccataggcttcaagttgtagtgaaagaaaaaaaaattggcattcttttatagtataattaacaccattccagaaagtgaggatttttcacaaattaaacataagtcacatttgatataaatatattactgtataaatatttttgtaaaatatatctattatgttatccctaatcaatggtgagatctatcctgcaaaaatatacttatcgttcttttattctccctcctttcattcttaatattgagactaggaatagttttcttcagggtaaatataagagaaaatttgttcttatattcctaatatgtagacacagtgtgtggtatataatagaaatgtttattgtcaataaatctttatgggaggttcttttttttttttttgagagagggtctcactttgtcacgcaggctggagtgcagaggcactatctcagctcattgcagcctccacctcctgggctcaagtgatcctcccaccttagctgaactacaagtgcatgccaccatgcccagctaatttctttgtgtgtttttggtagagacagggtttcaccatgttgcccaggcttttctcgaattccttggctcaagcaatcctcccacctcagcctcccaaagcctcccaaagtgttgggattacaggtgtgaaccaccacgcctggcccactgtgagactttttttttttttttgagatggggtcttgctttgttgcccaagttagagtgcagtggtgcaatcatggctcactgcaacctctgcctcccgggctcaagccaccctctcaccttagccacttgagtagctgggactacaggtgcatgccaccacacccagctaatttttttgtatttttggtggagatggggtttcaccatgttgcccagctggtctcaaactcctgagctcaagcgatccgcctgcctcagcctcccaaaatgctgggattacaggtgcgagtcaccgcacccagtcaagagattcttgagtgattgttgcttattttattctcattagtaggccatgttaaagtcgtgaaacaaatagtctgcaaggatgttctatatccataactttgtacagaagtttcctgcattcctgtttgtccttggataaaccatttgcccccttttgatcattgttcaatcaagacccctttcccaactaaacaatacaaccattaaagggtcagctctttagctgtagcaccagagtgaataatactaaagctaaggctggctgtttttaactgaaaaacataaatagtgccaaatgctcattatttgttaaggaatctatagtctactagtctcatatctactatcttagctctcattaccatgatttaaaagagggagtattacattttaaaaaatgagaaaactgaagtttatcacacagctaattggatggcaaggcagaaactcaaatctgtgaatttatttcataatctcatggtttcttcagtatatctaggtcaatatgaacattatctcaagcaagttattaaaaacctgtgtgtaataaacattgtttactcagaacttatttaaaaacgaatgctgtgcaattgtagagtgtaagtatagcttgtcaagtcctaaaagcttagtgtaagcctttgtaattctgaaagggtaaagtttggaagtactcttttatattaggtaatacaaatgatttagaaaatcccttggatgaattaatggataactggtccataagtggcaaaagagatttaagatatttggggcttcttgaaatgtacttgtggtactaatgtttgtttgactgttggatggatgatgcatttgctgaattgaatagcagtatcttttttttttaatagcagttaccgaggagacactttgtgttggcttagccagggttggagccgacgaccagaaaattgcagcaggcactttaaggcaaatgtgcactgtggacttgggagaaccattgcattccttgatcatcacaggaggcagcatacatccaatggagatggagatgctaagtctgttttccataccagaaaatagctcagaatctcaaagcatcaatggactttgaacatagatatttaccattgtctgatgtaaatttcagccatatatggattgatatggtttggatgtatccccacccaagtctcatcttgaattttaatcctcataattcccaggtgttgtggtaggtaattgaatcatgggggcagtttccctcatgctattctcatgatagtgagctttcatgagatctgatggttttataagtgcctggcatttcccctactggctctcattctcactcttgccgccctgtgaagaggtgccttccaccgtgattgttaagtttcctgaggccttcccagccatgtggaactgtgagtcgaaaattaaacctcttttataattacccagtctcgggtatttcttcatagcagtgtgagaatggattaatacctggatgcatgcatgtttgtgtaacaaacaggtcttttggcttatctagtaagtataaaacaagtgaccaaaaagaagttgactcaacaatgcttggtttcttgtggcagtgagttttttccctatgatatcatcagttgttgctgctattttggcaaattttcaggatgtacacataaagcagaccaggctggaaagcttgtggatagacatccactgacagaatcatttaagagcagtttttatttatgaaaccaatttatacaaggtggttgttaacagaatataacttagaggtaactggaatttgaatcacttgaatctgttttaaagggtaaaaaatgttatgagtgccaagaaaagcaaataaaagattagtaaatgttcacaaaatatgtttataattttcttctttttaaaaaagttagctgtccctactgcatgaggagttgtcctgacagcagctggtattagtgtatataaacaaaggtagaaagattacatttccatccagcagtctgacttaaagctcagctgagcacatgccacaaaatgacattcttctgaattcactgtcttggttagctgacatcctaattacgtggctcatactctgctgtattttggaggttataagattgtttaattataaatgttcagccagccttgtacagttgctgtttggttttaaatagcatctttcacatccaagcagacaaatggaaaacttgctgactacaaaataaaatttttaaaaatgtaagttttaaggcaacaatggattagtcaagatatgccatataacttaattcagttaatatgccattgtatatgtgcgagtagtcacactcttcttactagtattaaataacactccatttattatatttcatttcaaagagtttcagttctgaatagaaatagctttcttatatcctagttcagttggttcaactctaagtatttccatggcctaaccaatttttctgagctctttacttagtaaattcattgaaatttgaacagatttccctattccctgggatcatcaattagctaaagattatttgacttattttacttcatttgagataagaaatatttatatatatatgaaacatctcttttttctttattattttttatttatttatttatttatttttgagacacagtctcactctgtagcccaggctagagtgtagtggtgcaatcttggctcactgcaacctctgcctcccaggttcaagcgattatcctgcctcagcctcccgagtagctgggattacagtcatgtggcggcaccacacctggctattttgtgtgtgtgtgtgtagagatggggtttcgccatgttggccaggctggtcttgaactcctgacctcaagtgatccacccaccttggcctcccaaagtgctgggattacaggcatgagccactatgcctggcctcattttcaatctgttagacacagaaggggagagagccaagtacatttaaataccagttgtatattattttcttctcatatgttaaactaaacatttaagaactatataatgaaggacttctggttttggtaatggtgtaatagcttgtaatgtacaaaccctcccaattataaactgtggacaaaatataataaacaatggtctaaaaactctagggagtcactgaaaccagctgtgaactatatatggtttttccccttcggtctttcccagactgtgtggtaaggcgtggctagaactcaagagaaagttgcaatcttactggcttgaggtgttaggatggaattaaaggccgctagaagaactgaaaattaaagcagcagatcctagaaatgaaggtgtcagaaatggaggaggcttcctgtctgcatatgatctctccttaaatccttagctaactctcgaaccgtgcatgccccgggaagactccaaggaccttggtggaaagccacagttggaaggctcaagaagctgaacagagacggctgttttctattgcaatagaagacacagtttcaagtttgaattctgacaagttagaagggcttgatagaaccttgagcttcccaaaccccagaatggccatgtattagtaaaggctgtgcacaagactaaagatttatgctaaaactaaggatgaaacctttaacataatataaaatcaaggtgattagccaatactttaaatgagatcaaagcttagcactcttcagagtatgataaaatgaatctgtataacatataaacaatgactggaatacaataaaatgctatagggtatccagagaaataaggaaatacagtttatagcttatggtttaaaaaaaaaaaaaagagcagacaacagaaaaaaaaatccgaacataaactagatgatggtggaattggcagacaaggatttttaaagcagtttttagaactatgttcatggacaaaaaggtagggtggttgtaatgaatgaatatagatatatattctcacccaaaatgtggtaacattaaaagaaaatggttgggtttaaccgtagcatagagatgacacatgaaagaaattgtccaatctgaggaaaagagaagaaaagattagaaggaagacaacagaaagcctcaatgccatttggggaaatatcaagctatttaacatatgtaactggatttccagaagaatagaaggaaaatagggcagaagaaaatataagtaacttacaggccagaattacctcaaatttggtaaagctatcaactcacagatccaataaactgagtgaaccccaagtggaataaataaagaaaatcataactaacgtaacaggtaaaactgatgaaaaccaaggataaaagaaaaaagctaccaagggtggtagtagggaacctaccaaatttttatttgaaattaaacttaaccaggttcctctgtctgctaaatctggcaattctgttctgtatgtaacttaacctcaatttaaatgaaattgtaaaatgaacactgcactactcagcagggaaaggatgaacaatagtgttttcagtctgttctctgaaatccaatgttagttaaaatagaaatacctgaaggctgcatacatttgattatttaatagtgtttagctctttaatactataaagttctttaaaattatcatgtagtgaaacactattccataatctagatacagaacggtttcatcacccacaagatctcccactgtccctttatattcatccctctagttcattcctctttattgctaagtagtgttctctcatatggatagactacagtttatccattcactatttgagagataattggtttgtttccactttttagcgattgtgtataaagttgttaaaacattaacataacaggtttttgcctgatattttatccagagggattgctggatcacatggttaagtgtgcacctaattttataagaaactgccaaaatgatttccaaagtgcctgtacattttgcattctcaccagcattgtatgggttcccattgctctgtatctttgccaccacttcatgttggcagtattttgaactattctgataggtgtgtagtggtgtctttttttttttttttagacaagagttttgcttttgttgcccaagcaggagtgcaatggcacaatctcggctcaccacaacctctgcctcctgggttcaagctattctcatgtctcagcctcccgagtagctgggattacaggcatgcaccaccacgcccagccaattttgtatttttagaagaggcggggtttctccgtgttggtcaggctggtcccgaactcccaacctcaggtgatctgcctgccttggcctcccaaagtgctgggattacaggcatgagccactgtgcctggccgcagtggtgtctttgttgtggttttaatttgtatttcccagtacctaatgatgtggatcatcttttcatgtgcttattcaccattcttatatcctatttgatgaagcatcagttcatgtcttttgcctacttttaaattggattgtttccatatggtgaaattttgagtgtttattacatattctggataaaaccttttgtaagatatatgacctgcaaatattttcttcccatttgtagcttgtcctttcattcccttaaccatttttgataaagcaaacgttttaaattttgattaaatccagtttatgttttcttacatagattatgcttctgttgccatgtctaagatcccatcacaaattcaacagactcaatatttgtatgaagtgagttttagatccacactcatttttttttttcatgtaaatgtttagttacaacatcttgataagaagactgttcttccattgaattgtttctgcaccattgtaaaaatcattaagccctatttatgtaggtttctttctgaactcttgctgttctattgatctgtgcatctctcccttctatgatactatgctgtcttaattactttagctttatggtaagtcttaaaaacaggtggtgtggttcctttaacattcttttttcaaagttgttttagctattctagttcctttgcctttccatataaacgttagaatgagcttgttgacatatacaaaagaggttgtgagatttggattggaattgtttgagatggtgtggatattttggggtttattctgttttgggtttgcccagcttcttgactctaggtgtacatcaccaaacttgggaagtttacagccattatttcttcagatcttccttcagcactatatactttatcctctccttgagaaattctgataaatacaaatgttagacatttcttactgtccaacaggttcccgagctttgttcattgttgttgttatttcagtctgttttctctgttgcctagagctgataatttttatccatctatgaattcattgactcttttctctgtcttctccattctgctgttaagtccatctgtatgtttttaaaattttggttactggtctaaaatttccatttggttctttttatgtcttctgttttttattttaacatttgtttcaagattatttgtgatttctttgtcatgtatttttctgtaggtgtttgagcatttcatatagcatttttgtattgctcgcttgagcattttaaatatctgctttaaggtctttgttagataattctaagattgatatctcagctttaccatctattgattttctgtaagttgaaattttttgcagcactttatcaagtaattttggattatagcttggacattttgaatattatgttgtgagttgctgggtcttgttcagatttaatggagaatatcaatctttttgtttgagcaggcaaccaacctgttagcttcaggatgcaattatcagattgctctttatgggccacagttccagtgtaagttcggttttcaaagactgcagttctctttggatctatttcaagtttgtggcacacaatttgggacttacgaagtcgtctgttggatagtttagttctcaagattctcaaggctaaatagaatcagatccaagcattagtgatttgaggatgatccttggggttcataaacaactttatgagattgctttcgtggtttcctcccactccataatctctccacttcctggttccctgggctccccttcttggttgagcctctggccagaaaattgggcatctagttactctactctgatactatttcatactttcatggctgggcctgcattctgctccatgtggtgggggtacagagagaaaaaagcaacagggttgctgtacccttttaaaaccataactctaccaaacagaaatattcccctcccccaaagttttagttcctatgggcttacatagctgttggccaccaccataggattgcctggccaaagcttttggaagccagtgggaagtcttccctccaactaatgtaactacaaatgtagtaactttgccttcttctgaggtctgtagaaaccaatatgacctgtgtacaaattattgctcacggggaaagtagtatgatgcacatacaggacaataaaccctgtaaatctgaacattatgatctaacttattgtctagggtggaagacagcgacggctaatcagatggaccttattttatttgtaattttacaagtcacaatgacatactcaaaagtccaagccaaatggccaagccaagccttaattgctatctaagtgctcctgcttatatgtgaatctgaatatcttgtttacttaaaaaataccacatttaaacaatgccatttggtggctacattcaggaaataatttttataaggtctttgtattattttgctttattctttagttttagcagttgctctttcacaaaaagagtactattcactttaacaattcatacagaatcacttttcaaagaggagttaaagtttacattaaaaagcaaaattcatccatttcttcaataaactgattgccttgcctacactgtgccagactatgcatttcttactgtcaacattagcagataaatttgaattgtgaatttaaatgttggtagcatgtgctaagcctgaatttcatggtagttttttttgttttgttttgttttgttttttttttttttttgcctcaaagtagaactggatgagctgataatgttttaatgaactagaatcccattaaaatgctgtttcttttttttggaaagaatgaaaaaaagtagtaaattgctgtcattctgtctatatctattgaacctgtttgctcctccttgtctctgctgtttttttgctctagactaatgaaaagtttggtgccatatcaagggtttgatttaaggagggaatgaaatgcatttaagtttcgaaagttgttcagaagagtttacacttgataagcattagggagccactcaagattcctgagctagaggactgcaagtggaaactgggaaagcaagaccagtttaacatggggtggcttctgcggttaggaaagccaaaactctacataagattggccggtgcagtattgtaccaaacaacttcctaacccagtgtgtaaacagaagaggctgctctgtaggagtgttgacaggccactgtagaattaggccagaggctaattacagagaagacaggataggtagggagtctcaatctagcaggtatgcagaggggccagctcccggcattcaggaagccaggacaggacaaatgcttcaaaagcacctggacaaaagttggattcaacaaaaattccttgtactccaggccaaagccaaaattgtttgggtgggggctgaaatggaggtggctagagttgggcaaggaaagtgattctgcttgcagtcatcagtgaaatcctggaatagggcagtgggaatggaaaagaaagtaaaagatttcaaaggaagaaagacgttttatgataagggattcaggaaatggaggtgacagggcattgcttagttttctaagaattctatgaagaattccgacaaattggtagttgagaattgaatgggaaagatttgttttcttcaattttgaatttgatatgctggtagttctgccatgaatgtgacgagaagccactgatggccttgaagcaacttctacgaaatagggaggagtgaagctatactactaggagctatggaaatggttagaaaggaggtagaagcagcaaatgtagaccacatacaaggaatctgacagcagacatgctgaggataaagccttgaagtatggcagagattgatgatagtaaagaagctgctttggtaagaatacctttgagaaggaaggtgacatgagtggtgcatgggatactgtggaagaagttattttaaaaaagaattgcatctaatcagagggaaaaatttggaaggataatggaggctcacatcagatgttttggtcttcacgtcatataagacaaagtcatccatagaaactgagatgagagaacaacttgggagtgatggaaatatctggaagtaaatacttcgagacatgtttatgaggtcagatgctgactaagagccacaatgaggctgttcacaatgtaaagatacttccaacctcctagcatctcttctctcctagtaagttctgctgtttcttggctctgagaatcattctttgcctttcattccttaagtcctctagtatctattccaatacctgtaagattcacagtgtttgtttcagttcgtcaaactgataagacacaattcaggtagagatttttaaatagaaattttattgaaagaattttgatacagttcatgattctttttaaatacatatgaagtttaacaaaatatatacatgaatgtgttcaagtagaaaatgtgaaatatacattatagatttgttgtattgcacttgggcaaatcataattgctcacttcagcatattcaaaccgaatcacaacatagtctttgaaagttgacattataacttagccttgtactcaaacattttaagaaatgttttgatgccttaatcttcaccaaaggaatcaaacccaaatactaacttggccatatgtttaaataccactaaaggcagggaggtaaagtgttgtagggtgcttaaaatatactaagaagggatttggcaattttccattcacagtatttccaatataaaagactcatcctatttatcaaactcacaaaagttgggggaaaatatcacttgggaaaaaatttcactgaattgctatcaaaggaagcaatgaagttacttgacaaactattgacaggatgtctagttcaaaatagaatcttcattgaggctaactgtagcacagtatgtgatacataaacaaaattcaaatattaaaattctaaataaaaaaattttccccgctagtataaagtagaagttctatagtggaaataacaatgaaaacagatgaaaaatcagtgaagaaatagagggaggtactactaaaattttgtgtttgagaggaaaaagagaaaggtaaaaaataattctgggaatatttaaatcagtaattgaatacatgtagtgatgtctttaaagcaccttcaagaaagacctctttcattttggatgacaatacattaggataaatgaaatatgtgaatatggcaattttccataaaaacaaaggagactatgagactgtctggttcctgatttggccatacaaaatatagaaaattcaagtgacccaggttccacagtcccaattctgtcaaattccgatccaacaatttgtaaaatggataacatctgtatacttccactgtatatgaaaaagaatgagcagctcatagggctacttaaaaaaaaaaatggccaaggtgaatatatagtcatttatttgtgcaaaaatgccaaagaaatgctgagatgtcttctgtaaaaaacagtaaattactggttttacctatccctaacccttatttttgacacaactatctaaaatgttcactagttaaccaaacatttactcagcatgtgaatccatgctaagtttgaggataaaaggatgcagaagagaaagatattctttattacaagctttccaacatcatgatcaaaattacaaataattttcaaggctgttgtaagaagtcaacattaaatgttaagtttaagcatagattactactatttatgaaacagatttcttccttttgaaaggtgtgtataaaatgtgatgtaaatcaaatctacttatccttctcctgcagtgcaaaattacttgtacttttggggaagataattccctaataaactaaattaaggtctcttggatagaaattcagtttctctcttcatacagccacaaagggtactatcttttcattcagtcccttaagcagcttactcttcaatgccaacaaaactttattttttaaatagtcttaaaagtgcttaagggagttctggttcctctttttagcctgcacagtttaagatcaatggtaaaggtaggaaataatcataagggcactggaagaaggaatgagtctaaataatgtataatgactgttc

SEQ ID NO: 689 - DNA, 1421 bp, Homo sapiens
gcacggagccggcgcttttgcagttgcttctgcggaaaggtggtagttaagaatttgtaaaggccagagaactacctacgattctctcagcggtctctcttctcctcaagtttgaaatgctttatctcatcgggttgggcctgggagatgccaaggacatcacagtcaagggcctggaagttgttagacgctgcagtcgagtgtatctggaagcctacacctcagtcctaactgtagggaaggaagccttggaagagttttatggaagaaaattggttgttgctgatagagaagaagtggaacaagaagcagataatattttaaaggatgctgatatcagtgatgttgcattccttgtggttggtgatccatttggggccacaacacacagtgatcttgttctaagagcaacaaagctgggaattccttatagagttattcacaatgcctccataatgaatgctgtaggctgctgtggtttacagttatataagtttggagagacagtttctattgttttttggacagacacttggagaccagaaagcttctttgacaaagtgaagaagaacagacaaaatggcatgcacacattatgtttactagacatcaaagtaaaggagcagtctttggaaaatctaatcaagggaaggaagatctatgaacctccacggtatatgagtgtaaaccaagcagcccagcagcttctggagattgttcaaaatcaaagaatacgaggagaagaaccagcagttaccgaggagacactttgtgttggcttagccagggttggagccgacgaccagaaaattgcagcaggcactttaaggcaaatgtgcactgtggacttgggagaaccattgcattccttgatcatcacaggaggcagcatacatccaatggagatggagatgctaagtctgttttccataccagaaaatagctcagaatctcaaagcatcaatggactttgaacatagatatttaccattgtctgatgtaaatttcagccatatatggattgatatggtttggatgtatccccacccaagtctcatcttgaattttaatcctcataattcccaggtgttgtggtaggtaattgaatcatgggggcagtttccctcatgctattctcatgatagtgagctttcatgagatctgatggttttataagtgcctggcatttcccctactggctctcattctcactcttgccgccctgtgaagaggtgccttccaccgtgattgttaagtttcctgaggccttcccagccatgtggaactgtgagtcgaaaattaaacctcttttataattacccagtctcgggtatttcttcatagcagtgtgagaatggattaatacctggatgcatgcatgtttgtgtaacaaacaggtcttttggcttatctagtaagta

SEQ ID NO: 690 - protein, 307 aa, Homo sapiens
EFVKARELPTILSAVSLLLKFEMLYLIGLGLGDAKDITVKGLEVVRRCSRVYLEAYTSVLTVGKEALEEFYGRKLVVADREEVEQEADNILKDADISDVAFLVVGDPFGATTHSDLVLRATKLGIPYRVIHNASIMNAVGCCGLQLYKFGETVSIVFWTDTWRPESFFDKVKKNRQNGMHTLCLLDIKVKEQSLENLIKGRKIYEPPRYMSVNQAAQQLLEIVQNQRIRGEEPAVTEETLCVGLARVGADDQKIAAGTLRQMCTVDLGEPLHSLIITGGSIHPMEMEMLSLFSIPENSSESQSINGL

SEQ ID NO: 691 - DNA, 155350 bp, Mus musculus
  misc_feature (1)...(155350): n = A,T,C or G
gttggactaaatgcatttttcattatgataagggtacaaacctgtcgtagccagggagtagaatgtggtgttttaaaggggaatggtaccataggctcctgtctgaatacttggtgttcagggcatggaactgtttgggggggattaaaaggtgacatttttgttggggctatgtcactgggggtgggctttgaggtttccaaagcccatgccaggcccagtttctctctttacaacttgaagactggatgcaagctctcagctacttctccagtaccatgcctgtctgttgccacacttggtgtcatggtaatagtggactcacccattgaaactttcaagtgccttcttttataagagtgccttactctcctcacagaaatagaacaataactaagacaaggaccattcaatggtccttagacatttgaagcaaattggaaatgtgaaaatgctaagtaggtgttgtatgagctaacagaaaaaaatgttttaaatgttttaaactattgtttgctcttattctatccaacattgaaccattttttatattacttttttttccagtgtgtgtatgtgtgaatgtgtgtgtatatatgtgtgtgtgtgtgtgtttgagtgtgtgcatgtgtgtatgtctgtgtgtctgtatgtttgctggtacccacggagccagaagagaaggtcaaataccttggaactgcagttgcaggatgttgtgaaccacctaatgtgggtgctatgtggagagttatgtcctctggtaaaagagcaaactctgttgactgataagcgtctctctggccccagggtgaactgtttcttgactagattgaaaccagattgtatacaatcaccaccaatgaccagcttagtggttgggtttaaaaggagttccaaaggagttcccaaagccaaacttatacaagaaaatatcagggtcatgattctattgtctgcctctggtgagatccaccacagctttcagagtcccagtgatacagttatatctgagcagcatgttcagcaaattgttgagacatactgaaacctgcaacagttgtagatgctctccgtcaagagagaggcccattgcttcttcagagtgatgactaacctcaagctgcacaatcaggtacttcaaaatctgaagtaactgtgctctgagatgtgccttatccactacctgaagctgaccactacatgccgtgacctgaccactacgtgcagttgacctgaccattacatgctgtgacctgaccactacatgcagctgtcatgaccactacatgcagctgacctgaccactacatgccactggcctctcaccaacagactagcactgttttgagcatctcaacaacttttcacagaaaaaccactgccagcaggtgctttccaaaagtaaaccaaaccccaaggcataggtttttgttacagaaagacattggcagaaagaaatgtgcattgtaatggttctgatttggattagtaaagatttgattgagcctaggtataattatataaaatttgtggtctaaaaattcaatttcctttgcaccaacttaatagaaaaagagtacattatggcctcaaactagcaaaaggaaagagctaacaaagattagagcaaaaacaaatgaaacaaactataaaaaaatcactaaaaataatttgcattttggagcacaaagttgataaacctttagctagactaaaacaaaaagaaaaaatttcaagtaaataaactgtagacagaaaggaagccatcatagaaatacaaagaagaaatctatagaggatactgtgagcattatttcccaaatttgataactgcaaagaaataaatacattcctataaacatactaagacaacactgaatcatgatgagatattttttaaaaatgcacaggtcaatagtgaataagaatattggaacagtaattaaccacacccccaaagcaaagcttagtcacaagtcctcattggtgccagtgccaactccccagccccctccagaacacttctacagacatttaacaagggcagcgtccctctgatgccaaagccgaacaatgacattacaaggggaaaaaattacaggctaatatccctggtgaaaatggatgcaaaattctcagtgtaacactcccataccaaacacagcatcccatttagaagatgatacagagaggtgctggtgcttttcaattctagtgttatttctctcttatctcacatgcaacggtccttcggttgtcatagcaacagcctgtgtgtttctgtggcaaccaggccttctagaagtaggcttccttctttcagtctctgttccttcctcaggcactattccttctgttctaggagtgttggctttctgcagccactcttcctgcatactgcaggttcccccttcagtaattgatacaccgtctacttagcttattacttattaaattcacaactatattctctattcaaacactaatatgatttttgttttctgactgagacttgcctggtatgatgttccgtatgaaatggagtctttaaaatgctgaaaaactgaacatgagagatcagatcagacccttagaatttatgcattttttagttaccatgaaacatatcagattgttacatgattaataaattctcccagaatataaaaataagcccatcagcaatagaagactttgggagtgagactgtggcagggaagaagagtgaagatcaacgtaaaagtgcagatttctttatctttcaaggtcatgtgtcaggaaataagatataaggcagacagtgatgggacacacctttaatctcagcacttgggaggcagaggcaagcagatctctaagttggaggccagcctggtctacagaacaaggacagccaaggctacacagagaaaacctatctcaaaaaaaaaaaaaagagaaaaggggagagacagaaaatatgtattgttgattaaaagcaagaagttaacatgttgcttaaacatatagagtaacaaactaaaatgattaaaacacaaagataacaaagtcataataatttaatactttacatgtattgaaccatttatcctaacaataattaattctctaagagtttttaccaatgaggataacgtacctaggtcacacaggtggtaagtgactcaagtaggatttgacaatgtgcatctcaggccagtactacaacataactgggcatggtggtgcacacctataatcctgcacccaggaggtagatccaaaagatgatgaattcaaattcatccccagcaacacagcaaaatcaaggccagcctgggctcactgagcccttgtctcagaatgaataaatgaataaatgatagctggagagatggctcagtggtgaggagcacttgctcttgcagaggacctgagctacttcccagcaaccacacagcagctcatagcaatctgcaactccattccaggggatctgacagcttgttctgttctccaggggaatttggtacacccaaggtacatatacgtggggaatcaggtacacacaaagtacatatacatgcatgcaggccaacattctttcacataaaatagaaataaaaataaaatataaaaaggtaaataaattcaagctggtagaattaccattagtgaacacatttgggcaataaaccaatgcatagtaaattgtaacgaagtcttttttttcctttttccaattttttattagatattttcttcatttacatttcaaatgttctccgaaaaatcccctataccctccccccgccccgcacccctacccacccactcccacttcctggccctggcatttcccggtactggggcatataaagtttgcaagaccaagaggcctctcttcccaatgatagcctactaggccatcttctgctacatgtgcagctagagatacgagctctgggggtactggttagttcatattgttgttccacctatagggttgcagatccctttagctccttgggtactttcgctagctcctccatccaatagcttattgtgagcatccatttctgtgtttgccaggcactggaatagcctcacaagagacagctatatcagggtcctttcagcaaaatcttgctggtgtatacaatagtgtctgcatttggtggctgattatgggatggatcctcaggtggggcagtctctggatagtccatcctttcatctcagttccaaactttgtctctgtaactccttccttgggtgttttgttcccaattctaagaaggggtgaagtgtacacattttggtcttcattcttcttgagttttatatgttttgcaaattgtatcttaggtattctaagtttctgggctaatatccactcaattcttcaatgaattagaaaggacaatttgcaaattcatctggaataacaaaaaacctaggatagcaaaaactcttctcaatgataaaagaatctctggtgtaatcaccatgcctgacctaaagctttactacagagcaattgtgataaaaactgcatggtactggtatagcgacagacaggtagaccaatggaatagaactgaagacctagaaatgaacccacacacctatggtcacttgatctttgacaagggagctaaaaccatccagtgggaaaaaagacagcattttcaacaaatgatgctggaacaactggcggttatcatgtaaaagaatgcgaactgatccattcctatctccttgtactaaggtcaagtctaagtggatcaaggaactccacataaaaccagagacactgaaacttatagaggggaaagtggggaaaagccttgaagatatgggcacaggggaaaaattcctgaatagaacagcaatggcttgtgctgtaagatcgaaaattgacaaatgggacctcataaaattgcaaagcttctgtaaggcaaaagacactgtcaataagacaaaaagaccaccaacagactgggaaaggatctttaccaatcctaaatcagataggggactaatttccaatatataaaaagaactcaagaaggtagactccagaaaatcaaataacttcatttaaaaatggggcacagagctaaacaaagaattctcaactgaggattatcgaatggctgagaagcacctgaaaaaatgttcaacatccttaatcatcagggaaatgcaaatcaaaacaaccctgagattccatctcacaccagtcagaatggctaagatcaaaaattcatgtgacagcagatgctggcaaggatgtggagaaagaggaacactccttcattgttggtggaattgcaaacttgtacaactactctggaaataagtctggcagttcctcagaaaattggacatagtactaccggaggatccagcaatacctggattggtattgctcctgggcatatatccagaagatgttccaactggtgataagaacacatgctccactatgttcatagcagccttatttataatagccagaagctggaaagaacccagatgtccctcaacagaggaatggatacagaaaatgtggtacatttacacaatgaagtactactccactattaaaaacaatgaatttatgaaattcctaggcaaatggatggatctggagggcatcatcctgagtgaggtaacccaatcaatcacaaaagaactcagatgatatgtactcactgataagtggatattagctgggcggtggtggcacacgcctttaatcccagcacttgggaggcagaggcaggcagatttctgaattcgaggtcagcctgttctacagagtgagttccagtacagccagggctacacagagaaaccctgtcttgaaacacacacacacacacacacacacacacacacacacacacacacacacacacacacacacaagtggatattagcccagaaatttagaatgtaaagaagtcttaatacactctttcagcaacttagttcaagtatgaatatgtgttgctctgctgccctctagtgcccattgcctaagaatgttagaatgagcacaggttaggctagatgaagaagatggaggatgaacaagacaataatttgaggtttttttcttgtagactctgcagaagtttctgttttccatgaaagactctgagaagttgaaatgtttcctaatacagtaaatgtttcctaatacagtgctattcatatataggcaacaaatctacagacaacttcctgggaccactggaagctgagagcaccctggccaagtctttatctataggtaaatatgattttctcagaattacactctaaacaacatgtatcagaaagaaaattatttcaagaagtaattttctaagtctgaatgaaaattactactacaaacaagttttcactaatatgcagaattaaagagaaataactattttgttcagcatgtcaaagagatactctgaaagggaaattgaaaattacttcagaatgctggcagaattaaatcaatggctttgaggcaagacaaaagaaattctcaggcaaatacaaacatgcatgcatgcacaagcacacacacaaacacacatacacacacttaagatactcacacacccacaagtctttaatagcatctaatacacagaccccaataaaatttgattgcttaatatatatctttatagttattttatttgagccggaaacaaaccactcaatagaaatattgtttctataaatcacagctgttatgtgttgagctatacttactcccaaattcattcaagtcctgagcccaatactttagattgtggctgttttggaagagagggtctgagtcaaaaggaggtcattaggataggcctaaactagtatggctgtacccttagaggacatttggacacagtcaggtggagtggtagcagatcatgtgaagacatgggggaaaaaaaaaaaacagctatcttagagcaagaagagaaatcctgcagacacattcattctgaacttctaacttctgaaagtgaaaaaacatcttcctttttttttggttttttgttttgttttgttttgttttgttttttgttttgtttttgtttttcaagacagggtttctctgtatagctctggctgtcctggaactcactatgtagaccaggctggcctcgaactcagaaatctgcctgcctctgcctcccgagtgctgggattaaaggcgtgcaccaccacatccggctggctcatcttcctatttttttaagtcactcagaatgtgatgagctaattctaatgccttttccaggcaggggttgatgttgatatttgcttgagtttgtagtaatttttatcaccactggcagatttctaatgtcaagggtttttttcccctttgtaacaaaagtacacttattgggctacttagtatgtgtgtattaatagcattataagcttcttaaaccctaaggctctggcttagcatatagtgattattaaatgagtgataaatgagtgattattaaagtagtcatcataaggtgatatttctgcacatatcattccttctatattagttggaattttaatttttaatttaagggagaactctttctttcaagctttcaaactattcttttatttcactaggactttaagtattcttgtgtaatggacttgtttaacatgattataatgttgtttagtttgagccatctgtaagcagctgtggccttttcaagatgatttctggcaacctctgttatgtttcgtcattctgtaagaacatccttaatttctgtcacaatactttttcaattccattttgtacatgatctgatcctgttctagaatcaagcgcttctccaaggggccctagttcttttcaaggacaatggtgctcaaggaaccaaggccttgtaagtactgtgtgttcattgctcctagcatctcgcttctcctagagctctccaacagacaaaactagggggaaaactacaagcagtagacacatagatcatcttacccagaagttctttgcaaccaaaataactgtacatgtggttaggctttaaatgtcccttctgttagaaatactgccttatctgccttatcccacaatagacctctgcaaattctctctctctctctctctctctctctatatatatatatatatatatatatatatgtgtgtgtgtgtgtgtgtgtgtgtgcttgtgtgtgtgtgtgcttgtgtgtgtgtgtgtgtatatatatatatatatatgtatgtatatatacatatacacacttatgctatatatatatgtgtatatgtatatatacatatacacacttgtgctatatatatatatacactcatgctatatatactcatgctatatatacacatagcatatgtatatatatgtgtgtgtgtgtatatatatatagcatgagtaaattatacatataaaattttaggtatacatataaaatttactcatgctgttacaaaaatagggaccaaaaaggtcactggcaaagatctcagccaattgtgtcctgagaataatacccgatccagagtaaacaaccaacattataactttgaaattggcaattcagatgttaaagagtttatatgaaaactacagaagacacaatgaacagctctaggtgctcataattcatctagtaactgttcattaggtactatttgatactttacatgctgtggatgaaattattaaaatccaatgacaatttttagaaatcagtacacacagtctaatgaggtgagcgtattaggaatgctcagaatatttcaactaagattcacagaaggaacacgacttgggaaggattttcaagagaggcgggcaatatgtacaaggatcatggcagaaaatggtgcaaactggcattctctacataactcaatgttgtataaaattatgtgcaacacacaattcgattgcttatttcatgatgcacacaattcaaaaaattatgtaaaactgaaagaaaaaaaaagtaatgagaaaacccagcgagatggagcatctgtatccatggcaaagtgagattttatttttctcctttcaaatattttttaaaagagggtaccgattgcgttaccagctttacattggtaatgttactctggtagtgttgtgaaggaaaatttgtagtcaaaactggagtcaggacacaagtaatgaggccagttccctgtaagacattctggcagcttgccttaggtaatggcaatacactggggacattaaagataggtttggtaaaaccttgcagggatggtgacagcttaaatcaagatagttttagagggggtaaattttgagggtttttttgtttgtttgtttttgagtgaaaagctcagcagctcaacatggccatctttacattggtgacacttcccacgcatgagactggttgtcgcactgcattttgagaccctgatgagatggggtttgttaggtctggtaccagacaaaacagaaaagccggcctcggaacaactgtcgccatgcaaaggaggcccgggttgtgtgggagggcagctgcagaaaacggcctctaataccagtcgacggaatggtgcacctagtatttcccactcctggtgattcacagcccaagatggcgtctgaagcggaagtgagggggcgttggcaagaaaacgtggcgcaattcttgtttcaacacggtaaactccgcgcctgaggatttgtctgcagcagggctccccattctcacttaaaggcgcgcttcattttgctgggtgaccagtctttctcggcagcctggcgtcattaactcgctcgctcattcattcattcattcattcactcattcactcactcgttcacacatctgcacccgggactcgcttccggctgcaggggcggaacctcagctccccgcccggtgcgcgcgcgcgcgaccccacccccacccccgccagatcccggaagcgcgccgggtagagggcgtggccgtggtccggccgggatctcccgtccctagtctgagttacctaggcaacagcggcagaggcgggcctgacgtcacgggcggcgcgcctccgcactgcggcactgagctggctggacagcgcgcgtcgccagcggtcctgccggccaagctgccgcctccctcgtcctcgcctaggcgcagggaaccgcttcgcgccgccgccgggctgtccctcctctctgtgagtatcccgcgggcgcgctgtggcggaggctctggcctgcccggtccccgggggcggcgagggggcacccggagactgtgggatgctcgcgagcaggctaccggagaccggaggatgcctgcgagcggcctctcctttcccgctgcccagtccggtgctctgaaagatggacgcagccttcgccttcccacccccgacccccggttcaggcttaaatgccccccaaccatgctattgcgtacttagtgtccttgtaaatgaccatcgggtgcgcaatgacaagctctcttaataacatctaagtagatagagtgatggatctattgtaagtgtcatctcagtgcgtaaagccccccgtcccccaaacggaggctatccgggaatctaacaaatggttgctctgcctttattagaactgcgaaaatgtccgtagaagcggtccctccatgattttgttttgtttcgttaaagcaaacatcttttggatgctaacaggtatttcacctgttgcgtaaataattgcgtgagcacccgggagaagattgtgatgaggaagataagggaatttttaaaagaatatttgaagcaaattcaaatgcaaaaagaatttttagcaatatttacaatattatttgtttatgggggctatcacagatttattggtcaaattacacaatcataatttttgttttcttcttttgctatgaaattttgctaccgagccatcgtccaaggttttttttattattattattctttttttgcgttgatgtataagcacatactccatgtttttcagaagcgagggaggaaacgtaatctagttattttttctgcgtagtctcttttagaaggttctataaagagccacccatctttggatgggaaagacttaaaatagtgatagaatgatatctaatatcgtgtatgctagttttaaaaaaaattgttttataaaatgacatctacaaaattcggaatgttttattaaatataatctaaatataagtctatattataaaatattaatcaaacgtaagttactaattatctgtgctttctgtagtatacattaatattaaaatgattatttctgtaattgtgatgttattaaatgctactgtttattcagttatgcctcgaaatatcaaatatgagaaaatttaaatatacatttaatcttttatttcttaattatattcttaattatatatttgttaaatggacataaagtaattttactgagcacctgtgatgtgtgattattattttttcaatttccttcttctccgttcaataaataaatacgacttgttgatgccactcaggcattaaaaaaacaaggcctaatgaagttaatatcttatccaaagccatttagcaatgtaacagtactagaatcttccttaactaccctgttttgaactgaaaggcacagacccagccctctagcaatggtggggcaggtgggggggggggagggtctgtgtgtctgtgacagaggaggtgggagttaggggagaaagaggtgcgggcgcccatatgtgtgtctgtttgtgtggtgtgtacacacgcgcagtcatgcgagnnnnnnnnnnnnnnnnnnnnnnnnnnnnnnnnnnnnnnnnnnnnnnnnnnnnnnnnnnnnnnnnnnnnnnnnnnnnnnnnnnnnnnnnnnnnnnnnnnnnnnnnnnnnnnnnnnnnnnnnnnnnnnnnnnnnnnnnnnnnnnnnnnnnnnnnnnnnnnnnnnnnnnnnnnnnnnnnnnnnnnnnnnnnnnnnnnnnnnnnnnnnnnnnnnnnnnnnnnnnnnnnnnnnnnnnnnnnnnnnnnnnnnnnnnnnnnnnnnnnnnnnnnnnnnnnnnnnnnnnnnnnnnnnnnnnnnnnnnnnnnnnnnnnnnnnnnnnnnnnnnnnnnnnnnnnnnnnnnnnnnnnnnnnnnnnnnnnnnnnnnnnnnnnnnnnnnnnnnnnnnnnnnnnnnnnnnnnnnnnnnnnnnnnnnnnnnnnnnnnnnnnnnnnnnnnnnnnnnnnnnnnnnnnnnnnnnnnnnnnnnnnnnnnnnnnnnnnnnnnnnnnnnnnnnnnnnnnnnnnnnnnnnnnnnnnnnnnnnnnnnnnnnnnnnnnnnnnnnnnnnnnnnnnnnnnnnnnnnnnnnnnnnnnnnnnnnnnnnnnnnnnnnnnnnnnnnnnnnnnnnnnnnnnnnnnnnnnnnnnnnnnnnnnnnnatatatatatatatatatatatatatatataggtataggtatatatatatatgtatatgtatatatatgtatatatatgtgtgtatatatgtatatatgtatatacatacatacacacacacatacacaaattgtgtagatggatagataatagataaatagatagacagacattgaccaacatgacagtgagactaaaagagaggcatgaggattgtaaagcattaaaataatctctgcttgcaggtgacatgtttagcacaatgtaaagtcaaggtataaagaccaaatatattttatacaaatagtgaataatttgaaaatgtaaaacttatttataatagcacccaaaatgaggttgagcatggtgttctgcactcgtcattccaggacttaggaggcagaatcagaaggcttgcaagagaagaccagtgtgctgtacaaagaaagtttcagaccctgcttcaaacaaaaaaaaacacacacaaaacaataacaaaaatgcctgtcagtgaaggatcggtgcgtgttaaatgtgtacatcccacactctcactgaggaaagtaaagtcttatagagttgtctctttttacattgtaggagaatcaatattgttaaatgtttattctgcaaatgtatatatctgtgtgtgtgtatatatacatatacatatatatattaaagagggagagagagagcgggggagagagtggttcaagtcaaaacacaagtttttttaaaaactgaaaaggtaactataatacttatttgcaaatatgaacagaacctagagcttagaagactaaacaaaatgcaagaacaaaattcaagaaattacacaataagacccattataaagctttagtgttcaaagttctaaagctatgcatctagcatagtggagaagagtaaagactaggaacagaaacccttgtctccgtggctcactgactcttctttctcttaggctgcagtgtgaaagccaggctcttgctcatggctaagaatgtgctgtagcgctctgttttccccttggccaggtcagcttattccttataagactggcaaagttttcagtgaagaaaagggtaatctcaaccaagggtcctagaacagctgagtgttcatacagaacataataatcatataatgtttggaaaatagcaattgacggaagaggactaggagatggctcagtgcgagggcctgcgtgcagccaccaacgccatgttaagacagctatgacatgtctgtaatcctagcactgggaagtcaatcccagtgctttctgcttagtcaggctagcctcctcaagaagtttcaaagtagtgagagatcttgtctttaaaagagaaataaacaagtgttagcacctgagaaatgatgcctgatatcttctgggctctacatacgcacatgcacgtgtactccctttgtgcatgcatacacacaaagaaatgcatcagttggattccttcaggcctcataagcattacagaatttaggcaatgttatgggctgtactccaccatttagcactgatattctattgttgaagataccacatactagggttaaaggatacatagggatctgtggtactgaattgaaaacctcatccttattgtctagtgtttatagtactgagcacattaccagagtagaaaaataaccacagtcacgtgcctgtaaaaccagagagttacagctacacccacctgtaaaacatcccccccgtgtgacaacgctatgggagttaaggcccactctgatatggatacacacctgacattgtcactgaggccaagaacctaaatcaagataggtaatggatctaaggagaaaggtagaccactattattctgctaaatgaatctagcaataaaatgacagacacagtgctatgtgcatctatcaggacattgatcaactctcatcagagaactgtctttcagtagatggtgatcaacataaagacatgcaactagtcagtgtgaaacaatgaggggctttagaatgctctaccctaagtgtgtctgtgtccctccccttaaggatcaaggatctatgtggaagaggaagtggaaagatagtaagagccataggttgtggatgtcttctaagaaacagcatcttccagatacaacaggtcaaaacacatgaatccccagagactgtgacagcatgcacaaagcctgtataagctcaagccacacaaaatctcagcagagaggaggggaagtaggcatgaagtcctgtctagccaaaaagctattcacaattgatagcttctggaagtgggaaagtcagttttcttcagtggttttacactggatggatgtaccaaccacgttccaggcaggcttcaagtccagtcaaaaagatttactgccaaaatacaacactattgtaccagtagcatgccttacccggcatgtggggtccgcagctatgtaagaccttggataactcattttctccggcacactacataggagcttccacatcacatccaggaaggatgctcccagctcagttccagcctgatgtttttgtgtcctgtaaccagagtgtgtggtcttcagcaacagcattaacacctagttgtggtggacaatgacagtcaatgtcaatagcttgtatcatctgggagcttctagggctgctccagtcgccagctcacggggatggattctgtatgtggcactggtagtttcatttacagacattatttctgggagtagcatttagggcacctccagtccaagctcttttttatttaaaatttttatttttctaagaatttcatacataagtactgtatttgcataatttccacctctgtttccctacacacacacacacacacacacacacacacacacacacacacacacagcctgctgagtctatttagtgttgctcataagcatatgagtttgggcttggataatctgtcaggtgccacatccctggaaaagacctactctccctctcttggcagccatggattgcttatagctctttacaaaggatggggccttttgagatttttctctacccacactggtttatcagctggtattgtctctgtgctgatcctgtgtaggcaattatatcgttgagatttcatgagcttcccttcatacacatagaagaccatctcagagcagatgttcttgttccttggctcttggagcttttccacctcttcttctgggatgtcccatttagtgtgggggttgcattgtcaacgtactggctggggctggatgcctcgcagcccgttgttctcagttttgaccagttgtgatttatgtgattgtatctgtctgctgcaagagggggctccactaggagtgagaggcacgcttacctgtgggcagaagggcaggcactagagtggaattgaaaacacactgggttaggaatgatgcagttctcctcctctgcagcactggtatttccccctacttaatattccatatgtttgctgttttctttcttgtccttacatcgttacatccttaactcctttcatgaccccatggctagttcatgtattccacccctttagataatccagtctaaacacacatatctaaaaattcaaagctagggtctgcatatgtgagagaatatacagtgtttgtctttctgggcctcttatctcatttagtatgtttccccattccatccattttcctgtaaattccattttataatctctgaataaacttatcagcataatcttgattagtctttaactcttagagaatttctctaatttattttctacctgataatattcttttataaattttagccttttactgttttttattaaaaattctcttaaataattttgacaaagaggtatgtatttattaatttgtcacaactttttagttaacgtttagtatttcattgatataattggggaaaatttgagattgacatttctgttagacttggcttcatagccatgggtctctatgggtcatgacttctttgagggttgaccagccatttcataggagtcacagttcacatatttacagtacaatttttaacagtagcataatttcagttagaaagtagagataaaaataacctaatggctggggtcaccacggcatgaggggctgtattacagggtggcagggttaggaaggttgagagccactggtttagaatataattataagacaagattaataacctatgtgtgtttttttcttgggaaatttgaaatgttttatactccatggcttttttgatgagttttctaaaacatattttcgtcaaattagcatttggatcactctactagtaagaaaatagcaactgagcaattaatttgttcccgaaaagcccataagtactcttattaactaactctgttaatctgaaatcactttcagatatttttaatctaaatttacaagtaaaaattgagagtgctaaccaaaagttctagagacgtatcatcctatcctagaaaaatctagttgtcttagtagtgtttggcatcgatcattatatatttcttttaagtcttaaactgccctggactgacatttgttgttatgtgttcttttcctagcctgttaccctcaaagtaaccttctggctaccttagaactaaaattggcactaaaagcctagagaagtgagcagcacgtgaagattcagaggacaatgttagtgtagagccatacaaacaagaaaagacaagtaaacactacccagatcgcacaggaaatggagccagaaactccagagaaggtggattctgcacaagagaaagtcagaggcaagaccccgacagcagatgattcagatgacagccgagaaaagactggcatagaagagaaaggagaactgaccgacgcctatcagctgcaggtagctgaagaaatggcaaaggagatcaagaagaaaataagaaagaagctaaaggaacagctgacctactttcctccagacactctattgcatgacgacaagctggccagtgaaaaaagaaagaagaagaagaagaaagtgccagtgcccactaagcctgagtcaaggtacttcatggaaacacaagacgcgtcaagtgtcctcaccctatcacacacagatgtgctctagggtcttcacgtcgacacacacagacacactctagtgtcttcacatcgacacacacagacacactctagtgtcttcacatcgacacacacacagacacattctagtgtcttcacatcaacatacacagacactctagtgtctttacatcaacacacacactctagtgtcttcacatcgacacacacacagacacattctagtgtcttcacatcaacatacacagacactctagtgtctttacatcgacacacacacacactctagtgtcttcacatcgacacacacagacacactctagtgtcttcacattgacacacacacagacacattctagtgtcttcacatcaacatacacagacactctagtgtctttacatcaacacacacacactctagtgtcttcacattgacacacaacagacacactctagtgtcttcacattgacacacacaaacacactctagtgtcttcatgtcaacacacactcacacagacccattttagtgtattcacatcgacacacacagacacactcaagtgtcctcacgttgacacacggacacattctagtgtcttcacatagacatatagagacatacactagtgtcttcacatagacacacagacgcactctgtaatttaagaaagcgctgtgtttagcaacattgccactgcagtgatacctgccagcctgtatgcagtgcctgtgctttatgagaatatactctgagtcttcagagcggccccagcagggacagcactggcactgtcctgtctctcctaagaagctgagtgatgtaagaggctgagccataacactaacagtctaccttcagcctgtccacatttacccacttacaactgctatggaagtaacaggcctgctgaatatggtggttcatacacggagtctatgattcatacagatagcccagcacttgggcactaaggcaggataatctctagttcaaggccagcttgcatcacatagtggagttgaggcctttcagaacatcatggtgaaatcctgtctctgaaggccactttgcacgcacgcatgcacacacacacacatttctcttttgacattagatatgctaatctagatttttcattccttattatacagataatatttgttccctatagaataattatcaataataataactattgccaatttaatagtttggtctatttttatgtatgatgcttatatgtgtgtgtgtgtgtttctgagactgtattcatatttataagttctctgtaagaagtagtgagatttttaaactgtcttccaagtggtataacctcttttcccctgcaatcatcatttacatgagcatcttgtacttggctagtgactttatcagtcgttatgtgactagcctttagcagtctaggttattttcccttaagctctcagctgaaaaaaaaaaaaccctatatccagatgaacagtgcttcgaggatatgttatataagaattatctgtctgttggcactgtgaaaaacttagcccagtatataataacttaatgtacttgtctaacacttcctgctgtatagacggctcctctggctttacaggttctctctcacaagcttcagtcaggatgctagccagggacagatgtaacaaatgatccccagctctccacaggagcctcagaagagatgctcctgtgcatcatcatgaggctgcagacgggcctcaggaagccctcctggtggcttctagtcagagatacaagttctaagccacatggattgatccagtgggaactcctcacccaggtggcaactttcttccccagatcgacgttctgagagagtggtagcaagacagaagtgaatctttttttaaatagcatatattgttcctatattttaatggaagtaggtgacaaggcccagccagtactcacagagaaggagatccttgaacattaagaagcaaaggtcagccatggctgtcttacaggccgatcttcacagtgtactgtaaatcattgccacattggcatggaaatgaacaatctctagtttaattcaaaccatgccgtacctgatggtggcatgcaaagcttgctgttctttagcagtagtattttgtgactaataaaatagcatagtattcaggaatagctgcaatgaagtatttacctaatctttttatttcccaatgtttctttttgaaagataaatgaatatgttagaagttaattttttattatttaaaggcatattttttacttcataaattatgaacaaacccctataggatagcttctggtccaggctgctgcctcttactgtttgtatgtggtacaaattttatttttatcaagaattctgaaaaatgtagtcttacacctgcccctagagaacaaaagcaatgcacttttatccagaaatcaaaagttgtatggctaaattttcttagaacaaactttgaaaaaaatttatgttttaaatcatttagaaatgtattcattaatcatttagttagcagcaggctggggatgctttcgaattctaaataatatagttccatactcataaaatactattttattttcccattgcttgttttcagacagtgtaacaatttgtagctgagggaggcctcaggtgtgagggtctcatgtctgagcctcctcagtatgaggttattctgtggagttcatagttttgcttttgtgggctcctaagatttgtaactcttcattggatctaaaatattatctgtgactcctagtttgacaggcattttattgtataagaagtatcagatggtgacatttttacaggaacatggtatattatccttgcttctgttcatctctcactctgctatacaatgaacaacaattatcaaaatcatttgtagtgattcgttcttgggctatgcttcagtccctcagatgtctgtgacagtgcagttgaaggggaacaaaagaaagaaggtacccctgaggactctcagcacatggagggaatctgctcgagagagcaggatgtggatgccactgtgccagagaacgcaaagcccaaacccaagaagacaaagaagaagactaaagcaggtctgttacccaaattgaataaaaattatgtgcctttgtgggataatgggagtctagaaactttagttcttaaaactgaaggatatactttaaaataagtcaggatacactgcatatctttattcgccagagtaagatgttcatctgttaataatgaattattcacaagtatatatgggtatatataatgagtttataggtttgtatttaactgtacaaggaaatgatttgtagtgcattgtggcataaaaaaatttattttttaaaccacagattttagaattgcaagtggttatcttggtgagtgaaagccagcaatggcctttcttttcccttgaagttcttctgttaagagagtaagacaatagactgtaagattaactatatgtaaccccaaagtatgagaccgattattactgacttttcttcctgctttagtttcaaatgataatgaagacactaatggagatggtgttcatgagataacaagccgagacagcccagttcatcccaagtgcttgctggatgatgacctcgtcatgggagtctacattcaccgaaccgatagacttaaatctgactttatgatttctcacccaatggtaaagatccatgtggttgatgagcacactggccagtacgtcaagaaagatgacaggtgattctaaaagttacagtgccttcaggttgaaactgtgcactagaaatcctctctgctgcccctcgtggcggaaagctagtaggcagagaacaagctagacacaggctgatgtcagagactagtcctatggttgtaggtgttcctcggctcgatcagtaagctttacagaagaaatggagggaatgcaccatcttgaatatagagtctgtcaagcttactaattaggtcataaattggcatggtaacatttctaagtgttcgcatcgttagcctcctcctttccattgaaattagtgtgctacatgggcctggagtgctacagatgtgtcatgaatatgttttcccctaaggttgtatctagagagaagccatatttgaacccataggatataatatatataataagaggatactcatacataggtttaaaagctaatataataaattgttactgtatttttttatttgtcagatgtaattgtcatctcagagacttactgctgaataagctcaccctttctagttctttctgaactctggatggctgattcaactcactggttcaaattcccctccaagatgatttactcaatcaggcttctgtcagattctggccgaattgctctgcttggcctcaaactaattctagcaatctgttctaatcttctggctccttctaattctctggatcattctgtctttacctgtgtctagcttgttctttctgcaacttgtctctataaaactgtcccagtaaaactgcctctgctgacctgcacagaagtgcacaaactcaccaataaggagctcaactctactacctgcactcactgactgactgaattcaactgtatggaccagaactgactcccatctgactgaactctctccctgtgctccttttaaatagcttctctttcctgtgctgttctagttgagagttgggcgtatcctatactgtcaaatctttctctgattcatcactttgtctgtccctcaattggacgtcattgtttgagattaaaggtgtgtactaagggcatgtctacattccagccagatcacaaagtcctacaaggtcattggatgtgactagaggagctatgtttctgcattaaaatttctccacacattatactagattatactaattcagaaaagtatttacttcaaattacattaagattattgcaaaaaaagataatgcatctgcttagttgtgttagtacatgcagacaatatgacagtataaaagttctttttacattattatttagacttactatacattttatcataatctcagttaagcttctgaaggagttgctgtgttttagctctgtatattgaaggttaattatacctttctcattctacttttataataaattatttatctgacccaaagaaccaaaacagaatgcaagattgtaagaagacaccattacttctaatgttttataaaatttatgacttttagatgttaaagaacattatttttgtttttgtgccattatagctattatttgcattttatgggctatgtaatttttccactcagtgttaccctctaaaaaaatatgtaatgaattataataatggaagctttgtctttgaacagtgaacgtcctgtttcatcttattatgagaaagacaacgtggactatattctccctattatgacacagccatatgactttaaaaagctaaagtcaaggcttccggagtgggaggagcaagttatttttaatgaaaattttccctatttgcttcgagagtttgaagaatgtccaaaagtcatcctgttctttgaggtatgaatttaaaaataattgtagtaaatatttatgcatacaagtatgagttgttgattttaataggttgttatgtggtaatgtgagattttaatatggagaatttaatgttgtagtatgctctatgggagccagatgataatgtatcaatagagactattaaaatttagacagtctgttttactatgaaataactttttttaaatgtatctacagattcttgactttttaagcatggatgaaatcaagaataactctgaggttcaaaaccaagagtgtggctttcggaaaattgcctgggcgtttcttaaggtacgtttttcacctgttcttttaaacatatttgaaatgatctcttctaagtttgattgcagttttccactaagtcgtttcagtctctaagagtttgttaacccaactcttagtaaagccgttaaaagtctgaagcactgattgattacccaccgtgcactatttatactttggactctggggctatcgtcctcagagacactagcgtcctgccctctggtggtcagtgtgtgaggtatgtattcagctatcgtcctcagagacacacgcgtcctgccctctggtggtcagtgtgtgaggtatgtattcagccctttctgtttatgttcagtcagcagccccgaatccctcgacctcataacctcagcagtggtagatgggagggcttgagccggtgctaggttttaaagagcactgcagagtgtatgctatgttttaaagaaaaagcagtttactcggagctgcaagatggcttgtgcagacctgctgtgtggggcctaagctacagctagaacaccacagatggcacagcattttattttttactcttcaagatcatgtggattttaattcatctgtattgagccattgtcagaagaaattaattctggactctgtccccatctccataaccgggaacagatcccgcgtttttatggttgatactgtgtgtcttgtccttcattgtactataagctttacaaagtcaccagtaattttgtttggattaatttttgaacagttttagtttttattttatctatgtatgcacacacacacacacacacacatctaattatgtattagatgtattacataattcccttgggctttctcaaggtcactgtctcccagcacacacagacacacacaggggtgaatgaccactgaaggatttcctgacatgagtggtaaacatttgaacaagttcagatgtgcatgtctcaggatctgagctggaggattcagggccgtccagcttttgcaatgctctgctaaatgtatgttaattttcacttacgcctttgctctcgggtactttcaatcttgtagaatttgtctgtggctgttttaaccatgcaatagtgaagcttagtagaactagctatattataccctttatagtcatggcatgcttattaaggatttcttagcctgaattgtttacttggttaagcaacacactagtataaactacattgtctagacaatatcaaaaccactttaaaaagtatgatttgggagctgggaaatccttaaagtctgtggtgtgctttgggtgacggtaaacggcctctgcagagtgtgcagagctcatttaaaggcaaatgctgttttactcagttttaaactcttgtttgcccattgagcaccactccccgagcatgtaaatccatggtctcttcatgctctcccaagattgtaggggaacacgctacatttgctgtgtatgtgtttccttgtgtttccaagcacacttgaggactcgacagtcccaagtcttgagcaagccacaatctgaattttgcctctgccaccaaaacttctccagatgaatcacgaatgtttctctgtttgccacatgagaacatccgtcgcttgttcctttgctaagcatacaagtgtttaacacgatgtttctgtgatgtccctgctgtctctgccttcttggcagcaccatcccgtgctttggttatcccattccttcaagatgggtccccatctcctaatgtaatcccaactcacagtttcttctgagtcacttttcttaaacccactttcattttctgttcttcatagttggcatatccttctcctgcctcgtagttttcatattgtctgcacagtctcaggagcatacaaccatgagtaacacgtagcaggtccattgcagattaagtgaaattaagcataacgaagacttcacttgcatagctgcgccaaacacacttgaggactcgacagtcccatgtgctcactccgtatagagcgtcccgccatcacaggtctttgggacagccctacactgagtctccctttctcttttcccctgtctctccaagtcatgtcagtcaacagtagctacttagtgccctgcacttaacgcctgtgtttccgcttctggccgcccgtaaccgctgagctgctatactgtaatcactgaactacaaagggatgtcacgttccactccgaattcacagtgtacacagcactcactctctgcaacatttcctcttcacccattaagtagggacaaaaagctcatctgaactgctcagattttaaactttttcctaagaatctccatcaatctgcttatcttggtttttgtttaattggctttttcaatagacctttcaaagaaggtagactaaaatattgaaaaatgaagtggacagttagaattaacttatcttagaatgatttcgagtcttaaagactgtaaaacatattattttatccatgaaaactatgaatgtagtcttggagctccagctactgcggaggctgaggcagggtagccacaagcacaagacctgcttgagctccagagttgagtctgggtaggctaccttccagtggaaaggaggagggcaacgctagggacgcatctgtagtagcagacacttgcggagcatatggaagaccgcaggagatgactgacaagtgggaagcacgcctgtgctcagtgatgtgtatattactccttcccaggattagctcagacaagtgtgtgctgtcctcattgtttctgcagcgcgcctcctggtaccacagtgtaagtacttgcacagtctgcagtcacttatgcggaaaagagtgcttgtaggcaatgttggtaaagccacttgtcaaagaagcccagagtgcctaacccctaggctcatctgcctttttcttcagaaacctaacaaatctcaccctttcagaaaagctaataatttacacaaattcttactttaagcttctgggagccaatgggaatgcaaacatcaactcaaaacttcgcctgcagctctactacccaccgactaagcctcgatcccagctaaatgtcgtcgaggtttttgaatggtggtccaagtgtccaagaaatcgttatccatcaacattgtatgtaaccgtacgaggattgaaagtcccgggactgtgtaagttaatagtgtctataaatgtatctcctcagttgaaattaaggatggcataatgtattttccatgtttaaaaatctcagttctcagaattattttaacagattttttggttacacattaagtttataacagttgatagttagatgaactttaagttttaaagtagactttattgtttaaaaaacctcttttggcaaactttcatattttgtagttaaaaataaaaagatgaaaagttggtcctgggaaaccttttattataaagggcaagaaatacagtgtaggccttgagccagactctgcaggctacagctactccccctcaggtgagagagcagccatagaaacagtaagacagaaggccttcatgtgtgcaggatatctttatctgtaacagtaatggagcagatgtcgcacatgggctatccttgcagacctctgggttgcattcttcacactggagtcattcagataagcagcagtagatcgcatctgtactgctgctgccttccgataaacattacgaatgatctcatcatgaaggatccgaagatgaagcttttgtctttttaatattaacctttcaggtgagcttcacattccacagctgctgtcatgtgctgtgagcacagagctgatttccattcgtctaaatggagttaaataaaatatatcaggggatagattggtcttttttttgttttggttttggttttggttttggtttttccgagacagggtttctctgtgtagccctgactgtcctggagttcactctgtagaccaggctggcctcgaactcagaaatccacctgcctctgcctctgccttactgggattaaaggcatgagatagattgttctttaatctcagatttttttatattagttttgtgattgtatctaagccagcaatatcatgttctatcagagccatagcatagaactaggcaggtatttgtgaagaggtagacacaggggacagctatcaaaaacactttgtgcatccgggtgtggctacaagcctgttaccctagcacgtgggaagtggattagagaacacaaagcccacttcatacacagcaaggtcgaggcagcctgagctacctgtgacactctctcaaaactagaacaaataatgtaataacagtaagaagtatagccatttttactattggagtctactatttttttttccaaacttttaaagctttgtgattatagaagcatagttcaaatagcttttatttacttaaagtattatacaaatgaaaacaaaatctggctgtattttgaaaagtttccataccatttttcagtattttcattatattttgttttgtccaagacagggtttcactgtgtagtctagctgtcctgtaactcattctgtaggccaaatcacgctgtcctaaaactctcagagatgcccctgcctcctgcaactgagtgctgggattaaaggtgtgtgccaccacaccaggctctgtcacagtactgtaaaaacaataagaaggagaatcagctgtgacaagcctcgtgacctccacttgaccccatgacaggagtgagccagttcccacaagtgtgccatggcttgtgtgtgtttgtgcacatgtttaatttaacaattgaacatgacgttcattttctcgttttccacacatatttagataaagccatcttaccgctctatgatggctctccaggaggaaaggggtacaccagtgtactgtgaacgtcaccgtgaaacaagttccgtggacacagaacctggactagaagattcaaaggaggaagtgaagtggaaacgtctgcctggccaggtgagctacactgggcgctttaaccactgctgtgacaaaatatgagaggaaaggtcctactgggtgcaagctccctctgagtactctttatttagctgggtttagttaatgctgcttactgtcggctgacaataattatccacagggctactgtgatgaatatgtttaaaggcctttgtagagaagcagcattgatgctatgcactgaggaccccctgtgtgcttacttccgccttctcacctttgcccgcaaaggaagccacgtacagtacccctgctttcacgcctggtgccaacattaatgcaatccgggtcagctgaacacaagctttgcggtatcatgatagtcagccggataactagtcaactgctaagttctaatgatgggccagtaaaatacctaacatgacatgaacaagagatcgttcatatccagggtaggagtgagaccgcagaatttctggaatttcccacatgatatttttaggccatactgatcataaataatcaaaaccacagaaatcagaactgaggaaagtcagagaactgtgctctgtcttggagagagcagcagtgggtagtcattagaggaaagcaagcctgagaacagccgttcagaaatcctgagtttgggttgtgacgttatgtggcactttagtttctcagatgtttttgaccttaggaaaagtggctcctgtcgtgggataagcattctttctgaggctgtgtaaaagcaacgcagcaacgacagtgttagagcatcctttgtgttttagattaatcaagtgctaattaatataaatttcacaggaaaccacttctgcactgaaaagagaatttcctgtaattttccactgttctgtgtaaatgtctctctatctatctatctatctatctatctatctatctatctatctatctatctctatctctatctctatctctatctctatctctatctctatatctatctaaagatctttaggggaaagttatgatactggaaattatcaggttactttattttttgattcatgtagtataaatactttcttttcaggcctgtcgtatcccaaacaagcatctcttctcactgaatgctggagaacgcggctgtttctgtcttgatttctctcacaatggaaggatattagcagcagcctgtgccagccgagacggatatccgattatatgtgagaaataatgctacctatttaacctggttgtaatctgtatagtcaaatattgggttttggattatctcgaagtcttaatttaagaagtcccaagtaagttagtcagatttctttaaataaagggacagtgactgtgtagaatctattcagaatgagactgaatggaagatgttattttttaatatacaggtgggtttttgtaaacattatctattttaaatatacacatttactttcaaaaggaagagtaaatcccatgggaaacttttcgtccatattatttttagtggataattgtgataatctgagttacaaagtgtagcattcgtcatatgctagagttgtaataaggctctgaagtccctcaaagacagttcccgtggtgacaggggagccagcagaaaggctgagacagtttctgttgctttggagagtttaaaagcactgccgtactgttctggacttcatgatcccttctatctcagtgacgaaatggactcccctgggcaagaagccagtcagtccctctgggtgtctgccctgagtgctaggccacgccgcacttcaccctacctcacagttcatgttcatgagacaccttcccagatggcaacgctcagtttttgcttctgggtaatgaacagactactcttgtcccaatttgtctatgctaaatgctgttacgtgcttaaatcatcagagacttaatctgcttagttaggtctcagaaagtacaaacagagccattgtttctggctttgcagtgtttgaatacggcttgtccgactgcgattccaccaagcctgttcagtgtgtagattactgcctttcgtgaatttcaggactctcatttattgtcttatggccttgctcctcttgtctctgaggaccaccacgcccctttgtgacatggtcttgtccagtggatctctgtcacttactcgtttgtcttcattctcaaaccggatcatctcagttggccgactgtcaagttcagtgctttctcctctgccagctcaggctggtgctgggccactcgcctgccttctgtagttcagcagtcttgctttcctgctctaatgcttccttcgggttcgtttttatttacagatgctttctctcttggtgaggagtcattcttatgctttagccctttaggttttctttaggtctttgaccatactgataacgataggttaatgaccgtgtggagaaagaagagaacggagctggctgccgcactttctgtatgcacactttcagacagctgctttgccttcctgtgggaagctgtactttcctgtttgtttacctctttccacggcacaactttctgttgagagctgggtatttgagatgatgtggtacagtgtggctgttccccgtgttctccatcagccacctgagtttagttactgctctgcttgtgcagtcagtctcctagatgatatctgtaaagactttttaaaaatttttttaatattttttattacgtatttttctcaattacatttccaatgctatcccaaaagtcccccataccctccccaccacttccctacccacccattcccatttttttgtccctggcattcccctgtactggggcatataaagtttgtgtgtccagtgggcctctctttccagtaatggccaactaggccatcttttgatacatatgcatctagagttaagagctccggggtactggttagttcataatgttgttccacctatagggttgcagatccctttagctccttgggtactttctctagctcctccattgggagccctgtgatccatccaatagctgactgtgagcatccacttctgtgtttgctaggccccggcatagtctcacaagagacaactatatctgggtcctttcagcaaaatcttgctagtgtatgcaatggtgtcagtgtttggaagctgattatggggtggatccctggatatggcagtctctacatggtccatccttttgtctcagctccaaactttgtctctgtaactccttccatgggtgttttgttcccaattctaagaaggggcacagtgtccacactttggtcttcattcttcttgagtttcatgtgtttagcaaattgtatcttatatcttgggtatcctaagttttgggctaatatccacttatcagtgagtacatattgtgtgagttcctttgtgattgtgttaccttactcaggatgatgccctccaggtccatccatttggctaggaatttcataaattcattctttttaatagctgagtagtactccattgtgtaaatgtaccacattttttgtatccattcctctgttgagggacatctgggttctttccagcttctggctactataaataaggctgctatgaacatagtggagcatgtgtccttcttaccggttgggacatcttctggatatatgcccaggagaggtattgtgggatcctccggtagtactatgtccaattttctgaggaaccaccagactgctttccagagtggttgtacaagcttgcaatcccaccaacaatggaggagtgttcctcttcacatcctcgccagcatctgctgtcacctgaatttttgatcttagccattctgactggtgtgagatggaatctcagggttgttttgatttgcatttccctgatgattaaggatgttgaacatattttcaggtgcttctctgccattcggtattcctcaggtgagaattctttgttcagttctgagccccattttttaatggggttatttgattttctggagtccaccttcttgagttctttatatatattggatattagtcccctatctgatttaggataggtaaagatcctttcccagtctgttggtggtctttttgtcttattgacagtgtcttttgccttgcagaagctttgcagtttcatgaggtcccatttgtcaattctcgatcttacagcacaagccattgctgttctattcaggaattttccccctgcgcccatatcttcaaggcttttccccactttctcctctataagtttcagtgtctctggttttatgtgaagttccttggtccacttagatttgaccttagtacaaggagataggaatggatcgattcgcattcttctacatgataaaagcaagaaggtaatccctcaacaaacctaaaacaagacagccacaagaacagaatgccaactttaacaacaaaaataataggaagcaacaattacttttccttaatatctcttacaatggactcaactccccaataaaaagacatagactaacagactggctacagaaacaggacccaacattttgctgcttacaggaaatccatatcagggaaaaagacagacactacctcagaatgaaaggctggaaaacagttttccaagcaaatggtctgaagaaacaagctggagtagccattctaatatggaataaaatcgatacctgtgtggggaacctagattctcagcagtattttgaatctggtttatatgttgtgttctttgagtaagcttctgatccccagctggtgtcaacccctcaggcagccacagtgtcaagtgatgccactggctgctcaaatgcacactggagttgggatgtttgtctgaagcacacaaagccatgctaagtaagccttggatctgacaggtcatgaaatcgggtcaagtctttggaactgaagttttcagggagtccagagctctagtcctatcctgcctcactgagtagtttctggactcgtgagtttcactgtttgcaaggttgcgtgagtgtgtagggaggaggaactagacagttgtggcaatacaaagctgatgtctgtactgagagtcagaccttttctcaggaaagtgctccccagcaagcgagcattgccaggtaattcccagagttctgtggccctaaggttggttgctcttccctcttataggtggactagattcccaaagtcctcacttggttaaagcgctgttgatattaccactaggtgggagtagagacttggcccttccttattagccatcctacacagtttctttattattattattatatattttcttcatttacatttcaaatgctatcctgaaagtcccctatacccttcccctgccctgcgcccctacccacccactcccacttcttggccctggcattcccctgtactggggcatataaagtttgcaagatcaagtggcctctcttcccaatgatgcccgactaggccatcttctgatacatatgcagctagagacacgagctctggggtactggttagttcagtttcttgagccctaatactgttcaccatgctctgtctgtctgtctatctgtcaagttcactcgctgcacaccccactatgctcttcctcacaatggaacagttacatccatctcattacatccagaactttttagaatttgatttttttagaaggaaataataccttattcatgaaccaccaacatgtaagttgttaagtacttaaaatgaagtacaatataaatttttatttatttcttgctaattatgaaaagtgcttttgggattctcacaatgtgagcaactgagagtacattaaagaatattgtcaacatatagcacatataaaatggtctgtaaacttaaaattaaagcaaatgaaaaacagttcttgagtgtattttgaagttgtgttaatattacaaatatttttggctttaattttacagatagtacttaatttttatctaaattactataagttgtgtgtttatatatttgttgaattaaagacctcttagaaatttaatttttaaatatttttattagtatatgaaattccttctggacgttttatgagagaattgtgtggccacctcaatatcatttatgatctcgactggtcaaaagacgatcgctatctcgttacttcatcctctgacggcactgccaggttagtatatattcaggaagaacttaccgcaaatgctgtttgccatcaaggaaaggtacgagaatataaagagacacatatgcccctgacatcatagctgtgcaccgtgcacactgacaggttaacaacagtaaaatttatggcaagtcatatcttttatttgtgtaatatgtatcatttctggctcttgctgtctttcaatgattatatgtaagctgctaattaatatcttgcagaaggttaaatgtttgaggtttgtcctgtatgtatgtgaggattctgtcttcattataggcttgacatgggggcttgaatccattggtcagagtaaaccaagtagatactcagttacacaccctagagtgttataaattgtaaatatttgtgttttcacaaagtccgtgttatctcctttcaatttattatgtttcacaatacaatatttcatttattgtctgattattcaagtttttcccacagtcttacttatagcccaggctaacctcaaatgtgcactctttctgctgctgcctcctgtgtacagggattgtaggcatggccagcgcacgtgactcaatagaatgccttaaaagctaagatttaaactctatttacatccctttttttcctttcaaactaacaatgttgttatcttcatttcagctgtatctcatgcagcgcatgctcatcgaaatctgtcttttatattagcttgttctttagtgctcaacagatattttaatcagctgctagaaaactcaaaatgtctctattgaatagttgactatattttttcttttatttagaagttgctacataagtcttaggcagtaacttataaatcaactataaattaccaatacaaatatgctcttctgattttcgtcacctaatccatcatataaaataccccttgacctgtagttacacagctagtatacattgcctgatttcgcctgtcttacacatgcacacagacatttgagaaagaaatggagtggtaagcataaagacagtgcttattataggaaaaagcttgttctccgccaaaataacggagggagttctcttaatcaaatagagcaggctatgcgtgagagcacaaacacaggttctgattcagatccccaaccctgtccacagaaagccaggcgcgcagcacaccctgcaggaacagaagacagaagtgaccgtcaatgagcttctatctcagaaaataaagttcatagattgaggaaggcatcagtgtcaggctttggtctccacgtgtgtgcacatgggcacacatacgatttttaaaaaggaaatcagttgtttaactatgatgtctaagtgtttaggacctacatgtatattaattatttagactttgaaatacaagtaaaaagttattaagctctctaatcctcttggcctccactaggaaacattttcagaaccagtccatacagccttgtagaaaaattatgaaaagtttcattgagctgggcgtggtggcgcacgcctttaatcccagcacttgggaggcagaggcaggcagatttctgagttcgaggccagcctggtctacagagtgagttccaggacagccaggactacagagaaacccaaaaccaaaaaaaacaaaaacaaagaaaagaaaagaaaagtttcatcatatcttttaaagttatttatttatgtatgggtgtttaattatgtgtttgagtgtttttcctgaatgtgtgtgtatgttcaccacatgcaggcctggtgcctgcacaggtcagagaaggtttcttagatcccctggaactggaattaaagatggttatgagccaccatgtgggttctgagaacttagcctgggtcttctgcaagagcagccagtattcgttaccagccatctctccagcccccgtccctactttgtaatatatattatgccaaatagtattttatcaactattcactgtatagttgctcaatatcaaaaatagttttaaaagtagattatgtccaagtacaaataagttttagtttttcagtatagattacagttatagataaaatatatttcatgagaaatgattttgtgaaagaaaagtgagataatccaatgccatctcacgcgatcatcatcatggtttctataaacactcacttagagtagtttacctcggcatttgcttacctaggatttactggctgtgttctcctaaagatggttggagaacattctgtacttccagaagaatgctcctttctctccttttccagagtttggaagaatgaaatcaatagcacgagcacgttcagagtcttacctcacccctccttcgtctacacggctaaattccacccagccacacgggagctggtggttacaggatgctacgactctatgataaggatttggaaaattgatgcaagggaggatgctgccatattagtgcgccagttggatgtgcacaagagctttgtcaactccatctgttttgacgatgaaggtacatcacagaacgtgctcaaaccaagagtatttacctgaaaaattgtttcctttctctagtagttggtgcttgtgagagatttgctgtattcatatttgtgaatatttaaagttcttcgtagtttgaagcaatggggtagatctgacagtgggcgtgctctgttaactgtaaagtttgaagtccctggtgtttgtggtcagtcgcgtcctttgctctaaggtctcatgggctgcatttcataagtgcatttatgtgcattggtgattattactattagtaatttactttaagaacatattaataacgatgtaaaagggatggggaaagtccaaaagaatgtaaatacacatgctggatagagtgacaggaattttaaaaatacatacagagggactttgcacatagtcaaaggatctcagcacttaaataacacaagtgacatcgtaaaataaaacgggtttgtattgggtaagaatataaagaaattcatctactaacttgtcatttttattatttcagagattagacatggcagctgcagctataagtatataaaataatatttagagaaaaataacactgcaatatactaactgcaacttgaaagattataacaaatgacaaatatacttttcttttgtctttctcacaattagagtgcgtgttcgaatgtatgccagtactcacgggctgtgtaggctaatttgtaaactatttagcatttgttagcagtgatgtgtaatgtactctcacacgctcacgaggttgagcctctatgttttctgggtcccattcagtttttaaaaaagtgttaacactcattacttatgatttttttaactctctgatcatttcaagtttaatggtcactatgactgtgtttacaatgtatattagagcatgtattttcttggagtataaacaattacagaggctaataataataatggatacagatacacgttggttacctcaaataatttggaatgtgagtgtatgggtgctagacatgcaaactacattgctcatttctttttacattcagaaacatgacaaatggaaatgttatccaaaatgctttttaaagtgaagaatttacttaaagataattggaatatagtgtgcattttactttttttttattttttattaggtattatcctcgtttacatttccaatgctatcccaaaagtcccccatacccacccatccccactcccctacccacccactccccctttttggccctggcgttcccctgtactggggcatataaagtttgcaagtccaataggcctctctttctagtgatggcccactaggccatcttttggtacatatgcagctagagtcaagagctccggggtactggttagttcatattgttgttccacctatagggttgcagatccctttagctccttgggtactttctctagctcctccattgggagccctgtgatccatccaatagctgactgtgagcatccacttctgtgtttgctaggtcccggcatagtctcacaagagacagctacatctgagtcctttcatatatattttatgaataccatgtggtatataaatatacacacacacacgcgcgtgtgtgtgtgtgtgtgtgtgtgtgtgtgtgtgtgtgtgtatgtaacttctgtggcgttcttgagtgagttcttgctgtttttaccaggtcaccacatgtactcaggagactgcatcggggtcatcgttgtctgggacacgtacgtcaaagtgaatgatgtgcaacactccgtgcgccactggacgataaataaggtacagaaccacatttcatgccccgagacttcgtggaggaactacaggagaatcgaccacaggacggatgtttaaaagaccataaggacatccaagtttgtcctttgaaaacttaagcttctctcggtgcagaagcccacctcataccctcctgctgaccacagtcgggagttagtgattctgagagggactggtgtcagctctcctttttcagtgtggccacactttactctttgctcttttaggccctggactaggcaatgactctccactaagctacaacctcacctcatttgtggtcttttgaggaccaatctgtagcatggcagcagctgaaactcacattagaataacacatgtatcccattaccacctgtttcctgcatattctcttcaatctagtaccgtcactaacaacagcgtccgtgctgtcagagtaatgtggatatggcagggattgtcatctaatcatagtaactactccatctgagagaaacaaacaaggcagagggtattattatggtctgtaagaatttctgcagttttatttttataatttttgtagtgtaaatgaattggtaaggttgagcttttgttatatgttgagctgtactgctgtagtttatacctggaactgctgttaggcctaggtctgcttgcccgctgctgcggggctcagccagcctaggcctaggtctgctagaggaaaacctctaggtgaaaactacgaagcttgggggagagggagctgagtcagagtctcgccctgggttaagggattttccttagactctttggactttaagccaggttatttggggagacagctctgctcagcaaggcacttgtacctctggcacctaaggctttttagattttcaggttttcctttcttgtgacaatcccaaaagggatcattggtaatcactttttaaaagttttattgtgtccattaaaggttatagcatggttgtgagcatacacgtatttagtaaaatgttactgtagtgagtcaacttaccatcatgtcatgctacattgcccgtttggttgtttgtggcgagagaagctgaactctgtgtagttaacagggttcagtacagtttcattacatgtagacttcgtattacgtgctgaatgatgagctgttgatggcgtgttctgacctacagcttcctgtttcccccacaactcagaatttcgtgtacatttaactcttagattccacatataagtatttaacatgtcttccaggatcatccctgctgtggcaaatgaaaatctttttgtttgaggggatgagtaatgttagagaggaaagagaaaagatgggggatgaatgggtgcattccttaatgcctagtgatgttgaacgaccgactgttcatgtatcttcagccaccttattgtcctttgtggagctgtctattcagtcttttccccatttctgtagccacattatttgtttttctggtactgagcttatgtgtttagggattgatctcttttttttttttttttaagatttatttattatatgtaaacacactgtagctgtcttcagacacaccagaagagggcatcagatctcatcacggatggttgtgagccaccatgtggttgctgggatttgaactcaggaccttcagaagagcaatcagttctcttacctactgagccatctctccagcccgggattgatctcttattgggtagatgagatgcagattgctttcccagtgcgccccctgtaatccactgtgaagattgctttcccagtgcgccccctgtagtccactgtgaagattgctttcccagtgcgccccctgtagtccactgtgaagattactttctaaattaacccactgtagtccgttgagctgttgcttaggttccagtccagctgtcttttagtttaatgaactccactttatgaataattttgtggcctaagtttttgttatcgacctgtcttcccccaaatattgtgaaggccaatgttcagcaatgtcccctctgttgctaacagccatatagtttctggtcttgcttaagtgtattttatccactataaattgattttattgcattgtgtaagggtagttctcactcgaggctcctgcagattggttctcagtgctggtatcttaaatgacactgcgagttacttatcctcattagctgctgcaaataattaaaaaggcagcaagaaggagtggagtcaaacttccccaaaatgattataatctaagtagtataatgcatatgttatgcctggagcatacattctcaaggcaaaggaagtctatgaggaaagagtcaactctgactaaaccttgttgagtcagttttgaatttataaaatattaaagtttttatatcatgatataaacagacagggcaatgtgagaaaatgtatgtgaagtacttctttttaagaattgctataatttaagaacgtgaataatacacaaaacacacaataattaaatacaacactaaataacacaaaaatgcaatttgccatttttattttttaaatctaaattgaagttgctaaaaattcttcttgctaatgttaaaatattctgtgtagtagaattgaaagttttgtatcattctaaattttattttattttgttgagaaatgctggtatattgttgcccatggtaacctgaaacttactgtctgcctcaaactcatggcgatcctgcttccacttcccaagtgccagtactgtgtaggtcaggctctgctctcaacgagaagcgacattttaaaatgaatttgtcctctataaatggtgtaacatataacactgaacatgtcagaggcagcaatttgacctttttttttttccttcaccattttaggaaattaaggaaactgaattcaggggagttccaataagttacctggaggttcatcccaatggaaagcgtttgctaatccacaccaaagacagtactctgaggattatggacctgcggatgtaagtgtcttagaaggaacaggagaagagcttcagttggttctttcatgcttataaaatgcagccgtgattttgaggtggcagtgtggccctaggccaccatctgtagaggtcattctgctgctgcttacgtctgatgagtgacagtcaggggtgcatgctatgtggagggctaggacagccccacaacagagaaatacttgacactatttgagtagctctgaagctgaaatgaatcagtggtttctattttcacaatgaaaagcagacactcatactttggtactgacctagactgcagtgtatataactgaaggaggcatgtcttggctaatgcctctttgtcttttactttaacaaaagaaagggtgggaaagtcctttctatagaaggcaagcggagtttggcaaaagcagtgtgcactgcttaagtatactttctgttggtgttacaattccatgtgaaacaagagaaactatttcctgggtttcctactgtatttagaagttcacacatcagtctgtatgattgattctgtacataccatttttgtgccattaacccttcagtgtttctataatagctcaagaatctgaatattctcttttctgcatagtatccatggcgtgccaggaagataagccagctctcaaatgtgcatcttaataaatataaatgcatggcataattactatatatatgacagcaacaagaaagctgacagttataattctattaaaggttgtgttgaaatactggcatgtgaatcggtcttgaaggatggatagactttggataagatggaggtttctactctcagtagagtagaaaatgaaataaaactctgagtgggataagtgttcaagatagtaggcagcctgagcatatgtttcttgacaaggaataccaggagggaagtttttaaaagagaaactaaggctacataaggtggccaagttattccctttttaagccctataagatcatacctgggctccagaggagggttgcttagacagtcaaatgctgctttttctaccccttcctctttccacagatgggagaaataatacactgtatccataaggggtttgtggagggatgagctagttagtaagggattctgtggggcagtgagctatgcacagacagtctggtctccagtcgagctgaggtagaaccctggtggtgataattcccacctacatgggccagaaggcattccctcatgtctcctggacccctggctcctgtcgaagttactgcccccacagcccccacaggagaagcttggcttttagtcacttacacaatgtcccaagcttctgaccttcaggctaaactccccagttacctagcaacaacaagataacaagcccattataagagtggctgcttggtcccacctctctttctccttgctctctctctctctaacaccttactctttactctctagcctttcttctctctctccttttcacccttctctcctcttggctatggccggtctctctctctttctaccttctctctttctccctgcctttctataatacagctctaaaaccatagannnnnnnnnnnnnnnnnnnnnnnnnnnnnnnnnnnnnnnnnnnnnnnnnnnnnnnnnnnnnnnnnnnnnnnnnnnnnccatagactgtctctgctcatcaaggcccgccgtgcttgggtgctgggataggctttctcctaacgagccgtgtctaacctccggatggaaggccttcctgtgctccagccacggaccggactctcgcctacatgggaccctctctcccgtatctccagggctgagagtgtcaccccgggacccctggtatcgggggctgcccctagtccatcccgcatccagtagggtccagtggcttcacacagccagaaggccacctggggccgagtggaaaatgtccatcagtcctcccacatctgcctgcccagagcacaggaactctggccggacgtgggctctctccctcccccatcttcccctacacccaccgcccaacaggactccataaatgttttactcagtaagtcaaagtctggaaatctaaaccaaaaatgttaatacacacacacacaccaagattggtaggagaaagtaagatatacactaaatgttatccaacaatagaatattttgtaagatacagttagacaatgacatgagcccattgaaattaaggtgtattctgtgttctctgacacagaaacccactgttgatgactttttggttgagtgaaaaagcagattacagagcagtgtatctgtctcttatcgtaaagatcgtgagcgctgagacaatgtcagctgttgctaaatgagaaagtctacatattaattttatattaccaattatttacttttataataataataatagttttattatagttcagcagaggaaagaggtgtagcacattaattagaaagaagcattgaatcaactcttatttgttgactatccatcacagaatgtttaccatatcatatattctcaaaacgatacttactaactcaaattcaaaaaataacatttgtttccctctagtcctttaagtagttaagttgggttgtatttgcatttttttggtttgtttatagattggcagccaggaaatttgtgggtgcagcaaattaccgtgagaagatccatagcaccttgacaccgtgcgggactctgctcttttctgggagtgaggatgggatagtatacgtttggaacccagagacaggcaagtgctcgttgattgtgaaacatcctttggtgaatgggttggaaagttcagcgtatgtgacaactacacttttggcattttatgaaaaattctgactttgtgtttttacgtgttttaaaatcaggtagtgttattagtaactttcctcgttactctgacaaaatacttgacaagaagcagtttacagaaggaagggtgtacttttttcttaacattccagggatatactccatcatggcaaggggcacatgatggcagtagcaagaagctgctgttcatatcgtattagcaatttgaaagcagagagtggggctgaggagacagtttagttgagaaaataaccttttgccaagtaagtgtggggatgtgagtttgaactgccagaaacatggacaccaagaagtcgtgacacctactttgtcccagattcctgtgacaaaatgggaggcagaggtagaagagcaccaggaactcttaaaccagtgagtctgcaggcatgtgcatgcatgtacacacatgcatacacatacacacatgcacacacacacacacacaaacacacgcagacattggaccactagaaaacttgaaggcccactgttagtggtgtactcctccacctccaggaaggatccacagccaaagaccagctggagaccaagtgtgcaaacacttgagtccatgagggaccattttacacaaatacatacagatagcttttgataaaattcagctgtagtctaagtatatattacattgttcttgattgtttgaatattgttgtgaatttagagtttcacattatatatcaagatttattttctcaaagcctatgaggtactgagatgcttgaaaagtaccttatgaatactgtaacacaagatatagaaaattataaactgagctgtagctatgtagatacatggtcaacatgagagatatggtttgattggtaatgaaatgttcctgtgaaaatccctgatgccttagacgacttctgatgacatccactggtggcatcttctagcagcttttcaagcagttagcacctcagcctccaggagaaaaaaataaaatagaaactcacctgagtttcctcaattacgagttttataatccctccccacttttgccaaattctttgttagctacaatttgcacacttttctcagtcacacacacctctccgtttccatcagaacacttcctatgtactttgttccacaaaacattgaagagagtgagctaaacctacaaagaagccagcagaatacagagtgcagataagtatccaccacagtggcactcaaatacctagaagtatttgtttcatgtaaataatggaagcctcatcattactccaaatatcttcacgaggatacagaatacccttggatgagaagcgtgtgctgtcgtacagttgctgcctttcttttcctcaggagaacaagtggcaatgtactctgacctgccattcaagtccacaatccgagacatctcttaccaccccctggagaatatggttgccttctgtgcctttggacagagcgagccgattcttctttatatttatgatttccagggtaagtccactacttgatgtaaatgaagtaatgtttacatttataatgggccaggaatcaggagcactataaaatctattaataattatttcaagtaacatagcctttttgaatatattatatgaaagagccacaagatggcataggttgtttctaggatgtttgaacatttcattattttctatgcattatgagcatggaatttagatgttagcaaaagtgcatataacgaggctgccttagagatcacttgataaagtactgacctagctagcatgtgtggagccttgcctttgactaccaacgccacaggaattggatatgatggtgcatagctagggtgggcctagtgtaaacctagtgtaaacgcctactacctaggctcacagtggaaacaggagtgtcagaagtttagattatcctctgttgtgtgttggtttgaaacctaccttaggctatataaaaacctgtcttaaaaagaaaacatgtggggctggtgagatggctcagtgggtaagagcacctgactgctcttccgaaggtcaggagttcaaatcccagcaaccacatggtggctcacaaccatctgtaacaagatctgactccctcttctggagtgtctgaggacagctacagtgtacttacatataataaataaataaatcttaaaaaaaaaaaaagaaaaagaaaacacatgactgtactgtgttggaatcaaaataaataaatgaaatccatatagaattaggactgtatcaacttaatttaagtggttcacaaaatatgaactttaaaaatgttttagttgcatagtgagttgttttgttatttgggtcttatttgtatgttaggagatttgtttggtttggaggtttttatttatgtgttttgacttttttgttttgttttgagacaggatctctgtagctcaggctagctttgaatgtattttgtaagtttagggagccttgaacttaaggcagccctcttgtttctggctcctgagttttaggattacaagacagcaagctggtttaacctaatttcatattctgtgattttattttttttaagcaaatagctttggtaaattttagttaggaaaatttaatataagagatagatagatttttaactgtgatgaaaatggagtctgatgttctcaactgtaaagattccgtatgcctaccgtaaggatgataaaactttggatctacttttttaggaattaagatgcattctgagaataattggggtttatcttgtttcttaaatacttattttctattctgaaattagtatttttcttttctagttgttaatctttctcaaaaatcaatattttataaccttcatatatagttgtataaaaatataagatctttattagtttctttgctttagttgattatgacataacatgattcagtatttttgtaagctagcatagcatacatgcatgctatttatacacatgtcggcatacatttgtatatgttatagtaatatagctatgaacaaatgcttcaatggaataacaaagctaaatttattaaatcactacatgttggcttatctaatgctctgatagatgtgattagacaattgagctatcataaacctgaaggttttgttcatggtacagagtgcattatgcatttttccagtgaattgtcttaaagaatgcagaaaaagaaggtttatcttactgatccttatagagaagaaatggtttctgcaacttatacccaagtttataagatgctgttgctagtgatagagtttccaggcaatgcctgccatttccattcattagcagctgttggcagggctgctactgcatctgttactgagttcttcagtcagcgcccagtcttgtctcattgtaatgagtaccctgaaacaactgtttgccccatcctacttttcccatagacaaggagaatcatggccattactgtacaattggaactattctccaggaaaagaaagcacagttattgcctcagactcttaggagatttcacaaccatcttcattcagtttataatttgctttcttttagacttttgaaattttcactgcaaagattagctaagttccgctctgtcttgtccttcagtagcttcctgttgctagaagggctttctgactcagaagagcaagtggctttagctggacagtggcatggagctcaggttcctgttgtggtcactttagggaccttggctaatgccccctgcccttctgaccctccatcctttcatcaagaactccaaggaatgagccggtggctgtgagggagccttgtgaagtgaaaggcgctctactagaagacccagaattaacacttgtgtttataaagctcatctaccagtagccagtcagggtacaggaatccacactttaccgtgctcacaagcacttgtctgtggagttgagaagatgatgtttctccctttacaccgttactcagccttttccatttatccactaacccggatgccataccgggccaactgtattgcatttaatacacacagctaacgcacgttagagccacattgtcttagatgcaggagcatggatttgggtgagcatctcagaaatgatgatatgagaataacagaatatggaattacttattttatgtaacacatttaaaacaatttttgataaatgcatataccttgccaaaaaaaatgtttaaagctcaaaatgtttcaccatatttcccaggctctttgtcgcctatttttaaaaaggggaagcttaggaagaagtaagataacttcaagacatctaaaatctggcacaactctttttagtggtataggtacaaaacaaatgagagttattttagtctctgagtgttttactcattgaatataggctacaatcagtagttcaaataatcattagttttttactaaaatttttaatgtttaattaacctattacagttttgccctatattttttttaacacatggatattttgctcaaactgtgttttctcagaatgaagttcacatgtggttttactgagttttaatgataaaaagttcaaaagaaacagaacagctaagttacttttaaaatagcttctgaaatattcaaggaaaaagaagcaagttcttttttttttttttttttgtaagttaaatcagctccaagcgagaccacagtggtagctaaatgtatcagccgtctttccgtcccagcagaatctgtgagagtcagcaagggtctctcctgctgagcgcatgttcagcttgtggtctttgagtccctcgttctactgaagttttgcttttttttttgtaagaagtgtaatttttactttcagaaggcagttttatttgtctgattttgaaagggttaatcatctagtaatacaaagtttagtcaccacgtaccacaaataatgtgcatcgagggttcccacaacaaagtacatctcagagaaacggtttctgctgaattaactccatgaagccaggtgttagcaataaatattctgttattaaacagtgtttgtctacttatgtctctaggatgtttttgcacatttaagaattattagtacctaacagcactatgtattaacactatgaatatatctgtttaaaatttttcactatggttttatgacataagtgtttttacagttttacaggatctaggagttgaatcactgagaactggtttatgttttgtttgtttgtgttttgttttgttttgtttatttgaggcagggcttctctttgtagccctggctatcttggaattcactccataggtcagtctaccctggaactcaaagatccacctgcctctgtctaagatcaaaggcatacaccactatcgctcagccaaaatttatactcttatttgccttctaaatttattagcaaacgacctgctatattaggtttcaaatggtaaaacttttctctatagtatcagtttctctggaatatgtaatttttgtggaatttttataccttgtaggaagcaaagatgtaggcttgtttatttgtttattatcagcacctagcctgaatgctgacatacatgactgtgtatgttaagtagagtcaagtctgtttggcaacctcttaaaattgctaaccccaggtaatgagcctgagttctcactaggtggcagtgtccctttctgtggcagtgcagacctttcccagcacctgttatgcaccaggctcacttgagctgtaaacccaagggttggactcagtttacctgctcattgctggtcctttctcctgtttacagaggtgattacacacccgacaacctttagtcaaactaaaagccatttctacaatgacttctacaaggactttagaactggaattcagtgatctggaaacgatctagtcagaaatagaccggtgatctgctttgtcatgctggtagctttatttttcacagtgtggcatgctctcccatagttcagggacatagacacatttaagttcataaaattctgttacaggcaagcatggaggcacatgcatggaatcccagtatttggaaggtagagacaggagggtcatgacttctaggtcatccttgggtacacagagcttccaaggctagagaccccatctctcaagttgctaattgcctatagtgtttataaggcactgtgtttagcatagactttggcagtgtgtgtttgcattaagaattaaacttcttacagaatagagttatttcttttttcttttttaaaagatttattattatccataagtacactatagctgtcttcagacaccccagaagagggcgttagatctcattacaagtggttgtgagccaccatgtggttgctcgaatttgaactcaggcccttcagaagagcagtcagtactcttacctgctgagtcatctcaccagcccaagagttatttcttgaattttatgaaaatataagatggcaccactagtgaatttgggattattgagaacagtggcagtcatagctaagatcaagtactttcttatagaatacttcccaaatacttgagaaaaaatctcattattgtcactattaatggatgatgaaaccaaggcaccacagaatgaagtaactctcctaaggtcacagagttgtgggtaaaactaccatttgacttcaggctgcctgactaatgtcttcacaggataatacctaggtgatataaatttaatacccacagcgtatgtatcatttaatgtcttccatatgtgattaaaagtccaattcagatattataattttcatcctttcagaaaattacaccattgtcgggcgccagtcgtggggaaataaaggggatgggagaaatgacccacgtcccaccagagctccggggctctaggcggacagatgcggggaaccgggggaactgccgtgcactctccatgctgcccgggtgggcgtttggctgtgggaagccacggaaccccagtctgcggggatggagagggagcagtccggggtccctgggcctcaaggaagccagggtcgacaggttctagctccggggcatcgcaggacatcgctggatactacagaagagctgagaatgggtgggggcactgcgggcagctcattctgccctgaggccaaagggagaaggggcaggggtagaaggcactgggtagttcccacgcatgtgacggtctttggtccagcctggcagctggaaacgctaaaaggccttcttgagggagattagaggaggctcttaggggaaggccttattccatcgctccagcactgcgagtctagatgaaaggaggcagtctatggcttcaggtagagaagtagaggcaggccatggccacgtggagagaggggagaagggagggggagagaaggaacaagagggctagagagaaagcaagagaagcaagagagaggaagggccaagcagccccctttatagtgtgctgtactaccttgctgtggctaggtaactgggggaggagcttacctgactgtagccagaatacctggagcttgggacattgcctgtgtgacaatagtcacaggattatggagttgaggactcatgttgtcaggtgcctgtgtctgggaatgtggctcactattccgtcccttgtagaattactactgggtctccggagtaagcttcgctcaaccagaacacagactgcctttcacagtccaacacaccataacaggtagtactgattgtaggatggagttttaaatattgatttttaccctattataagaaattataaattaaagctaccatgatgatgaaggcctgacaaaactgctttcctgtattctgaaatatttactgtttctcacataatggattcttgactttcaaagcccagaccattaagtgactaaggaaatatgaaaattttcatgtacatgatggccttgagtgtaaacagcagggcctttgtatgcttacaggtgtgccttctaaaggaatgatacagcccaaagcagacaacagcatggcaggagcatctgcagagggactgagcctcttgacaaacactgtcaatctgcccaaccctcaacacatagtttccaattttatatgcgtctgctttttaagctgtgaaataaaaattatacatgctttatttattatacctccatattttatgtaatgataactgaaaccataaagcaagatgtgagggctagatatgaatagagtccatgagccaggctgtagcagggagttctagtggttttcctgtagcaatgcatgccacacactgtcagctgaagagtgccatgtggctaggaagacagcaggaagggaatagtacctcctgcaggggatttgcagacagcttgtaaggataggcttcaaaacaatcaaacaaatacagttgccacctgcaggttcgtgacccctgtgcattcctctgccatgcagcttagctccctgcagtaactggctcagctccaagaagtcggaaccccaaaaaggagtctctgtattttccaagcctgctataatgcatgcatgtaaggatgtctcagaaagagatgaaagggtatggataagaatattaaaattgtgagctttaacatagcaggttagatcagacctaagttttaaacatacaaagtacattggtataaagaagaaaaatgatacaatgcagaaatagggctgtctaattacagcatggtctctaaccagaacctaaaagtaacgtggtaacctgcagatagttacaagcatacagcttgaaggataatccaaaatcatctatcaccaactgttttacagtgagaaaggcatatgtcttaagcagatctcctggtgggggtgggggagctgaagaacttcccagcagtttctgtttggagtgtagtctagtacactttgtgactatgtctgcagactgtaaatgcgcaactcctcatagaactagaggtgctaacagcataggagggtgctgatttggctgcttggagtccaagagtttgtataaaatgttaacagggcaccatagaaacaaacaccagagtttgcagttctgttttttactccacttagaatattttaattcacaattataattcacaatacattgtaaaatatatcttaatattttgaaacatactttgtcactgcctttttctgtttttaccagttaggaattctttgaaagagaaaacataatacatatttaatgtattgtaatattttaaaaatccagttgaatcaaaactgtaagagaaaagatagttaaggcctgttagcttgttactgacaccagtacatgtgttcttgactgtccttgactgctcattcactcggttagaggaaactgtagtttgcaaatacaaagctcagaaaatctgggaaattagcatgccagactgtttgtagatgcagctttacctgcagcaagaaagcagctaaaggctggtagcacaatttcaatgtgaagactacagaaatcatggaacatgtttttctgttgacttctcggcctgaaacccacccaccccgtagaggtagaccgtcccgattccagcccatgggacacttttctttaggtggttttctacagctttacacttgcttattttctaaagctatctttgaataattaaaggagaagtaaatattcttatcactctagaaatatgactaaattaaatacaagaacattagagtcaaattcacacacacacacacacacacacacacacaaacctatagggagtgatgacttttgcgctgaaatagataattgctacagagaaatgcctgtcagtgacagttggggtagtccttggccttctctcagggctctgtctgtcctctggacatggccaacatagtctgcagagaatgctgggtattggctggctcttctgttgacatagatgaagttgtgtatgaatatcaaaggcctataatttttacaggtggtattatcacataaatgattacttttaaaagtccaatgttttatgcccattaaatattttagaccttggtgtggtgtcttgtgcctttaagcccagcatccaagaggagggcagatctctgtgactttgaggcctctctgtcctatataggaagtttccaggacagcaaggctgcctctctctctctctctctctctctctctctctctctctcacacacacacacacacacacacacacacacacacacacacacacacacacacagataatttatttaaatagtataggacaactgttgtatatgattaagtacatacctatcttactcattttgttcattaggaaaacctgtcttggagtacacctgtcagtcagacagtaaaaacagcatcgagtttttatttgcatttttactactgttttcttccttgtttgctatcagctacatggttggttccttggtgacttttctagagtatctctgggtttcctgctgctttgatcttctaagtgaattttgtgggtcctgtttgcctcttctgtcacccttgtcatctgctttgtgtgtttgtgtacacagctttcttggggtcatttacatataataaactatgaattttaaatatatgctttgataacttacctacttgcaagagcaccacctcagccccagcagtgaacactcccaccgtggccccattttaattgcaccctcctcttttcacccttgaaagcactataaattagtgtccatgttctacaattgtctacactcaaatatgctgcatgcaccatgaattcttttatggctttatttttcatgactaattttgataatttttagttattttggtgtcatttatgttttagcacctaccaacagttcatctttttacctgcctactgttgctccattggagaggtttccagtttgtgtatcagttgtctattgatggatatctagtttatgccactacagaatgctgctggaagtttttatttctgaagatgatttcatttcccttatgtaaattcctataattgaaaggtcaggaacatattgcctatgaattttcttaagccaagttaggcatggtagtacacctgtaatcttcctacgtaggtgaccgagggaggaggatggtaagtttgaagccagtgtacactcacagagactgtctcacaaaacaacaaaagtagcctttcccctcaagtgttccaacttcttcgtatctttggcaagtctgacatggcaagactttttgttttagccactctaacagacagacttgctactttgccctgggtctgatttgttcatccctgctgaccggtgatgctgagtgctttcttaggcacctgtccaccatctttggagcttcttcagaaccatttacaattggaccatatttttggcttgtcattatcgtggtcattgttggctgcttttctttgttttgatgtccgagttgtacacgcattgtgctcaggcgtgtgagttacagatgttcctcccagtgttcgcatgtctactaattattttaacattttgaagaatagaacattacatttttgaagtacaaactatcagcttgttatgtcctagattttagttttgtatctaagaaacgtttgcttcctccatgctcacaggattgtttgcctgggtttcatcccagaactttgaaaactctgttttatattgccatctcaccacagggtgtgaaggatggatcagagttcatctgaatgtccagccgttccagtaccatttaatgaaatgtgtgttcttcacagttttcttattccttgtctgtatatgtactgggttctctgtactggtggtctctgtaccactgatacagacagctaactctatagccatccagttaatttttgtatattcctttcatggtccgtaacctaactgaagtcagttcctagttctagtggcttatgaggtattttttctgcttgtttgtttgcttgcttgtttttagttcattcagttatttttacagagacaccgctgtacttggggatcactgccaccttcagttttatccctagatgcctcctttttcttgcaaaagcatctgttcccttttcccccttttctgtatttcgttcattatttggtgatttttgaccaagaaagtaaatttggctccttttattatatttttatccagaaatatgaaaactcattgcctgtcatttgctttttaatttacagcattgcagggcttcatttgtttaagtaaagatctaaatgttcctgaaacaaaattgatcctttttttttttttcataaaaaaatgttggtaattcttgacttttctttatatattcctataatagtttatgaaatataacagatgtttctctgaaacacatacacacatcacacatcacgtcacctcatgtttctgtttgtaagagaacacagaatacaatggcttgtctatcagttccagctttaattttcttcttcttgtgtcatttttagaaagccatccatttcaatattgtgtaatttaggaaatagtttttaaataataacgatgtatttcctcctttgggttaatttctttcagatccctttatccaatcaagtgagagaattatttgcacatcttatgactaataaagagcagtgaagatgcactggttgccactggttaccactggtcaccactggttaccaccattgttaaaatcaacaccatttaagcctgttctctgagtatttaatcaaaaccaagaattatgttaagaaacaaagcagactataaaaagtactttttcatacaacatctacaacatagaaagacaaaacattgtaaatatttagtgacagagaaaagagttttaaaattatggttcttacatattataaaacatttatcatggtagttatagaaatttggatttaatttgtatttaaattgagaaatttttagagtctgcttacattttagtgttttgcagatatatgtataaagtttgaagagagaaatattttaaaaggcatagttatatgggtttgtgaatggttacttttgtcctttctgtatcattattgggcatttgaaatattatgtgtatgtatataaatatgtattaggcttatatctcaatttgcattgccttcaaagctcaattataaaatagcttgttgtagaattaccaattttctgtgatttcatatcacctataatttttcatcttaccagttatgttgcctatcaatgaaaatgtactgttgagtttctgattgttatcatttcatggccttagtatttgattatctttttcactgtgataatttgaactaattttagatccttttttctttttagtagcccagcaggaggctgaaatgttgaaacgctatagtgggacactcccgttgcctgggatacatcagagtgaggatgctttatgcacctgccctaagctgccccagcagggctcttttcagattgatgaatttgtcaacactgaaaatagttcatcaagaaagattcaacttgtgaaacagagactcgaaactgtcacagtatgtttattttatttatttaaaaattttggtagttgaaaatttaaaacccgtatcatgtaatatacataacataaggaagttacttaatttcttaaagaaaggttttcttttatagttcttttcaagcactagttttgaagccattattcacagcatacaaggtaaattttgactaacttatcatgatgtcagaacttacactttaaagaccaactcaagacttaataatgaagtgctctgaaataagtaatcctgcctagcaattgtcacatgaacaggatgagagatcgtgtcccccatcatcaagggcagctgtaagtaggacgagtgagggtgggctctctgcaggtgtagtagatagccatctgaggtctggctctcgccgccagcagtcgtttccacaggctgctgcttaaaagctcaggtaacgtgcaaacaaggtatttctgtccaggcattggaagttttgtaaagtcttcctaaaagcatgagtttgagtgtttcatgaactctgtgtgcatcagagccacctagctgactttctcaagctctgttcctacagattttgattccatatatctggcttactctatgagttctcatttctggcaagcttccaggtgccggtcagggcactctgtttaggacagctagcctgtctcagtccctagcacatagaatgtcacgcactggacagaccactctgtttaggaaagctaacccaccttatccgtagcacatagaacattatacattggcattttgttccctcatccataccatcagcttcttgaaggcagttctgatcatttttagtgtattaataacttgggtcagcttgcctgattttcataattcaacagaagtggaccatcgagggaaattttgaattcctaaatttctcttctatagagaatctgtttattattttgtttctgtccaatttttctatattccttttttagaggacaaatcaatacccttaattttctctccgatttccccattttcacattttccattaccctttaccttgctattctctgactggttttacactactgccaccaagtgttaataatgtactgatggcttctgcctgtggcagtacacttgtcctctacacatgtgtgcttcctttgtaggaagtgctgaccaaccacaaataataaaccatctctcacacacatgcacacgcacacgcacacacacaaacacacacagtataaggcagtattcacattgactcttttattgtagcaggtatgcaacattggcactagagtggctggtaccttgctttataaacaaagcaactatttatgttaaaaaagacaggtcccatgatttttcaagtatagacaatgtacaaaccctcttaccattttgaaaggatttctacataaaaagctatagttactttctctgtgtgtgactggtaagtttctacttctgttaagtgttgtgatatagttttgtatggtaaactattgcataagaccaaaaaatcatttaaagagagaatcagaagaaagtactgcccaaacttatacagactttatagttaagagtgttgagtgtatcagcataaattgctcttagagtcaataaaaactagacagagggacagcagattccactacagttcagtagatccacataagaatggtgttctattagaaatgtttgacccaaaaactgtaattctttcttggtcctggaaggtttatttggaagattatggtgtctgtagggatattgttcccatattttatgacagcctcatttaaagcccattgatatatatgtacacattttagaaagtttctacactaataggcttgcttatggctttttaaaaggccttagcatttagttatccctccccacattgccccctccaccttgccctcccatcccccacctcacctgactcctcttttctgatttctcctttatcccttttaacaccatattctgtctccttaaaagacctccccagtccattactatctactgaacctctgctggtattctaaatggaactcaaatatagagctgagtaaaacctgctggacaaaccaaagtcagaacattcaaatagatcggcattcgtggagaagtgataatctcatttaaagcaagagcatcattaaatagatgttgtgaattacaggagtcggtggttaaagtgcctactgcacagtcatgaggacataagctcagttcttcaacacccacaggaaagctggcatggtgggacatgtctataatcccagcactgaggaagtagacaccagagaatccctagagatcgctggccacctgacctggccaatcagggaactccaggttcagcgaacaccctgtctcaaacaacaagatggagagccataaaggcagatatctgccacctctgaactctagatgttcatacaggtgtacgcatctgcctgcagatgtgcatatgccatacacacatgcactctcacacacacacacacacacatatgcactcacgtatgcatgcacacactcacgtgcacacacacatacacacatgattgtgtgcattaacaagaaaagggcaatgcaggcaaagcatattagaaacaataatttaaattgttttgtgaaatagaatattggaatttttattattgaaatcaaaaagtagtctgagaattttatttaaaaagaaaggcttcctggctaaggtaaaaataaaaaaaaaattcacaaacaaattttaaaactctgcattgcagatggtaatagggaaagttgatacttaaactctccaattaataagataagatggggaactaactcatcagcatgctcaagaatgcatgtgaagtaagaatgcattgtaagtagctctaaggccgagggcttaggcacaggcataggcacatgggttctaacctatgcctgccttgtgactctcgagtacattcaagaagcctaaaatttcctcatctctaaaagtgaggactcaccttactgtattttaaagattcagtgagatcctaaatgtacctttctcatagggtgtctgagatataaatggtagctatctgctgagagatatttcagctaccctcagccttctccagatgagccaggaaaaagaagagatgctaaggaggacagtgttgtcttaccagatatttaaatgtcataaagctgaaaaaatatagataatgtaatgcaaggtcataaactaggtatatcagaagagaaactaagaactgtaatattaggcaacataaatagaaatttgctgaaaaagctacgtgttagatcacacatgcaaatagaatctcactgaccggaagttaagtgtgtggttaataactacggaaatgggcataaagttcaaggaaagaccacttgtctactgtgcccacagtccagggttcagtccatactaccccatacacaccccaaacctagaactatgtgctaccaaatatttctcttattaagtagacaaaagacttgctcaaataaaattagtaattcttccccaaaatattaataaattttaaatttctgcctaataaatataagtgtatatatgtgtgtctataataggacacacacacatatgtagcaaactccaacatgcaaaaacgtcagcacaagatgaattagagaaacggtctcattaacttatgagaaagaaaaacaattaacattaaagaaaaataataaaacctaaaaaaacaatgggtaaaattttgacatgaacttgtaacttatgatttcactgttaccactaagtgccaaagaagctaggtatcaagtggccaatggttctttttcgaaaagaaattttcgtatgggccaagaagcttaaccattcttagaaatatgtgtcttctttacggtagccatttagatcgcctttgcctggggctccttgaggggtgagtgaggctccacagccttgctcataggctgctgcttttcccatgggcctgcactgggcctgccgtgctccctgctcctccctgacacaaaccttgactgccaggactaacaccgcaaccttgaccctgcatgtgctttcctgccttcctcccctgcctcagaagctgcactagggtacgaagcacgctgctcactggggttagatttggttgcaaagtagaggtttgtgtatattactttattttttttttaatgttactcagttaaaatgaagacagtatgactttatatttgtttcagtgttttagttctcatacattctagtgtttttaatataagcaaacagatgtgttccacatttttaaaggaattataataggtatgttgctttttaaaaaattagagaaaaacccatttccagtagaagatagaggactccttgtccagtactctgtatgacaaggttgtccgtagacacaagaactactgcgtcctgggactgaccctagccgccactcacttctcagatgacagtcaacaccctgaaacaccgaacttttatagcttgtcttttaatattactttatgtcttcagataaatgaaaataaagtaaaattaaatgtaaaagaaaaataatgtcaaaggtatttttaagaaattaaatcaaccagaagaaataaattaataatttttattgaagataatttatatcaccttagctatttagcttttaacatatttccattttaaattagagaatacatatgccttggattgatataaaagttgtctttggaaataaatctttgtccagtgtctgtagcttaaaaacaaagcaaaaacaaaaaaacaaaaacaaaaaacacaacacattgtttactatgcctgtgtaaagagatcctgctaagcttttttcatgttatatatgatccatttttctatcagtctaatataaagtaagatagaaacaaaatattcttatatcaccttttgtcacaatgtcttttcccttgtttcttgtaattatattttagaaacccattttctttatgagctcctctagttatagaagataaagcaggccgggcgtggtggcgcacacctttaatcccagcactcgggaggcagaggcaggaggatttctgagtttgaggccagcctggtctacagagtgagttccaggacagccagagctacacagagaaaccctgtctctaaaagccaaaaaaaaagaaaagaaaaggaaaggaaaggaaaggaaaggaaaggaaaggaaaggaaaggaaaggaaaggaaaggaaaaagaaaagaaagaaaaatgaaaggaaagaagggagggagggagggagggaggaaggaaggaaggaaggaaggaaggaaggaaggaaggaaggaagaggataaagcactcagcattttgttactcagccttttgttactaaactaggaatattttctaatagaactccggtttaaggtatggtttgtatatatttaaattacgtactaaatctcatcaggcacttcatgagtatttatttactaggcaaggacataagcgtaaatgataatctggttcttagagcattgtcatccagtcttaatataaatcactgttccatggtctgcaggcctgactgctgctcccacagtaaatcctatggggacacatctccttctcagttttcagattgagagatttgccttcatgactgcattcacagtgcttagaatcttgggtacccgtcagaagcaaccagtctaacaagtagtcgatctataaacccggatctattagagaacgtcttctgataacggggtccctatcgtcagtgctggaccactcaagactgccccagttttcacattagcctgtgtccagcgtaatcgtcacagggtgcttgccagctagaaccatagaagcaagaatagaatgactctaagaattatttatgtccattttcagaaaatgtgaatttccattgcataggcaattcatcttacagagattaatgataagcagtatgttttgttgttagtgattctcattgtaatgtatctctggtacttctgtatgtgcttttcatgctttgctagttagtcctccaataatagtttatcgggtagtagagtgttagtaccctctcaagagcaacttgaagcctatagactagaggtacaatccaacagactgtgagggttggacctgagagtcagcccagcaagcaggattcccaggtctccttttggaaactgaattaccgtctccattaaacagtgtctgcttttgcatttttacaagaaaaacccagtgttgttcttcttcttttttctttcttttttttttttttgatggaaacaacatttttattagatgttttcttatttacatttcccagtgttcttcttttacagttgtttgcttgttcatttgtttgttgtagacttgaggttggttgttgcttttttagtataccaggctgacgataaatactggctaattctaactggagttgaatatttttattgtctccataggagcaaattttcaacttgtccattattcattgatatctactacttttcttttcaaaagtgatcattgtggccttatcctgtggtttataagcagtccatttctgctttttaaaatgacatgtcacattctttatcatctatggtattgatgagatttttattagataaaaattgctaatgtggaaattataggcactgatgccagtcatagtaataactgtcctttaggcaattgagagcttatctttttagacctgtctcagttgtaggacaggatttatgccaggcttattgaagacacaaatctcccctggaagaactgggccctcagaagtttgggcattggcaagttgctactaaacagagttaagcctcttgaatttatcctatttgcaactcagtggaaacgatgcagactgacaattcagggtgacaaggaaactctcaaatgctagtttggatcattagaagattgacatctgaatgttttagaatgagcaatactttatttaaagaaaattatgaatacttgtttattgtattgtatttcttttaggaggtgatacgatcctgtgctgcaaaagtaagtagttgttattaccaggaagacaactttaaaattaagtttctattgtgatgtacgagcagattggattgcgccattgcagaggtgacagctcctataaaagttgcctgatgtgttcttttcttactgagcttccattttaccagaattataacactcggcccccagaattcatcaagaagagtatttgccaagtagattcgaagttttgaagatttaaagtcctagcaactgggatgtaatttcagtgcaggtccagcacattcggcatcctcttttaggctctctatgatatctactacatatgatagctactttaagcagttaaggagtcaacaatgcagtcccttacattgttccctcctctcctgacattttatcatttgccaaatagaattatatattgcatagtaaaagatgagacatcagaagagaaagaattagggtggttggaagatgcctccatacagcaccactaccgtggagtgagacaggcatgccaggaaggaccagacttccaataggaccatgagctattcagtatcatcaagacccatcgcagtttacctaattatcacaagtcaaccggatattgattatagacaagggggaaggaagatggggaggggaaaagagaacaagctgtattcggacttggctgcagatgttcaggaagcttgttcctgatagcagtgactgttgtagtgattatagctccaagattaccgaatcctcccaagtgtgtaatatatataaagctggtagcagtagcagttttctgactagctctgacctctccctnnnnnnnnnnnnnnnnnnnnntctccctctccctctccctctccctctccctctccctctccctctccctctctttccctctccttttctctatccctaatgtgtgcagttttctctactaatgttatttcaatgtcagttgagtcagcgactctgtatacatttaaccagtcattagggagaatgccctattaacctgaaaactccctgagggtagtagggagcatctttcatctttgtatccctagcactgaacacatgaagaatgaaccctcatcaaaactataattacatatttgaaaattaaaattaggaaagattaacattattaatgcctttttacactactttaaatagcttttcattgagatataatttatacaccacaatgccctttttaatttattcttctctcatccaatgcatccctgtggcagtttcccctccctccctcctcccagctcctcaccacatcagccttccctcccctcatactcatcccaccttcatttcccttcagcaaagcaatacagcataacgagatacagtaagcaagatagctcagtgaatgaaggcaccacgtgctgcagaagcctaagtgtgacccacagcacacatgtaaagcagtaactctaacaggctatcctctggcctttacattcatacagtgacacatgcatgccttcatacatcgttcacgataagacaaaaatgatgcctaatataagtctgaaaataaagtgtatctaactgtttttaattatattcagcattatgcaagttccccacgtagaaagtgtctgttaactgcccttgctaatttataaacataacatgtatccatacagactcacggtaactgttcatgtgtttcccatagattattttgcatatggaattttattaaatagagtcaaatatgctgtctttgggtttaggaatcggggtttttgttttatttttataaaatgttccctgagtagcctaggttggcctcaaactcactgtgatccttgtatcccagtccccatgtgcttggatcacaggcatgaaccagcacacctagctgcagtatgtggcctgtcacgactggcatctctcctttagagtctcaccgctccctgtggatactctgcatccccgggactccctggtcggatgtgccgtgcttgcaggttcccacctgcccttcagcttaccagcgttagagttgttcctacctcttagtgtcaagactaacgtgttatgaccatgtgttggtatgaacaggattggtgtcaccagtgttttcatttctctgggatttgtgtgggagtgagaaatttttttggatcacatgataattatttttaacattttgaggaattctcaaactcattttcaaaatggacaaagtattttcgaaccctccgagaaagatgtgagggttctagcctctccttgtccccaccaagacttgaattcttggcatgttttaacatttccctcccccggcttatgaagcatggtactgtttcttttgacttgcgtttcctgatggctagcggtgttgagcatttccagcatgtgggttttctacctactctgaggaaatgtttgttgaaattatttgcccatttgattttcatctctttattattcactttttagtaattctttgtacacacagtaatttttagtaattctttaattttaatttaatttttagtaattttagtaatttttagtaattctttgtacatgtgtgcacatacatgtgtgcagctgtctttcagatgcattctctacaaaggttttatacctcttgtatgctctttccactccctagatgttgcctttagaaaagaaaaaaaagttgtaattttttgtggtttttatattttttcttttgtccatcttttttgtatcatatacaaagtcacattgcctagccctaagtcttatatatttactattttgttttccgctttgtttgtttgtttgtcttatagctttggtggttttccctatgtggttatttttttagttaatttttaaagatataacatggtctgagagctcagtcacatgcggatacccagtggtcctggcactgccgctcctgccccatatctggtctcttattcaccttgtcactagtcattgtcccattaccacagtgcagttgtgcagcctctcacacactgcgtcctgtatagtaaggttttgacaagtgcttgacaaaaataagggtctaggttgagacctaatgattatagttttgaaggcaaagattgttttctgagatctttatacaaatagtttagaggctaccaatatttttcaaaatgcttgggctagaacattcacataggcatgttcttatatgggaagatacactgaatgaaggaatttcagataatactgatagagataaaatgagattttagggtggcgagtaagtagagaaggagaggcagttatgtcatggaggatcatggaagatttcccagagagtagcgtttcataaagaccccagcactaaagtaagagtaaggctattcaggggtcagaaaagtgactttgcttaactgggtagtgacggccaaaggcaagtgcggttttaggacaggactagaaaggtggcaaagagtaggctgtgcatgctttttaaagaatcttgtcagcacaacaggaagtgagtctgttatcttcgagagacaatccaggttgaacaggagccttgacttttggcagagtgaggtcttccaagcacagtgatcagcaatcaggtccactggtcctagaagaaacgctggtagactcatccagacagcactgagtgctaaatggattgaagacactgtttagtttgttgattttgcccatattttggaaataggcctttggacctatccagtgcagttaataaagaaatgagctcttctgggtttgggtttcggcagctgtgcagctgctgctcctgctattcttggatgaaggatgctgggatggagggagcaggtgtgggaagtagatttgggggcacgaggaaactgaagtagacagtagcgtgtgttcagggccaaagcactgtttaaagagctatagaactggataagggccccatggtgacagcgtagctgaggtggtacctgtgagggcaaggcaaggggagtttacagaagagcatttcgaaaagagtattttactggcacatgctgtggagagaattgataaagagagaacgaagttgacccttgtgtttgacaagataatggccttgtgatactctccttaaataggcacaaaactcattaagagtgaagtgagaatggaacaggaaatgccagtcttttcagtgtgtgtcgtgctgtgttctagcttgatgggaacatttgacggacattagagtatctagatttgctattctgagttatcccgtggttatgtagctattggtaatgtagcatggaagtggtagttactggaatgaaattcatatagagagggaagagatgtaagagaagttctcccagaagaacaggccctaagagaagggagctgtacccttcctgagagcagctaaaccctgcacagattcacagctaatggtggagatgaaagggctcccagctgattgctttccaggtgctagagtggtttaggttctcatgaattaggatagtatgacaatttcttcatacaagtttgtaatttacagattgccttgtgctttcctttgcttagggttgaagtatagcagaagtggttttgcctagatacgtttccgttcagtgttttctgattctcataaaagaggctgactgcccatgttgtcagacatactcggggctggcataccctgtcttcacgtgccattaatcctggctggctgtctctagtgttagatcatcagttacttcaaaggaatcttcattcctctctcctctcttctctccttttactaactataaatcacagcaacataagtgctgagttctttataatattattttcacttctaggtctggcatatctttctcttcacattcctgtataagcttcttgaagctgcgggacctcatattttcaaaaatagtatcagctcttagttcatattaataaaaatacaattgagtttgatttagttattctgtttaatatatgctgagattgggcatgttatgggtgctgtggccatagattgtggctaacacaacaatatggaaaacaactggagaggagactcagtcagtaaaatgcctgccaaagattttgctgaaaggacccagatatagctgtctcttgtgagactatgccggggcctagcaaacacagaaatggatgctcacagtcagctattggatggatcacagggcccccaatggaggagctagagaaagtacccaaggagctaaagggatctgcaaccctataggtggaacaacattatgaactaaccagtacccctgagctcttgactctagctgcatatgtatcaaaagatggcctagtcggccatcactggaaagagaggcccattggacacgcaaactttatatgccccagtacaggggaatgccagggccaaaaagtgggagtgggtgggtaggggagtggggggaaggggtatggggaacttttgggatagcattggaaatgtaaatgaggaaattacctaataaaaatatttaaaaatgttttaaaaaaaaggctgatggcatgagttacgatacacagcactgataaaaggctaggcatgcgcaaggcagaggcaggcagggaagctggagctcactgcttcaggaagagtcccgtctccaaaactactgtggagatcaactgaggtagatgcctgacacctactttgggtctccatcatacgcataaactgttgcatatgcatgcatacttgcccacatgaatgtgtacatacagtcacacacacatgcacacacagagaatgctataagttgtgatgtatattttagtcagaattattgtgaaatgtactatttaccaaaaacatcttttaaaaatatttaagtaatagaatatttagtgaatataaccttttaaaatatcattatatatgcatatgtgtgtataatgtacccatatatatttacatatatatgctgaacttgataatacatacaagatctagaagcaataaagatcaggagtttaaagccagcttcacttgcatgacaatttcaaggcctcaactctatcagaacctgtctaaaaacatttaaaagttgtgtgttgtgtgtgtgtgtgtgtgtgtgtgtgtacattcatcagtaagaagacaagattgatttgagcagaataggaatggcgggggagtggcgtgtagcagcaggggccgcagcagtgcactggactcagctgttcattctagcgtcatgtggagagagacaagctcaggtgaaaggagctgaggcactgcagtctgtgttgtagttcaaagaatttatcttttagtgacgcttaagagagttcctaaggtggagggagagctatttttgatttactgatattttgttctaagtagaggggtctgtgcatagtttctacatagaatttggaagtcttcgtgactcctgtgagaacctgaagtgttcactgagcagaaagtggcactgaaagaaaggcaggtagaggaggttcagaggattagaggtaagggattcgggcttagataaaggacagactgccaagacagacaggagatgaaggcttggagaaggcttggagaagaccagcggcctggaggtacgctgccttacctggggacagattgctatagtgttgcttggagccaaactaattttaattttgaacttcatgtaggagaatcacatcacaaatctatgaaccacaaatccttggtacctgttacaggcttaaacagtcctgattaaatactagttttttattacaaaaaaaaaaaaaaaaagcttctccctgactgcattgcatttggattcttgatttaacattgtagccagtgggttgatttaacattgtagccagtgggttgatttaacattgtagccagtgggtggatttaacattgtagccagtgggtggatttaacattgtagcccgtgggttgatttaacattgtagccagtgggttgatttaacattgtagccagtgggttgagaggctccacaggaggatccctgacgctttgctgctgtaaaaccttttactaagttagtactgctgttcctcgcctctctgtcctggcctatagagaaagccaaagcatcctttgatcaagtactataaacttcacatgttacacttctcattctcctgcaaaccagagcagcatggatattctccaactggacaacctgatgtaggaaaatgtctgggaaagtcaggagtgtgaacttttaagggaatcacccaaagttgagaagccataaacttgtagttgggttgagagtgccacctgatctacagttggctgccaggattagactgtgcatatgaatgagagtgggtgtgatctcgcccccagaggtttctcattttaattactaaaagagaaattaattattagcttgtttaatctttcacattcagttttatgttcggtgcagtaagagttttaacaagaaaattagcccagtcctgggagatgagcgcttgcattcctgcatgatgctgcttatagccagatagaacaggagaaagttttgtaactaacttggcagaagttcttggtaatttttttctttttccttattataaatttcattcaaatttctgtgcttttagatttctctagtatggaagtattaaactgaccttagcgaactgtggttttttttgcatgaagcaagcagaaaaatgtgttgtgaaaagagggtagattggtatggggcagactgtcttagccaaccgttctgttgttgtaaagttattaagcaatccttttccacagcatatatttcaaaaacacacattgctccactctatttaatggccattatttttttttcctctaagtgaaattctaaatatatgtccaataattttgaaaatcttttgacttctattttccaatccccactaataataacggatggttatgttaaatcttaggtttgttacctactctgcaccattgctactcctgcttcattgacatttgcatagtatccaaaaaagatgtcaggaaagatcagagtcataacagttgcttagggaaaacatgaaattattgttctcctccctatacacaacattatcttagtgttgagtcttatggccaagcagagacaattaagccctgatgtaactgtctgctatttgtttttgttttagcatagataaagccttaaagagggagatatgagagatatgagagatgggtatatccataagcatggcatagataaaggtgtagaatcctgtaattatatcctagtatacacctgttcacttacaccatactttaaatacattatttaacatgtttgaaaataattttcaagaatacaaaagcaaaatcgacaaaggctctaacaagagggtaattaaatagccaagtgataaatgtgtcttttgtattacaatttctgctaaaagcagagaactgcatctacattaggtttgcctgattttctgatagataacactaatacctaatactacattggtatcactctttatagtttatttttgcaaacagaaacatttgggttattttataatacagacaaaagccctatcattgaacaataccagcactatttaatatctttactacattgtccagtacttgatagctaacatgtaaatacagtattaaaacttcgtctcctctttcttggcacattgttgataaagcacagtcagaacctatattgagatccccatttatagacgaataatgaagcccaacggttttctttgttattttagtaacatatagttatagcatattaattttggccagagcttaataatggatcctgagaatttttcaggtttggtaataagttaaccctgatgtggtttgagctccttctaattattttgaagaattttttggctgggaacatagctgtggggtaggcacttgcctagcatgtgtaaagtccagatttgattcccataattatgcccacaaaaggtatggtttttttttttttttaagttttatgagatagcgtaataactggtattccagaagtgtcttactgtatgctcttaattaccttgtctccaaatctgctaaagctctgtggtccaaggaaagaagtgactctaagatacacaatcatcacttaaaaaatagaagcatttataaatatgtagctagcgagacagataaagaatatatataagtacagcacagcactattctttacagggctcctaagttttaaccattagtgtagtggaactcctgctgaagttctttgtggttttgattatttaaagcaaagtaaatgaaagaatgaaagtaaataaaaagaatgacattttcatacactgatatttatgttatctttaattgaatgactatttgcagtgaatttctaacattagactatctcaatttgtaagaatgaaaaagatcctattttatgattcttaaaagaagaaaaagattgaatgaattattcataatgaacaagactaaatttttcttgaaattaattctaatttctaagataaatttactaataaactttttaactgttttagtgaactattttttgtgaaaatgcacctattatacatttcacgtcttgggactattatgctcaagtcactcgtgatatgttttacattttacggaatattatgtttacttatagaaaatgtgcttatgtttatcatttttaaatagtcattctgtgtttagtctttaaggaaaagctttttatgccatggaactttctccatggaagtgagattgtcgtgtgttaaatttgtcaccatgttacacaagcgcatgagtagtacggtgtttacggcgttttcatctctaatttgactttgctgctgtcctactaagatacaagaaagtgtggggaggagacttttgactttctttattgaaagcaatcaaggagtcacttatacatttacatttctttgaatcttaagacctctgttttttaaatcattacatagtattaattccaaaattttacctttctaaacgactttgatcgccattgtatctttaataaaaagcttggcctgtcttccaaccataaaactaaccacctgaattgctaccactccccttgacctgttacatgtcctggtttggatagtccgcaaatcgttctcatccggttcttgtgtctgtgactcaggaagtttgaggtcctttctgattggccttttttattgcaggtcaacaaaaatctctcaatgacttcgccaccaccaggccctgcaaagaagcccagggtaaagcagtcgttcgtgctgaccactgatgagatcatacatcagtttggactcccccagactggtgagcagctttctggagctgaccattcttttaagcatcaatgctaatgttatgaacgtccttatttttcttcagaaatcacacggtgctgagctaatgctaggtctttacttctggccaagtctatccccgcaaagtcatagagacgagggggacgttcagatgtggtaacttaacactaactaccttgaacttatatcctgtgaaagagatccatgaaaacttcaaaaccaggagacctaaccatgaaatatgaaatatgagtttttcaaatgaataaaggaacaatggcttatgggtgattttatttttaactgtttttaaattctatctaaaaccaaaacagtttgacttttggtggataaaagaggctacatagctgaagtgatatcccagcccttcaagttagcaagttaagagaaaatacaaaaagtttactttaaaaatctacattaatcactgaattgaaataagttgtacagttgcaaattttagactaatattttaaatgtacttgaacaaggttttcaaaggatattaaagtatctatgagaaataacaatctttattttgaatgaccatggacaaagttcacctatatattatacatgtgtgtgtgtgtgtgttagaaaataaaaatgtgattagttgtaaactgaccactaattatttttcattaaaaagttagtgtctgagaaagaagtcctcactcgcagccaggagagtggctgctcaagttcccccttacagaggagggtagaggaggagggtaggatagaggctgagccagttcttcaagcttcagttttgtcaaccctgcagacaagtgaggtgtttggtttctgtatgaaaattctgtaattctaggaagagaagggtaaggagttttggtgaataggatcaaaatacattgcataccgctcttaaagaattaatattttagaaaaattatagtatttgtctcatgttcaaataagctttaaatatggataagtgagttttcttaattatacacatctgttaggatatgaaatatagggacacaaaaacaaacagtgtacatatgtacatataatggttaaaatagaaatcttggaggttgtaaagatggcttagtatttgaaagtgagtacagctcttgcaaggacctgagttccgttccaacacccaggagaggcagcttgcaacccccagaaactccagccctcagggatccagagccctgttctggactcccaggtccctgcagtcagaagtccatgttcccatatataaacacacaaagtcacatatgctttaaagtgaagtaactcttaaaatacgtttctatacacacatacatattacacacacatgaatagaaagtcttaactgacagcccacatcaaatttgcaggccctgtaatgtttagtacagggaaaagctatttgtccagagctctaagggacaggcccacttagagtcatgcagagagcaattccattgtagactatacataagtgtatttacatgctgggagagtacatgtttgtactctgacgtgagtttatgttaatcttatttagtcaaagcaagttctaggaaattggggctgtagaaaaataagcatttctttcttaagtggtttataatcctcaaagtttggaaacactttaattactctaaaattgttgtgatttgtttgctgtgacctctaaaagacatgtagtaagtattacagtccctgccttcaagaagctcagcgtgggagacagttgggaccatagcaaattcagtcagagcgatgaattctgaaaagtgcagatttgaaagactgctactggaaagcaagctgtagtggtagcagagagtggttaagaggctcctcagagtgcgcacgcgctgcttgcatgcaggtagcccttgcttccttgcctgcctccctctgccgagcatccctctcagtcccacctctcagatgctggcagacacaggctgtgggctgtctggctgtcctcagcctagaactctctgaattatctatatggaatagaattacccgaggtgtgagaatgaaaggtacactgtatcttataagataaaatatgtctttaaaaagaactattgatctctgtgtgagagacaggctgaagagggaaagtgctcccagaaaactttgtttaggtattcgctgagctgttaatcaaaggctccgataaggaaaaaataaataagctgacttttttttaaagttaaaactatatcaaggaattttttaaaatggaattctaattttaacatttcagataaaattacagattacagttcatgtaaatgctttatggtacattgagcaagcttttcttacttcaaaattgcttcaaaaattagagggatttcatattagtaagttacctgcactcctgaaagctccagaacaaaaaatcaaaataatgcccaaaaggagtagatgacaagaaataatgaaactcatggatgaatcagtaatatagacacaacaacaagatcaataatcaatggaacagagttgattgtttgagaaagtcattaacactgacaaacctttagccaacttgactaaaagatggagaaggtcctcatgagcagagttagaggtggaaagcggacataacagcagacacttcggggacccagacagccacagacctgagctgggaaatcccattcttctgtggactgaggaaacgccactgctaccaatttgtgtttacacaagcgcctaagtgtttcctatgtatcttcttctgctcacagccactctatagcagtcacccaggagtcacaccgaataaaataatctcactcctccaagagcttagccctctatcatccagtgaactaacagtgagtctgagaagcccgggccctggccaggcggcctgcaggagacccaggacatcgtgctcactattcagacacaggtttgggaggccaagttgtctttgtccaggatcttggagaggcagcacttagagctacttctctgccagctgctcacagccgctttactttggcaggtttttctaaatagtaactggaatatgtaactgccatttgggaaagtgtggcttctgaaactgaggtgtcaagcaagacatctcaattcttgatcgtcagtgagctcacattttctttgctcttaaatagatttgtgcttgtcatttattagggtttttttttaagcacacattctagtgtgatgtggtatttgatctctagtgaaatcagcaggctcccgggagagaaattttattctgttatttggtttaagtctgggtcccattcagtcacctccgtaagtcttttctataaattatgaccccagacatggtgggccatacctagttccacgtactccaaaggcaggggcaggaagaatgccccagcccacaactttaagaccaggctggaccacatagctacaccctaatgtggattatttaaatagattacttagtagtctattcactcttatgagtagatgagggcaaaaatatcaaaatttttcactgctggcagggcagtgtttgtatcatctttccaagttattgttcaaagagaatattttacgtattgtgtattttttattcatatcatttctctaaattaaatgcaattcagattaaatagataggtcaagcaagataaagtaactttgttcatttaatcttcgtatctttttaattataaacttgagtttgtattacatctaagctggaaacatgatgattcttgtgtctcaaaggaaaaatacattttggcaaaaattaggaaatagaatgactcaataaacacagctgatgtttaaaagggggtttccattgtaaggaaagcaaattaagcttcaaagacttccctcagccatcagagttggcacagtcttcctagtgctacttaacgaacttgaaactgttaattgaaaaagagtgtctattgaattctgatttcagacttttcaaaattccaaaatttcaattcagtggtgagataaatgagaaaaattagttaattgtcatagatcaaagataatctccagaatgaactgatttttttttctgtaagcagatatctttaattgtactttagtgtgttaaaagaatcaaatgcttttaatgtatggattttgaaagactttttttttaaatacttctctgaattcagcaccttcatcatggtgacaaagacttggtctttggtgtctttgatctgattcctaatttccctttgcctgggcagctggcatcctcgctctagctagaagcacctgaatttctcacttcagagcattgtttgggtcataaaaatactcttgcctttgaaatatgcaaaatgtcttgagattaaatagcatgaggctattcgagacttccccatcctcatttgaaatcattgtagacaaataatggagaaaaccttacttaagacctggctcggtgagctgttacggagagaaagggtgtgaaggacagtgaacacggtgtggagaagcactcggagggcacggtgaggggagccacggactgttgagactttagctttctctccaagtgccaacttgaggtcatctttgggatgtggtattaagatcaaaacagacataaaaactgaggtagcatgtcaagatctgttatgagtacacgggttggcaggatcacgctttgcccctcagatgaccacccaacaaaacactctttgcaagcatctcttgggtttgctgtcttcagaaacaacgcaagaagcgtgaagaagaatacaaggtgtttcttgtaacccaactctgttccctcttaagaaagtgtctttctataataggtagcatcaaaacaggagaaaggcattttgttattaaagattttgttacatttgttggctaatagaggccgtgctatgtagaagagaccgtttcagattagggattaatcctgcctttattgctcagtaagtcactaaactattttaccttctaatcagtttgcagttagccaaacagtatgatggtgctgcttgctgagatgaaaatctaaagctccctagcctgcaatgtggtggtgtgggcaagggagagatgcctcccctttgctggccacagcactcaggagagcttgccctgcacctgtcctgggcagcagaatagagctgccctagtggtgtgggtgcaggtgggccagcctgagggtatgagagcgggagagctggccctgcctacccattgttggctttggcaggagagctggccctgcctgcccattgttggctttggcattgggtgatagtccaggcagtgctggagagctggctctggttgtgtgggtgtggaagaactggtgagctgaccagcctcgataccacccaagcccagatccagggctttgagttggccccatgccattatctaccccatctatgcactgcgtgaagaaactggtcctgcacctccaaagccgcaggatctccatgactcagagcaacaagatatcagagaggaggctggtagggatccagtattgatagtgtagcagaagccagaggcctcgaaccagaccagtgactcactgcaataaacatttgcaaggaaagatatgaggacaaaaggatgtactgtcggatagtgcagtttctttggttttagttttggttttggggggcgagttgcaagggtggagagcagatatcagtggacagagagatgagtggggttgggtgcatgatgagaaattcacacacaatcaataaaaggataaataataataaatgttgcaattattaaaaaaaaaaaactaaaaatctggggtgacttggtagctgaccgtgcgtgtctggtgcggttggcgtgcttggggccctgggtttgagtctcctttaattattaaaataattagattttggagcttaccctcagagaatcagcaggttttgttgttgatagaaaaagacaagaaatatttaaatattcagtgatttttgaactgaggtgtttttttttttttttaagttagtgcatactaaaagagaagagctttaaatttgaggagcagggacagcctgtgaagacgttcatacagttagtagaggctagcaagcctggttttcttgctgctcaatgatgattctagagatctgttatggtagcatgcaaggtgaaatcaattataaaatgattgataaaatgtagggagtactgttttaattttttagcattaatacaacaatagtagctcataaataattagcagtattttttaagttataaaaatgaggtcaggatgaataaatgcatgtgttagacagctggtcatgccatctcatctaattaaatgaatttaattagattagattctgtcatctctcaagtccagcagagatgaagaatcccttccgaagctgctgtccacaccgttcttttcctgtttctgatcagcagtcagcacgagagaactgagaatgacggatttcgtactcggagttctctggtcatgcttggatatttgttgcttggattgtccttcaatgggtcatagtttgtatttccttccccaaatcctgagacttcacttgttaggttttcctttgtatttggaatctctaaaacttgagtttgagctgttgtacattaagagtgtgagttactgtttcacttcccaggagaacatttaagtaagtaaccagcgattgatgttaatctactagttaagtattcagatttagcctccatttattatagtaattaattttaataatggtattataattcattaattattttaactctgctgataatttgtaatatattgtatatgtcatttcttagtttttaataacatttttccaacctatgcatggtaatccccatgattattaaattcatcccagtgtttccagaggatagatcatgaatgcaaacctttcttatctaatcagcagattcaaatgagtggtgggtctgcccattgtttcctagccgattatgttctaagaaaagtcattttattcaatattgtaaggtacatatggtttcagccttacaactttaaacctccccccatctgttcaaagtaggaaatttactctaaattcttatctcttagccacttctttgtatggtagtgtttcttctcttcaaaaaccttcaaagtatattgcagcatttgcccagtggtatacaaccagtgaaaaataaaagcatataactgaaaactttaagctgtaggaaaactttaaataagatctgatgactaatgaatatgaaaactttgtaaccctacataaccaaagtgtgaattcaattttttataagtatacataattgcaatatttatttttatcacatatcatcttagaattctgcttgaaattctctgccaagacagagaaaaaagactagaaaactaaatactagtgactcccagctggaggtgaattatcttgccccaggacatttaaagatacctggagatttgggggatgctatatcagcatcagggatagacgtgcaggacactatgaaacattccgcaaagcatgacagcatccctgccactccaaatagctaacctacctgaattgtccacagtgctctcgctgaggacactggtgacacacagagttagaaaccatgctcatctctggtgagggttccaaaacagtaggctatgtgaggagtagtgaattcacacttgatgatattctgatacctaccatgtgtaaagccttctagttggtgtgttaatcagttcttgatttgtcctgtttatactctggagatttgtggaactatcagactataacatcttgaatgggaagttcaaatgtaaaattggaaggctagggcaggtataacagagctactacatatgtgacagaagtaaatataacaaccaatctgacaggagatgttctgtctcacagttgtgtagtgggacactgattgccatgacaacgttgctgtgagtgggtgtggggtcctcagagcttctgtgactcactgccagtcttcctgggaaggctttagattcacctttgacaccgccagcctttctgttgttaaccttccgcagagctctctggttctgtgttctgcctcacagctgatgggttgcccggttctctctgataacttctcatcgttctgtgccgtgggtgggtgcattgcatcctgctaagacttccagagtttctgttcggaggtttcctgtcttcggttgcttttattcgcttctgtgtttttcttcatgccaatggcttttctttatttgttgtaaatttctaaagatgaaggactagttgtatgacttacctattctaatgtgtggacagctgtaatctcactcattcatttgcccacgcatacttattaaaactttacatttgtggctaggacaaacaatgtgcagtttatatttaggataaacaagaaaactatgtcaggacacttgccaaagtgagaacagctggctggggctgcacgctagcagccttcgctcttccagtgttacttttggagactgcttctgcttctcctggctgcccccaggagaagtgctgggcaaacccctgttatttagggctttcagcctacttggctttttttctaaccttcgaatctttatttatcccagggttctttcagtttgacttcgaccagatgtgctggttacaggttcatagcttttatcatagcaaagatgacatccacatgaacgacctcacacactccaaaggaaagtctgtccctacatgttcctagacattttccattgtatgaaagtttaacatttctaatatattcttttcaagcttaccagtggccctcgcagctgctaatgccagtggccagttcttctccttatcttccttgaccgatcaccagctttgaatacatctggttacttcctaatgcgtggtttcctggacaccacactctgttgggttttttcttatcttgcgagtcagtcctctttctttccttatgctagatgcttcctggtccctgacaggcttaaatagactgttcccccacagctctgctctttcttcccctgcatatgccagcatctttggtactcaggtagcagtgactgtctgatgtcttagacttatcctagtcatctttcctgagctccagttgtgcgcagtccattattgtagcccctgagcctcatgtgaatgttgagtacatgaaatatcactggtgtgacttaggaactcaaaccttaattttaacactgtgcatggcctgtgggtactgtatagacttcagttctcttctgtctacttctactcaagtctatatctgatcccaagaaaatcatttggtaaaggattgttggtttaattggatgtgagtaatgctcttaattacaaacttccttagttaagagtttaggatcttttatcaacatgactctgacactattactaaaagaaagcgtttgtaaattctacactccggaggcagaggcaggaggatccggagctaaagatcaggagggagtttgaggctagcttggccagcaactttcacagaaattgtgtttatctcctacttctatcagttaggtcagagcatgagagtctagtagcagttagcagagagaatttagtctgtacataagctatggccttgagtggtcttttttatattagagatgaaaagtaatatttacttttcaaataaaaatatgtaaagttctctaattttccactacattttagaaagggaaacaaagccctgtgttcaatgacgcacacttcaggaatctcgtctgaattcttcctcaaatgatccatgggtattatttcaaaagagagctttgtaggtgtactgactaaaactgttaggcggcaaaacctcttccgttccatcagctgaagcggaggactgaataatcaatcaggccgccgccaaagtgctccgtgcctgtgagttagcactgtgcctccagggaggaagagaggggactttggttcactcaaggcggggtgagaggagcaaggagaggaggctctggtaaaatggctgagtcatgttgacatgagaacaagactttcactgtcttaataggctttcttcaaccattgattgcattttaccatctttatagttttcaaatgaagttgacaacttcgcatattttcacataataaggcatataaattaatattagaattcatttcaaagtactcaaatttaggacaagttgttctttactttcttttctgataataaacttactgcgtgtttttttaaagaaaatgagtacagccttgtcctcaggccactcgttcactgctcgcagctcccatgatgctttgcggtgagagcctcccctcccctcccccctcccagccttgtgcagccggcactgctagcatttcccaccagtgtttgtagcaaccattctgattctacaaatgggaaggttttttttttttaagtattttatttgctacctgacttagagtgggtgcatctgtaactaaataagtagtgagtgtctatgatatcataaaagttactggtagtgttttcataaataataattcctctttcctttataaattcctgtgactcagggtaattcttcattagatctattacaggataaagcctggttttaagcatcttaagttgtatctaccggctggagagatggctcagtggttaagactgctcttccaaaggccctgagttcaaatcccagcaaccacatggtggctcacaaccatctataatgataactgaatctcttctggagtgtctgaagacagctacagtgtacttacatataataaataaataaatctttaaaaaaaagttgtatctactatgagctttgggaggaagagagctgcctacattttctcatttactctcctcaggctgaagagagtatctgtactggaatagtcccagggcttccctgagagaacttaagagcttttgcattttgtggtttagtcagtttggggtgagtagtgagtgtctatgatatcataaaagttactggtagtgttttctgaaaatgaatatccatcacttattgaaagtcgtcagctaaaaatggagatgagatttaggagtctggccttctgggaaggagagacctcaagatcaagaaagtgtagagttgtattttccagaattttggtgcattttcaggaagctttttccttgaatgaaaactgaatgaaatgtaaagaatcactctttatgttgttcttagtcagcaccttgcctgcccatctcagagccagggtgatgacacattcagaaactgacaagggagtgcatgaggtgactgtcagcattttacagtcatgtcagaggctctgtgttaggagtgtccagcgagtgggctatgtgctcattgcaatgcacttctttctctctgaaaacactgtcataagaaggaaacctaagaatgacttttgaacagttcttaccttttttgaaagtagtttcaaaagcactatatttttggcagaaatactctaatgaaaactgttccttggtttagaaaataattacttttcttagatctaaaaattagtccaggcaaatacctaggctgtgctaatggagggggctgttttatggagaggctcagcccaactcatggccaagtgaccatgacggtctgcccccaggctctcccagcctagaagaatccagcaggcacagaagtcatggtcgtgcaacagcagggagcttaacaggagctggcatggaacattgtggggacaggaagagaagagagctggttattatatgacgtttcctaaatgatcctagctgcttcatggtgctgtttagaaatctgggtggtgtgtacattccagagaactattgtctgtccgaggggtttctaaacagtaggtgggacacgagagtctgcattctgttgctgaccttttacaaagccaatgtctcacaagtcctgggtgcctccagttgctgttctccttttaaaaacatagctgctaacagttctgtagcccagatctgatccccagacagctctgctgcacctgtacagggagaaggactagggtagtctttaaaactgactgtgcttcagagtaagtacgtgcaattcatgttgaaatatagatgtgaaataggtatgcttgtatctgtgcttattttgtatatctgcccttcttttgcaggagactaagttctccgtacttatggctattgaacttgagaaaatatctgtctgtctatctatctatctatctatctatctatctatttttcctattaatagtccctgagctttcttctttcagggggtaccttattttctttctcctacttttggtggtaacatgaagtttgatatcatctgagtctttaatatgtattttgaagtaaatatttaaagaattgaaagtaaacagcttaagaacaaatggcaaaggcaattataagaattataacttaacttttttattaaaaacaattttcatacagaatattttgatcccatttagtatattttgatctgtttctcctcccccatctccttgcacctccacactcatccaagtccatgtcttctttctctttctttagaaaacaaacaggccaattttaaaaaaaagaattataataaaacaaagtaaacagactgatggaggaaaggaaaaatacaagacgcacatacacacgtgcacacataaaacccataaaagcatcaaatctgaaccataataaataaaacaagagacaagtaaatttaaaaaaacaaataaaagctttatgcaataaagtatctccagaatcccactgagtcctgtgttggccatctactgctcggcacggggcctcccttacctgtgtctgtatacccactgagactccattggagaaaagtagtttgtcctaagctagcacttaccagttgtagacagcttctgtgttagggatgggggctgtgtctactgctcttcgcagcactggggcccatctagcttgaacctgttgcaggcctgtgcctgctaccatagtctctgtgagtccatgtgtccatcagtcctgtctggaagatactgtctcctcaacattcctctctggttctgagtcttgcggcctccttgcctgtatccctgaggggaggagtctgatggcatttagagctgaaggttccaaacctctcactgcgcactgcccagccatggctctctttgttggttcctgtctcctgcaggacgacgcctctctaatggtggctgagtgaagcacagatctggtccccagacagctctgctgtacctttacagggagaaggactaggagagtctttaaaactgacttctctttaaatcgaggtataggaaatttctaaatcttgattatgcctagaattttaatttataatttccctttagaaatgaaagcatgtctggagagatggctcagtgcttaagagcactgactgctcttccagaggtcctgagttcaattcctagcaaccacagggtagctcacaaccatatgtaatgggatctgatgccctcttctgatgtgtttgtagacagctaccatgtactcatatacataaaataaataaatatattttttgaaaaagaaataaatgaaatcatatcattatttgtagacaatgtagctgcattcccaccttccaacactgtcggtatcttaccaagccagtaagtgaactttttcttcagtaactcttttcttgattagacttggcctttgttttgttttaattataaagatagtttatccccatactttcgggatctgaaatgtgaactcatatattaagtaagaacccagaagtgcttttgtctgtggcaccagacccagctaataactagatctaaaaagcagatggtgctcttctgtgagtgctgtagctaatcctgtgcagataaatgttctgtgtgtgtcggtgggaaagacactgaataaaaactaagcagagactaagtgacaagtgatgaggagaagatggatagcgaggaaaggttgacctggactcagttctcagaggctaggacaaagcacagtaacagagggggcggtgggcaggagagtgcagctgctcccttgtggtatccaggaagcagaaagaccttaacccctattaccgccttcccacatacaccactggtaaacactggatcctgcttctcagccatcactcaagctttcagtacatggtgtgtgcagacaaacttaaggtccaaaccagagtgggaggcgtagagtcacttgcaaagtaaggttgctcactattgattgattgatgattgattgattgattgattttcgagacagggtttctctgtatagccctggctgtcctggaactaactttgtagaccaggctggcctcgaactcagaaatccacctgcctctgcctcccaagtgctgggatttaaggcgtgcgccactacgcccagcttatttatttttaactgtataattgaatgtgtttgtgtgcatggttggtgtggggtgcatgtgtggaagtcagaggacaattttacctgggttctagggattgaacccaggtccccaggtttgtgcagcaagtgcctttaccccacaagttctcactggcccaacagtcggtatttagattagccaaggaacatgccataaagaaactaacacgtgagcagagttttacctaagaaagacggtgttctgtcaaaaatagtgtctccaaacaagagccacggcaagactgtactttgttcacacatgctttgtgtgtgcacatgtgtgtatatgtggatgtgtgtgtatgtatgcatgtgtgtgggagagcatgcacattcatgtacttttggccttgccagtgtaatgtgtggcatgtgccacatacctaactgccctagattgatatttatggtatgtaatagcatatggtagcatgtgatagtatgtggtagcatatggttgcatgtggttgcatgtggtaacatatgcaaacttgagcctcttcttgcagatagggaagagatttagcaaatgttggaaattgctgctcctagttttgttttgttttcttcatagacattagtacaatattaactattagttagcataaataaattatttgggcaatagtttaaaaatagttaaatatctactgactttatatactcatagtattagtggtacatgcctgtggtgtgtgtgtgtgtgtgtgtgtgtgtgtgtgtgtgtgtgtatgacagtcttgatgtattataatgagctgtcctcagacgcagcaatctttctccctcacccttttgagtgctgggattatatatgtaggtattaagtgtatgaccctacctctggtatgagttttaatttttattagtgtttgagagtggcataggctgggtgttcttcccgagctgtgaggaagcacaccagagtcgcagatctcataaactcctctccgtcttctaatatacagcgtctccaaaaccaggttgggaagtaatttattggaatatgagtaattcgtccctcaaatggtgtttattatattttattttattttgtgcatgtgaatgttttgtctgcatgtgcatgtttgcttcacatgtgtgcaccatgccttcagagggcgtttgactccttagagctaaagttacaaacagttgtgagccatgatgtgggtgctgagaatcatatccaggtcccctggagcagccagggctctcaagcaccaagccaactctccatccctcagatacagtttttactaaatataaagggagaaaactaatgattctaagaaattcatctctctggttgggtaaaaattactacttctcaataagaataacttttttcattttattttgtatgttacatgtatgaatgttttgcctgcatgtgtatatgtctgtgcaccatgtgtgtgcattgcccatggagaccagaagagggcatcaaattccatagaacctgagttacagacagttgagtgtccttgtggactctggaagttaaacctgtgttatctggaagatcagtcagggatcataatcactgaaccatatcaccagccccaaatattactttttagcaagtcaatcaatatataaatatgaatatatgctataaacaactactcattcatgcatattcaacatgtgtggttgataaattcaatgttgagatgaaaactaaaataagtttatggtatagtgcactctactttccggaagcttcaccatacatctgataaaatgaaggactttactatgtaaatatactttatcatatatgaaaagtcacaaaggtaataggaaaaccatctaatgaatgctcacatttagatatccctaattatgccaaaaatgccttaagcaagctttgtatctctagcacccggtcaagattcatattttcattggtggtcatattatttgtagcagttgtattagtgtcaagtttcagttaacctagaaagaaaagtgcttgggctaattgtcttatacaatgtcagtgttttaaatttatctatttcatcgtggtttcgttcaggcaaaacttgtggccatactatgagtgataatcacttgtatacatcttatcaagtgtcatgtgttgtcagggtatcccactactgctgctggtaagtttagcctttgatgaaggaagtggacatcagacctctccattatggaaatagcgtgctcctgtttcagttactgctctctatgggtcgtgtgagtgttctcttcccaacaggaaggcttgctgggagtgtcggcatcctcgtgtcctagtgagaggaatacagaatgccagttctccaaagtaaccatccccctcccccacccccactctagggctgagcacagttagagtccatgaccatcacggtaggaacatggcagcagacaggcatggcgctggagcagtagtagagagctcacatcttgagacaactacaaggcagagagacagacacgaagagtgacatagacttttggaacctcagagaccgagctcccccccacccccccaccccgtgacacacctcctccaacaagaccgcatacctcctaatacatcccgaacaattccaccaactggaaaccaagtattcaaacaagtaagtctgtgggggccattctcacttgtcaccacagccaccaactgcaagtacgagcttctccgatgatgcttcggatctgatgacgcttcagagatgctttggtctatggatagaaggatgagtctttagaagctggtggaatactatgtccatttagcactgcaatcatagtaggttctctcctaggtcctgtgatctgactaggttctttgtctgatagtgatgccagctatgggcatattcttgtgaagagaaacttaaatcctatcggggcgtagtcagttgtccccaggacgtttgtgccactgttgtggtggacatgtcttgccagagtcagtgaggcccagacctcacagctagacatgactgctggttacaggtctcttctgacatctccttatcaccttccagcactgtgaaaatgtgttggtaagaagggagcttccatgtcagtaccagctttagttcaccgtgcatgtgacacatgtgagcggtgtgttcagcagctgtgtcatcccatagattcgagaggggaaccaggagcagtggcagtggtctgtagtgttaggggtctagaggacagtgctgggcagcagctccaaagaagtgactgctccctgctcgatctctctccctctccctctccctccctccccaccgtgtgtgtgtgtgtgtgtgtgtgtgtgtgtgtgtgtgtgcaagcatgtgtgtgtgtgcatatatgtatgctcatgtaagcttatatagtagcaggtgtattttttgaagtctttgtagttagaagcccgttcccaccctctgtcctctaccctacactacattcctgaactctagtataactcttcctgttccattaacttcctttagccctttgtaatagtgtcttctctccttttccttaaaagcccctccctcatggccccttagtaattttctgatctcgatggatattccaaattacacatacatatctgaagtttcaaagctcatatccacagttaagcgaaaatgtgatgtttgtctttctggggcacagctctcagaatgattgtttccagcttcacccatttacatgaaatgttcacattctgtttgtctcaatagctgagtggtattccattgtgtaagtacactgtatgttaggctgtttcagtttcctggctgttgtgagtaaagcagcagtaggcatggaggagcaggtaggcagtgtctcacaggagatggagcactgcacagatgttcccaggagatgtgaactgggtcatatgacaggcttatgagaaatctccacacggtttttaccgtgagtagatcagtgtccactctcagcaacagcaaatgagtgttctcgacccacacccaagcctcttcccctcctcctcctcctcctcctcctcttcctcctcctcttcctcctcctcttcttcctcttctcctcctcctctcctctgccactctgactttggcgagatcaaatctcaaagaagttttaatttgcaattccctgatgtccaaggacattgaacacttttaagtgtttctcagtagtttgtatttcattttttgaaaacactgtttagttctgtactaacattttttattgggttgtcttttctttttctttttttcagttcattttacattttaaatactaaccctctgtgctgctggtaaagactttcagcatttctgtaatctgcctctttaattgaggagtggtatccttggccacgtgagaatcttgatttatgaggccctgcttcttagttgttggttgcaattcctgagctgacagggtcctgttcagaaaactgcaaatgagttcaagcatagttcccgcttcctcctctcagagtcaaggcattgggcttttgtagtttcctatggaagaggtttttccgtttatgtgaagaattctattgaatattgattaagattacactgaatctgtagttgcttctggaaggatggccattttcacagtattaatcctagcccatcaatccgtgagcatgggcgggtttcccatcttctgatatcttcttcagttgctttcttctgtgtcttaaaatcctcattatacaaatctgtcacttctttggttagatttcgttcacattttgttgttgctgatgatggtggctgttgttcctgttgttgaagttgttgtgaatggtgttgctccctcgatttccttcctgttttgcttgtcctttgtaaatatgaaacctactgacttttgtgtgctaattttgctttctcatgcattgctgaatgtctttattggttgtagaaatgttgtggtaccatctttaagattgtttacacatagactgagatcatctgcaataaagatactttgacctttccttccacttatctggctgccctagctaagactcggggactgtgtcagacagaagtggggagcgctgtgtgtgcccatgtgtcctgtagcatggagcgctgtgtgtgcccatgtgtcctgtagcatggagcactgtgtgtgcccatgagcagcgtttccttgcttgtgatgttgaggttcactctcctgccccacagatgtttcactttttaaaaaatcgttttgatgctacaaatggataatggatttcagaaactaattactcccaggcctttcactccagaaacatagctaggaagtaaagattttaaaaatgggtttatagtgaaactgctgcttcaaggttaaattacattcatatttgccttctttggctttttataacaggaacttggcatttatcaagaacaaaggttacaaatgttttctctacttttccatttaactttgaaatgaaaaaaagtcttgtttagaagaggtttccccataaataaataaaataattttaaacagatagtcctaatgcaaaggacaaaaagaaaaaagagaagaagagatttccctattacctgggtatacccacatcacagttacctatgtccatctaaatcagatgccctcatttttagtaattctcttatatattagaatacattatacttgcatagactgtgaagactagaatatattatattgctatagagtgtgatatatacaatacaaggcaactctttaaaaggaaaacatttcattggggctggccaagagtttaaaggttcagtccattatccccacagtgggaaggaagcatggcagtgtgcaggtagacatggtgtcgagtggcagctgagagtcctacatcgagatcggcaggcagcgcaaagaaagagttacactgagcctggcttgagcttctgaaacctcaaagcccactcctagtgacacacttcctccaacaaggccaaaacttctaataatgccactccctgtgaacccaagggggccattttcattaaaatcatcacagcaagtaaccaaaccaccatagttcatttattctcaacctactgtgcctcctatgttgtctggtggaaatccgttggtggaatttctttctctcagagaaggtcagtgatgttttcaggcctttaaatgattacttgaggccctcttccacagtgggaggaatataccttcctctggttcttctaacttaaatgttactactatccaatgaaatgccttcaaagaatcatctagaatgttgtttgaatgtagctaggaaccatggcttagccaccttgacaggcaaggtcataggtgccacaggaagccatgtgtgtgttttcagttgctggtgctgataaatgtagagccaggttgaaatgtagacttttaaagtaagatctactgagaaaaggaagctgtctcagatgtcctctgcgaccatttctttgtgtatgtttttaacttcagtcttcaacaaatatgtactactgtcttttccaacggctatttctatatacaattgtagtttaaagctaagctaatttatgcaatctatttctaaaatttctcttttggggggtctgagaagtgggggttagagagtttgccatgcaagcccccaaggactctagttcagatctccagtacccaggcttatgccagatgggtgtggcatccagccagtgatctcagaacccaagcagtgcagacgagatcatagagcaagctagattagtcgttggtagtctgtaaactctggctttacatgaaagaccctactttatatacggtagcaagcaatggaggaaaacaccaaatgtcaagatctggccttnnnnnnnnnnnnnnnnnnnnnnnnnnnnnnnnnnnnnnnnnnnnnnnnnnnnnnnnnnnnnnnnnnnnnnnnnnnnnnnnnnnnnnnnnnnnnnnnnnnnnnnnnnnnnnnnnnnnnnnnnnnnnnnnnnnnnnnnnnnnnnnnnnnnnnnnnnnnnnnnnnnnnnnnnnnnnnnnnnnnnnnnnnnnnnnnnnnnngacacctgcacacacttgcaagaaaatgtagtttttaacattttctacccttgaaattgaaaactgaaatctagaacgtttatttttttctcttactggaactgttgtgcaaactctaataatgtaaatgagagggaagttttgtttttatcattttaaattaacttttatttctgactaaacaagatcactctcatttgaaagcaaatgggccatgccaaactcttgtcattgattgcagacacaaaagttagaagaggtggtagatgatagaagttgcagaaactgacaagaaccaaaattgtttaaatattttgtagttttatatttgcctttttttcactcagaagtaagattaatctgtgaatgaacgtctttttctcaaaagacttcacatgtaaggaaaagaaaacctacttcatttgctctatgtcttttttttcatacagaacatttgttttattatactagtttatcttttatctgactcccaaataactactcaataagtattagccttgtttggagcaaggctatacagtgcttcatatgatattgcaaacagtaggtaccaaaaatgtgggaggccttgctttcatattgcttgaaggcttgttctatacctgggatttactgaattgttggggctgcatcagttttttaactctacctgtggaggactaatgtgaactcagcatccttggggctgggattagtgtgtgcagcaccataccaagctcttaaggaaaaaaaagtttaaaggaagcaaagctgtattcttaaatatatgatgttttattttaaagataccatttgaaagtgatacaaagctatagtttgtcttaatctcatttcattcattttcattaaagagggttaaataaatacttacatagtatttatgcaaatagccttttgcttaaactgggccttttgctaattgctactagtagactttatggctctcatcattgtgacaaccattagcattatttgaaccaaaccattctagttaactgttacagtattgcagcccacatgttagtttgtaatgtgagagtaaatgagaccagcacctgtgttcactttaagtctgagcctggctttgaactagtgtcttacagatcagatgcaggtggtatatactttacaggctatttatcacacacaaaaaaaatgcagtaacgaacactaggaacaaaaacataaatccacatgcgataaaaggatctcaagattagccctcatggttaccattgtaaagagaagaatcagaacttcccgtctgtcactgcatggtgactgaacaagtaatagaatgtatcacagtaggatccattggagagaagttcaaatggatttgtttattcttttgagagaataggggagcatggttctttcacagcttaaatctggtgacctctagtcagaaataaacctttgctggaagaatggttgaccttttgtgctgagaggaggctctgaatacatcttcaaccttcactagacgccactcaaatgggaaaactggcctagcgaaccttcaattgggcatcttagcccaactcacctgctgttcctgaccagagaatttgtgacagtttggtaggaccctgccatctgaagagtgcttctttcttataaattctaccaggcatgtcatgttgacataatgttttaaaaataaaatgaacgtagtaaccaaatgtggttctttcccttccacagcatttatcagcatagagagagggccttttgtgcgccatgttgatccaccaccaatggtaaggcagtctttctatctaaattgttaaaactgctaagaaactactgcgtaatgctggctagtgacttaaaatgccatgctgaaaactcttttaacctctctattccaaagttatagccctacaagaaaatcaacttcttgtcttccaattaaagaaaacctaatttttaccaaaacataggaaaataagaagcaatctcttatggctgcttattcattttttaacctaaaataatgtataatttgaataatgtaagtatatcatataatatttgcatttaaaatgagttattttctggaaattgtgttatttagaatggatattttataatggtaaaagacttccttaattcatcattcctcataaaggttattatattgtattattatagaagtgagtctttaccttttatcccttttctattagtactagacaacaaaaggcatttaattataatatttaccagataacatacataaaatggtatttccttttagttttataatgtgcttatatgaaatacacctaaataactagtttctggttgagattttcataagatgatgtaatgtatactacagctgtttttccttcaatgtaatcttcttgtcccttacttaagttccaagctcttcacacaactcaccattttctattgtgagaaaccattttaaatgaaataatgacaatattgaactgtattttgatattttcttaatagttgcctcctagaaaattgacttcagctttttatttgattagttgaatgagttcaggcatggtatgtatgagatgggagtaaccaatataatcataaatcatattcagctgtgggactattccagcttcctttagtatgtttgccaaaactgtagctgcagcgttgtgtacattttattcattagtaaaattagaagcttaatttagaaaatttgttattttaatgtatttgaataaagtactcagtccttagattgtttacatactgttattttaaccttaaaagcattcattcctatggcaccagtgttcttatttctatgtcagtccatgttattaactggctgacttgactatcagagcctgatccacacgccatcaggagcagtggcagtactcatggtgatggcaatccgaccatggccccagaacactctgatgttctgatgctgctgtcttaggactctttccctggatggtcacgaaatggcagctccttagtcttcgtaccacttttaccctgtatggtcaatacactttcacatgcctgctgtgcatggaaacgtcccccgcctgaagcttgcttttcagcttttctgagataggcccagctactctgatgctcctctgctacaatctaagggatgttttgcccactgctgcaggccttcatgctgcatttggccttggcacttcccccacagggtcacaagtctgttcattacttgataccctggggtcctcggaacagattaactctgattctcacagaaatatagttctgcataacctttgtccttcagctcttaagttgtttaagagacaaacatgtttatggaaaatatgaaataatcaatcagtcctttaaaattatcaaaatgaagtatttgtaaatccaaatcttgtattcttctggcctgaagaaaacccatgcatcaggccactcttttgtgcctaaatcaaaataagaagggatcacccgagatttgggagtggctggtgctgggccctaagtgacttcttgaccttgaccttgactgaaagcctcattgcctggatacctatctgttactctccctctcagtcctggtgcttcagccagtgccttgcagagcaagcgctagatgccactgttcctacttacccagggaggcacgtgaggagctgagagttctcaggcctctgaccccgaaaggatgtgtttcctcaggtggaattcggaatagctttcagttaaatgtgtgttacaggggagattttgcttcttgtttgcttgtattgttaagtcacataagtaaatagagtatactgaaaataagaccgtctctgtcccttctctcagcattaccaaccctctttccagcttacttatttactcttctatttttattggttacatgaactttctttttgagggcagggggtgtttgattgtctctggcatacatagtaccctgtttctgcacttcttttaatagaaattgaaggctgtggctgaatggattgatggcttccatcaaagtgactcagaccaccctttttattttgtgtgctgccctgtgttctgtcttgttctggaactcagggctgactctgtgactcacgggtcaggcaagtgctataccccagccctgtacatgctgacttcttacgtttgttcacacctaagagtacatctccaagttattttttcaagagacgactaaacagaatggagatgagttacttaagtatgcatatttgcttagccacatctttgtttgggagtataacctttttgcttttaaagatgtgatagagagtgatcgcttctgcttcctagccactagcctaacattcttttatataactaaactgttaggcctgcctgtccatcatagactttatttcatttgtacctggtctcctaggtctgatgtgatgattaacactgtaactttcttcttgttggctgttctgatgagcagtatttacttgaacactgtcctgaaaagcaacgaggaacaagttggttacattagtagattatattaaaataattagattatgtcctttaaagactaggctcctacctgctgagagcctgtggcaagttaagaataactcgtcagcttcaggcctttcagaagtctttgtctgaactctgagaggcaggtgtaaaagttagttaagagttaagtcagcaaaggcgtgaaccctttatttgctttatatgcagggattatttgcaaatcaaaaagaaacacctacttgtataagtaaatgttcctcaggaacacagtgaaacatacctgctttttaatatgttatcatgcatagcatagcattttatattttgtggcagattattatctttgtagaagacattaaaacatagaaagctgtgcccaatatatacatgcttctcactgtttggggctttattcttaatgtcctcaatataataatacaagatgcaaataatatttgttgacctattctgattaatgacttgaattttttgcaaagttgtgcttttcatatttgtaacaattaccagtatgcattgatcttaatttgtccagtcttcctattactgagaacacagtttcttttaacatatggatttggagtagtttataaaattgctgcttatattttctaagacgtttatattcacacatctgccgcaacatgctcagacagaacagtctgtttccttaggcttctacccattgtgaaatacttaccatttgtcaaagtagccctttcatcgaaggatctaaaatatcctgacttgagttgacatttaaatgttagctcagatgttcttacattcattctttgatttagcattgaatttttatggctcaactgatagatttttgttataacttattagtaatgaaccataatgttttagacttattttgtaacttttgaaatatttgagatgaccgtggtgttgctggcctcaacactaaatttgttcgtaaatctactgattgaattacacaaattaaattttattgtgtctctttgggattttatgatctctcttattctgccacattttgagtcaatgataacaattgctatattgttatcattctttagcccttcatgtagacaaaattcctacatactgtattactgtgctttgtgtaatagtcctgatttgtatacttctgtaaaaatacagctgtttcacatgcaatgtattatttctcggtaaaagtatggatttaagtgaaatgtcttgattcaaagggcacaagttatcttctccaatcaatagcattttccaggaattcatagtatgtaaactgaggtgaccatgccctacaaaactcataaactggggcctgtggctgatttcttcctgtacataattgcagggtggagaggggacatggaaactataagcttttataacttgttgtaaaaatcctgttttcatttatcaatgaagtagcatttcaaagcagctctgctaaagttcctgttgaaaatcaaatgcacatacataataggatctcttttaaaaccatgagtggctgttcataatgaccattttcattaagtatcctcattctctcctctgaacactgtgaattataaagcctgtgtgaattttcccattgtcactttgctaacatttatggttttagaagatttctctcttctttgtgctttactaagtgtttttagtctatcaaacttattctagaattttcctgtctctggagcactgtaaagtaacagccgcatgaacctaattctaaagtagcagcagatgcagaggacctgggaaaatgacatagtaagcactgttcagatacccaaaagcaacaaccaagcatgcatgtctccataaactatgagcaaccaagcatgcatgtctccataaactaggagcaaccaaccaagcatgcatgtcttcataaactaggagcatacnnnnnnnnnnnnnnnnnnnntccctgtacataattgcagggtggagaggggacatggaaactataagcttttataacttgttgtaaaaatcctgttttcatttatcaatgaagtagcatttcaaagcagctctgctaaagttcctgttgaaaatcaaatgcacataccataataggatctcttttaaaaccatgagtggctgttcataatgaccattttcattaagtatcctcattctctcctctgaacactgtgaattataaagcctgtgtgaattttcccattgtcactttgctaacatttatggttttagaagatttctctcttctttgtgctttactaagtgtttttagtctatcaaacttattctagaattttcctgtctctggagcactgtaaagtaacagcagcatgaacctaattctaaagtagcagcagatgcagaggacctgggaaaatgacatagtaagcactgttcagatacccaaaagcaacaaccaagcatgcatgtctccataaactaggagcaaccaagcatgcgtgtctccataaactaggagcaaccaaccaagcatgcatgtcttcataaactaggagcatacctttgactgtttcttacactcctaagaaaagtgacctgtatgcagctaagtcagtattagatggccagccaggctcagagcaatcacgaaaggagccccatggcaccatggcaccatggcagtgtgcacacaagtagagtacagaacaggcctgagtgctataagaattcccaggactgagtcatctggaaactctggttagagtaagtatgtcctaaactggatcttataaggtggggatagagaattcaataagtaatagatgttgtagagcaaggaagcagtgcgagcagagatcataggaggagcacacacagtctggctgaaacagagatcacaggaggagcacacacagtctggctgaagcagaggtcacaggaggagcacacacagtctggctgagcagaggtcacaggaggagcacacacagtctgactgaagcagaggtcacaggaggagcgcacagtctgactgaagcagaggtcacaggaggagcaaacacagtctgactgaagcagaggtcacaggaggagcacacacagtctgactgaagcagaggtcacaggaggagcacacacagtctgactgaagcagaggtcacaggaggagcacacacagtctgactgaagcagaggtcacaggaggagcacacacagtctggctgagcagagatgacaggaggagcacacacagtctggctgagcagagatgacaggaggagcacacacagtctggctgagcagagatgacaggaggagcacacacagtctggctgagcagagatgacaggaggagcacacacagtctgcctgaagcagagtaggtggggtgggagataaggaaagggtgctttgaattgagaatgagtgattgagcacatgctgctctgagagggtcacacttaagcagacggctgggattaggaagggtgtgagtgtgaggcaactgcagtttacagccaaggtgacacaagtctgaagaaaccatgcaagagagtcaggactacagagttgtcatttacccttgctgaatgtcatcgacctgcttttttacctacttggctttaggttttggtttgcacttgctattagctcagaagttggctttgtgcggtctctgtgaaattggcacgtgtcacagtgtcgctttatgaattctctgttcaaagcgttaggaaggcatgaaacaagcaactactgctttgactttgggcaacttagtgtttttcagtcttttgtttgaggttattattgaatggtatttgcagttttattttgtgtttaacaaagttgtaacagattatcttttaaaacagtatttagtggctagttaaaatttatcttttgtaaaaagcaaaattaaatatgaagcaaaattaaatatgaccttataaaaatttaacaaccgaaaccaaacaagagtagatcacgttgttaaagtgaagaaagcattcttcagaaaggaaaccaactgcctggcagttgtggggacacctttaatccagcacttcagaagcagaggcaggaggatctctgtgagttggaggccagccagggctatacagagaaaccctgtcttgaagaaaggaaaaaggaaaggggaaagaggggaaagaggggaaaggggggaaagaggggaacgggggaaaaggggaaaaaggggaaaaaaggaaagaggggaaagaggggaaaggggaaaggaaaggaaaaaaggaaaggaaaaaggaaaggaaaggaaaaaggaaaggaaaaaaggaaaaaggaaaggaaaaggggaaggaaaaggggaaggaaaaagggaaggaaagggggaaggaaaagggaaggaaaaagggaaaaaagaaggaaaagggggaaaaaggaaaagaggaaaacaaggaaaaaaggaaaaggaaaaggggaaaggaagagacagaggggaaaggaaaaaggggaaaaagggaaagggggggaaagggaaaaagggggaagagaaaaagggggaaaggaaagggggagaagggaaaaagctttctggtcatgtctccaactgctgacccctcgtataccgaaggcaggcaggcttccctagggatacttcgggaattcagagcatatttttaccaaacatgtaaataaagcatgattattttcagatatgtagttggagttaacagatccatatataaggtcattttataactttgagggttctacagaaatattttacttgaaataatattcctctatgatttggagagtttttgaaaagttgaataataacacttacctccaacatcctgggtactttctgtgtaccaggcactgtgtaaggtgtttcctgtaagggatgtcacttttctatcataactttataaaatacgggcattctcatcaacatcagtacttgccaaaggagaagctgaggcagaaagtgtcttaagatcatctagaagtactttaatttaatgtgnnnnnnnnnnnnnnnnnnnncctacaaaactcataaactggggcctgtggctgatttcttcctgtacataattgcagggtggagaggggacatggaaactataagcttttataacttgttgtaaaaatcctgttttcatttatcaatgaagtagcatttcaaagcagctctgctaaagttcctgttgaaaatcaaatgcacatacgtaataggatctcttttaaaaccatgagtggctgttcataatgaccattttcattaagtatcctcattctctcctctgaacactgtgaattataaagcctgtgtgaattttcccattgtcactttgctgacatttatggttttagaagatttctctcttctttgtgctttactaagtgtttttagtctatcaaacttattctagaattttcctgtctctggagcactgtaaagtaacagccgcatgaacctaattctaaagtagcagcagatgcagaggacctgggaaaatgacatagtaaacactgttcagatacccaaaagcaacaaccaagcatgcatgtctccataaactaggagcaaccaagcatgcatgtctccataaactaggagcaaccaaccaagcatgcatgtcttcataaactaggagcatacctttggctgtttcttacactcctaagaaaggtgacctgtatgcagctaagtcagtattagatggccagccaggctcagagcaatcacggaaggagccccatggcaccatggcaccatggcaccatggcagtgtgcacacaagtagagtacagaacaggcctgagtgctataagaattcccaggactgagtcatctggaaactctggttagagtaagtatgtcctaaactggatcttataaggtggggagagagaattcaataagtaatagatgttgtagagcaaggaagcagtgcgagcagagatcataggaggagcacacacagtctgactgaaacagaggtcacaggaggagcacacacagtctggctgaagcagaggtgacaggaggagcacacacagtctggctgagcagaggtcacaggaggagcacacacagtctggctgagcagaggtcacaggaggagcacacacagtctggctgaagcagaggtcacaggaggagcacacacagtctggctgaaaccgaggtcacaggaggagcacacacagtctggctgaagcagaggtcacaggaggagcacacacagtctggctgagcagaggtgacaggaggagcacacacagtctggctgagcagaggtcacaggaggagcacacacagtctggctgagcagaggtgacaggaggaacacacacagtctgcctgaagcaaaggtgataggaggagcacacacagtctggctgaagcagaggtgacaggaggagcacacacagtctggctgagcagaggtcacaggaggagcacacacagtctggctgagcagaggtcacaggaggagcacacacagtctggctgaagcagaggtcacaggaggagcacacacagtctggctgaaaccgaggtcacaggaggagcacacacagtctggctgaagcagaggtcacaggaggagcacacacagtctggctgagcagaggtgacaggaggagcacacacagtctggctgagcagaggtcacaggaggagcacacacagtctggctgagcagaggtcacaggaggagcacacacagtctggctgagcagaggtcacaggaggagcacacacagtctggctgagcagaggtgacaggaggaacacacacagtctgcctgaagcaaaggtgataggaggagcacacacagtctggctgaagcagaggtcacaggaggagcacacacacagtctggctgaagcagaggtgacaggaggagcacacacagtctgcctgaagcagaggtcacaggaggagcgcacagtctggctgaagcagaggtcacaggaggagcacacacagtctggctgagcagaggtgacaggaggagcacacacagtctggctgagcagaggtgacaggaggacacacagtctggctgaagcagaggtcacaggaggagtgcacacagtctggctgagcagaggtgacaggaggagcacacacagtctggctgaaacagagtaggtggggtgggagatgaggaaagggtgaattgagaatgagtgattgagcacatgctgctctgagagggtcacacttaagcagacggctgggattaggaagggtgtgagtgtgaggcgactgcagtttacagccaaggtgacacaagtctgaaggaaccgtgcaagagagacaggactacagagttgtcatttacccttgctgaatgtcatcgacctgcttttttacctacttggctttaggttttggtttgcacttgctattagctcagaagttggctttgtgcggtctctgtggaattggcacgtgtcacagtgtcgctttatgaattctctgttcaaagcattaggaaggcatgaaacaagcaactactgctttgactttgggcaacttagtgtttttcagtcttttgtttgaggttattattgaatggtatttgcagttttattttgtgtttaacaaagttgtaacagattatcttttaaaacagtatttagtggctagttaaaatttatcttttgtaaaaagcaaaattaaatatgaagcaaaattaaatatgaccttataaaaatttaacaaccgaaaccaaacaagagtagatcacgttgttaaagtgaagaaaacattcttcagaaaggaaaccaactgcctggcagttgtggagacacctttaatccagcacttcagaagcagaggcaggaggatctctgtgagttggaggccagccagggctatacagagaaaccctgtcttgaagaaaggaaaaaggaaagggaaaggggaaagaggagaaaggggaaagggaggaaagaggggaaaggggggaaagaggggaaagggggaaagaggggaaagaggggaaagggggaaagaggggaaaggggaaaggaaaggaaaaaaggaaaggaaaaaggaaaagaaaggaaaaaagttaaaaggaaaggaaaaaaggaaaaaggaaaggaaaaggggaaggaaaaagggaaggaaaaggggaaggaaaaaggtgttaggagcgggtgtggcggcagtcccaaaggcgccagggactgcagctaagtcatatgacttgcacctgacttcctcatataagacacaaacatcttgagtgctgcgcaggtgcaccaggataccggtgaatccagtttgatggagatatgcccctgctgccctgattagctgaagctgcgtgcctggtgaggtggcgtggcctgctgtgcgtggatgggaactgagagtataaaagagtgagaggcccagggttcgggggagatataaaaacaagggagatataaaaacaagggagatataaacaagggaaatatagagaaagaagaaacaggactgaataaacgtgtgcagaaggatcctgtagcagcgtcgttcttcctggccagttgggcgcgcgcaagaagtgatgccgaaacccgggaaaagaaacatcttcaggcaagagcgaagaccccctgctacagggaggattcagaactgcatcacggggaaggagtggttaataaaagttcccgtaaaacagactgttgagaaggatccggcgtggattcagaactcttcagctggggaacggtactgatgaagagaaagaaagatgaagactgaataaactgctgttagaaggactggtggtcgcgtcgttcttgctggtcgagagcgggcgcgacaattggtggcccgtatggggaaccgactccccagccgagttcagaactttcagcagtcagtggttgctgggcaggggtaagttcacgnnnnnnnnnnnnnnnnnnnnttaaagggatacagggaaaaccagctcatttgcaaagcaaaatgcacattttgtagttgtctgggctgggatagggaccgcagagttggtaagtgaaaccatcaaacattatgctctggaagtgctgaaggccagaagcacgaggtgaatcagcgaaggaaaagcatggcggagtgagagcagatgtgtcgcactggtggcatgttgcactggcttcaggttgcagatgtgtcgcactggtgacatgttgcactggcttcaggttgcagatgtgtcgcactggtggcatgttgcagtggcttcaggttgccagatgtgtcgcactggtggcatgttgcagtggcttcaggttgcagatgtgtcgcactggtgacatgttgcagtggcttcaggttgcagatgtgtcgcactggtggcatgttgcagtggcttcaggttgcagatgtgtcgcactggtggcatgttgcactggcttcaggttgcagatgtgtcgcactggtggcatgttgcagtggcttcaggttgcagatgtgtcgcactggtgacatgttgcagtggcttcaggttgcagatgtgtcgcactggtggcatgttgcagtggcttcaggttgcagatgtgtcgcactggtggcatgttgcagtggcttcaggttgcagagcagaagtctccagtgattatgaagccagctgaagccttgtttcaggagaatgcgctcagatataagaatttgttcaacataacttggcttgctgaattgcctgaggacattatgaatattgactattgattttgttctagataaaagtacaaggaacagccagactgctgaacttggctgttcagtgttcctccaagggtcattgagactccttagagatagccattataatgtttaatttcttggaatatatttcaaagaaaactctacttagcatcttataatatccaggctaatttaaaaaaaaatccaaagctgtatccaatagctactgctgttaagactgaaaaaatgtatgcctggataactaaaatgtaagccccagttgaagcagtacacacccataatccaagttttggggggaggtcaaagcagcagttcaaagccaacatgggatgcatagtaaaaccatgtctcaaaaagcctctgactagtggtagagctcttgcaaagcacatgtaaggccnnnnnnnnnnnnnnnnnnnnctgaaaaaatgtatgcctggataactaaaatgtaagccccagttgaagcagtacacacccataatccaagttttgggggaggtcaaagcagcagttcaaagccaacatgggatgcatagtaaaaccatgtctcaaaaagcctctgactagtggtagagctcttgcaaagcacatgtaaggccctatgtttgaccccctctgaaaaagaaggaaagaagaaaggagagagtcagacagagcaaatgaccaatctaactccaccaatagggaggctaaggcaggaggatcccttaagcacaaaaatttgagaccatcctggtcttaactagcagacagacaaataaaaacaaaacttgttcctggcccttcactgaagagtgtgttcaatcaacttggctctgagaaaaagacaaaattctgtttcgactatccacggtcctcactcagagtgatacagaagggaacccgcatagatattctgtcttctagcataatattcaattaattgaatgcaatattcaacacactattgtgaataaactatttttttccaagtgtaggcttactatgaattcttaaggtacatttacagtatgtcaggataagccatgcttattggatagattgggtatattaaatgcactttccagttaatgatagttcactttacaggtcagagaccatctgtatataaacaaagtggattttataaaacttttcatttcccatatcttacattaccagcctgaacacaccagcatatctttaaacatttgttatagaaagaattcataactaagctttcagctcaagagtcaaatcatattgcagaaaacaattttgccctacatatatgcaggggacacacacacacagtgtcctacatacatgcaggggacattaatacacaatgtcctacacacatgcagaggacatacacacacagtgtcctacatacatgcaggggacattaatacacaatgtcctacacacatgcaggggacatacacacacagtgtcctacatgcatgcatggtggttacacaccacgtggagtattacagagaacaatcactgagaaccttccaaacagacatggaggcctgccatatcaaaagaataggccagatactattcattggggnnnnnnnnnnnnnnnnnnnntttttctgataacaacagcagttaatcctgtaaaacatttgaaaactttttatcatctgctacatagtgtctgtcatctcttctgacctgtataacatcactgtaacgcttctgagggaggtgacagactcggccactgagtaccactccagaccctgagcagaaattgctgcactggagaagggtcgagaagacttggagcatagcccaggtcaaaggccttcctcgggagctccctacgagaaccatttcggaaacacttctcgtaaagcatcctgtcagcccagcgaggagtttcaagcagatgatgactagagattagtggctgcaatctaggtgatttcctagggaaagtggccttgagtctttcagtagctgaggggtgagagacacagaggcggagtgatctggatgtgagaaggggaccttggggtttggtgggaagaacggggcctagaagctgtggttttctagtgcataggcacagtcacctgtgaccttgagaaaggaaatcacagacacctgctgccctgcagccccgctccccacaggccgcaggcagctgtttgaagatgagtggggggtgagaaggtagttatgagtatctccagtgagggacaaggataggccgtctgcaagctccctcggtatcctgatcttaactcttgtttccttctactcaaggaaaaaaaaatcattataatcaatatttagggtgttctcatttgagaacctacagaaaacaaaacttaaaataagtattgctcaatactcctgccttctccagggccttcccattctctccaattttctatcccagtactaagagccagttcgttccgacaaatatacacttggaaattgttaggcttgtgtagtttcctggtacccattgtactctacgatataacctctcatatttacttcttgaccagaagcaaggctccgctctctgacatttttgtaatgaccactactgttgctttgcttatcataagcaactttacctcccataacaattatttgagttaactacattttttataatagcttcatttttgatatgcttcccattgcataaaatttagcctcttatacatgtatgtgtgtgcacatgtgtacatgtgtatgcttatgtatgtgcgctcgcgtgtgtgtgtgtgtgtgtgtgtgtgtgtgtgtgtgtatctgagttgagctgctcacctcactgcaactaggaagcaaagagattagaaaagagaccagtatcccataattgctttcgaggggaaaccgccattatgtttcccttgttgaagccccatgcccagtagtgttgcagactggggctgcctttgcattcatgctccaggtcctttccacagaatgcatctgatgattttaacattcgccattaggtttcaaagcactgatttggagggacacagaaattcgtaggatagctttagtcattgagtagaaataacccttcacatataaagtgttttattttttgaaccacaaagtaaaattcattagctgccgttttcatttgcttgttagagaattcccaaaatggtaaactcttaagggatctctcattgttaattattattaagggcttttctgctgtaaaaattgcacccaacaaacggaagattttacaacttatagatgactacaaataaggccaaatcattatcctgtatgttaatggttccaattaacttttaagtctctggatgttgttctcttggaatagttatttgaaacatgtactgaaattctgaagttgaaagataagggtaccagatacggttacacagacttcttattttaaagtcatacaaaccagatgttttgcgtgttctttaccttggaactcttcttgatccctagttttatattcttcgatttactcatggttgttgttttatctgactataatttaacccaaatgcttccaaacacttcttaggcagagtctagttttgtatgtcccagcgttataaagcacagcagcaacagcgttcgtcccgtgtgagacaacatgctttgtacaggtatttgtgttcgtgaatcccgattccttatctattattacctagataagattagctagaagtaacagaacctggattactttttacaaatattctcagggctctctcatgtggagtattcatctaaatgattagaagaagataggttctgccatactagtctaggaactgggtatgtgtttgttcattcttcttatgagtgaacgtagaatccagtttcactatgtggaaagggctatacagcacttaataatgggtttctgtacaattcaagagttattgtgaaattttcttttcatatattttatctccttatttctgttttaataccaaagacacaatattccctaattagtactaggaacagctttctcaaagtctatttaattttaagatgaatactaaaaagtagtttaattttcatcttttatttcttaatgggtaataaactgtaagtaaccattataagtacctttacatgtttggctgaatgcccacatgcccatacataggacagaggaccatctgagagtggccagtacaaatagcaggattgggaaagttcacatttttgataaccatactagaaaggcataggtggagtgattagcactgccgtagcttggctgcgaggccaattcagctgtaaagttgtctcttaacttattctgacaagacgtaaaagtagtcctggaagggccaagatgagctcacattaaagggatacaggaaaaaccagctcatttgcaaagcaaaatgcacattttgtagttgtctgggctgggatagggaccgcagagttggtaagtgaaaccatcagacattatgctctggaagtgctgaaggccagaagcacgaggtgaatcagcgaaggaaaagcatggcggagtgagagcagatgtgtcgcactggtggcatgttgcactggcttcaggttgcagatgtgtcacactggtggcatgttgcactggcttcaggttgcagatgtgtcgcactggtggcatgttgcactggcttcaggttgcagatgtgtcgcactggtgacatgttgcactggcttcaggttgcagatgtgttgcactggtgacatgttgcactggcttcaggttgcagatgtgtcgcactggtgacatgttgcactggcttcaggttgcagatgtgttgcactggtgacatgttgcactggcttcaggttgcagagcagaagtccagtgattatgaagccagctgaagccctgtttcaggagaatgcgctcagatataagaatttgttcaacataacttggcttgctgaattgcctgaggacattatgaatattgactattgattttgttctagataaaagtacaaggaacagccagactgctgaacttggctgttcagtgttcctccaagggtcattgagactccttagagatagccataataatgtttaatttcttggaatatatttcaaagaaaactctacttagcatcttataatatccaggctaattttaaaaaaatccaaagctgtatccaatagctactgctgttaagactgaaaaaatgtatgcctggataactaaaatgtaagccccagttgaagcagtacacacccataatccaagttttgggggaggtcaannnnnnnnnnnnnnnnnnnnaaatcatattgcagaaaacaattttgccctacatatatgcaggggacacacacacacagtgtcctacatacatgcaggggacattaatacacaatgtcctacacacatgcagaggacatacacacacagtgtcctacatacatgcaggggacattaatacacaatgtcctacacacatgcaggggacatacacacacagtgtcctacatgcatgcatggtggttacacaccacgtggagtattacagagaacaatcactgagaaccttccaaacagacatggaggcctgccatatcaaaagaataggccagatactattcattggggataaacctcttattgggattttgcctactgttgtttggttgattgatttttattgttgttgtttgtccagttttgcttgaacacttagacagtaaaatcttgtagctagaaaggtcatgatttatttataatttactgccaagttcaaccgaagaatacgctgtttcagatgagaagttgctagcattttagatgcaagcccatccttgcataccacagcagcagcttctcccgagccacgtcctttctgccatggctttccagcctgagaagagagtctagccaaagatcaggctccatggctggaacgtagactgttgacttggcaggcacttcattgtctcgctgggtaacaagtctgtgcctaaatggcaataataccatggtgacatgctccaggaactgtcccattgcttcagagcatgggctctcagccttcctaatgctgtggtcctgaatacagttccttcctcatgttgtggtgacccaaccataaaactgtttcattactacttcataatactataatgtgctgcattggatactaagaaagcatccactgatcattggggtaccattagaggtatagtgggcaatctgaagccaggcctgtcttatggaaccctgtctctcaagagactctttcatcagtggatgcttatgaaaatttagtgaaagctaaatatccattactaagatatctatcatcaggcattgatatattaatgtcagttattgatatattaatgctatgtgttaatatagcatacatattgtcagttcgtgaactctaatcgagggtggaacaccatgcacattaggatttaaatagtcagtgaaagaacccatcagcctagttacaaagacctacagcggtgtgtttccatgatacagttatgtaacatggacattttgaagccttgtttgggaaaaatggtaaagtaagcatatttatacacatgaatggcatgtgcatgcacgccgctgtgccccactctctacagtgcaccgggtctgggtggactgagctcccccagatgctagaaagggcttttaaaccctcagccaggcagcagcaccagttttgacttgtgcttttttttttctttaaacaaaaacaaatcaaatataaggggtagtgtcataaaacaaaggagagnnnnnnnnnnnnnnnnnnnnaaacagacatggaggcctgccatatcaaaagaataggccagatactattcattggggataaacctcttattgggattttgcctactgttgtttggttgattggtttttattgttgttgtttgtccagttttgcttgaacacttagacagtaaaatcttgtagctagaaaggtcatgatttatttataatttactgccaagttcaaccaaagaatacgttgtttcagatgagaagttgctagcattttagatgcaagcccatccttgcataccacatccttgcataccgctcagcagcttctcctgagccacgtcctttctgccatggctttccagcctgagaagagagtctagccaaagatcaggctccgtggctggaatgtagactgttgacttggcaggcacttcattgcctcgctgggtaacaagtctgtgcctaaatggcaataataccatggtgacatgctccaggaactgtcccattgcttcagagcatgggctctcagccttcctaatgctgtagtcctgaatacagttccttcctcatgttgtggtgacccaaccataaaactgtttcattactacttcataatactataatgtgctgcattggatactaagaaagcatccactgatcattgggtatataccattgatcattgggtatataccattagaggtatagtgggcaatctgaagccaggcctgtcttatggaaccctgtctctcaaggagactctttcatcagtggatgcttatgaaaatttagtgaaagctaaatatccattactaagatatctatcatcaggcattgatatattaatgtcagttattgatatattaatgctatgtgttaatatagcatacatattgtcagttcgtgaactctaatcgagggtggaacaccatgcacattaggatttaaatagtcagtgaaagaacccatcagcctagttacaaagacctacagcggtgtgtttccatgatacagttttgtaacatggacattttgaagccttgtttgggaaaaatggtaaagtaagcatatttatacacatgaatggcatgtgcatgcacgccgctgtgccccactctctacagtgcaccgggtctgggtggactgagctcccccagatgctagaaagggcttttaaaccctcagccaggcagcagcaccagttttgacttgtgctttttttttttctttaaacaaaaacaaatcaaatataaggggtagtgtcataaaacaaaggagaggattgtcttaggacttctcctcttagttcctagctaacaaagatcagcctttacagggaagtcaggagatttaggctgttggtataaaaatatcaaaagctgtttttcaagaaaagtttctctcaaaaagagacttgagcagtcaactcgggatggtaacggaattaaatggccaggttgtcccattgagcctttcctttttgtaatgctgataacctgcatttttctctttcagatgcatctgcttagcacacaggacaggacctaaaggagttttataaagtgcttaagggaatggtgtgttatgggttttgttttttggttttttttttttcttggttttttttttttttaatttgcttcacactttcaaactttaacatctggtattttgaagctaatcttggtgtgttgaatgttcttagccatttctcaatcccacagtcttttatcttgcttctcctgctgtgttcccaccacccctgatcctattagcaacccctgagacagcctcagacttgccaaagtcctgctttggtttcagctgctcttctgcaagaggaagtgagtgttggggctttttctgtggcacagttgtgataaagctgtggtggtcttatctctctcttaggtagtggctctttatgactacacagccagccgatcagatgaactaaccatccatcgtggagacattatccgagtgtatttcaaagataatgaagactggtggtacggcagcgtaagaaaggggcaggaagggttctttccagctaatcatgtggccagtgaaagtaagtgcacgcagtcttcctggtacactatgatagaacggagcccaagatgtgatcattcactactctttaatgcatgtattgtctatatgaccattgcttatgtttagcatggaatatttttcatcctcatgatgggaaaactgaaaaggcgatgcactagtatgccagagagctactcagctctgagattggagtgcctgctgactgcccttgtcatgcccggggagcctgtggcagctgcccagctctgctcccgccacaggcactgttggttgattagcagcgtaggaacttcagctccctcagctcccactctacctgtgtccacctcagctctggccagggtctccgtagcaacagaagtgagcggggcttgttccttctcaagttcattaaatgagaagaagagcacaaacacttcccagtgaggcagacatggcttttgaaagctgaaactaggctaccgcagggagcccaaggtggactgtcctggaggaggggcacccagcagggctgcttcttcagaatgcatgctaattacctgtcctaattgccgctgctggcctggtggcatgctgggagacctgcagcccacgcgcagcttatattgacctaggggacttcttcgcctttgaaataaggactttgagcgacatcagctacgctttcgtacacagacactgatatgctggttctgattgccttttgtttctgcaaacaattatttattcctaatcattgattttcatgctaatctttgaagccccgtttaaaacatattatgactgaataaatggactattaattcctggcttaagttccagaatttgagagtaaaaggatattttttttaaattaaaaggaggaagaagaatgtcttccttgactgtcatgctaggctccatctagatgaagtgacttccctttaatgtcacccccctccttactgcccactggtccttcccaaagctgtaggctggtgtctgtcttgctgcagctccctcctcctcaaccaactcctccccttaaaagtgccaaggagtgcagaaagtacccactttctctctcctgcaacacaatttttaattttctatttgtccctggtttgtgtattctgtaaggaactaatagcttgtaaactctgctcaagatgcgttctttggctaaagaaaatgcacactggagaaagctttaggcagggtgaaaggaagttgtaggaaaggtaactcccaaatagacttaagaccgctttaaagtcctctcccacttgtaacttcctgacaggcattaacatccaaatgtccctcagcagctcagttcctgagccagctctggttcaggccacagctgggctgcactcacaagagctgctgtgtgcactcttgctggatggagggtgtctgactgaccaggagttccagcctgttcccatgcataccaggaaaagcattacagataggcttttacttgccagtataaaaagatcacgcctgcagaaagaaagccataggcttgccttcttcagaggccacagacatttaatgtgcaaagagttaaaacgtaagaaaccttattttccttatcgagtagccctcccacaggggtggttgatggcagtgtacagaggtggctccttaagtcattgccattctgcagtaaccgtctctcactgtgtcctacaagagtcagcgctgtctgcactcgccactgtcgtgagagcctcggaatcctggagagctcagtagccgagtctcacaaggcacaggttctctcctctccttttatcctacttgttccctgaatttaacagaaggtcaactgcattttagcagtaaaaggggaaatgactctcagcaacatagtccattctaacaatagtgggagggattgtccttgatctttatctgaatccacgtatgcaaggcaaatgtaagagagttgatatatgaacagaatctgttcccaatgtttaactagagcagcaaaataaaagaagaccgcagtctcttgctacacagactgattgtgttgtgagccactggaaagaaaatgctgtccgtttctcttaatcacagtcaacacccttttctctatgatagacagaaacctcagagtaatgccaacagatacccacatgcactaatatctcagaatcttaattgtacaatttcaatttctcaattccaaattattctttattaaaatagattttcattttagcccttgaagattcccatgtggctttttacgcacgtgcacttcatgtagattcaatagattattaggttatcatcttaggttaaaggggttttaagtttaaaccttagatataatcctaaatccatgtttattcattctctgttccccagttacccttccaggcacagtcccacatgttcctcagagcctgatgcaccttcctccgttcaggacttcaatcccagatcactttctctgttattagctgcctttcagaggccaaagctcctcaacctttgcgtcatatccccgaagatcatcggaaaacacagatatttcattcataacagtagcaaaattacacttatgaagtagtaacataataacttcagagctgcggtcaccacttcataagcaactgtattaaagggttacagcattagggaggttgagtctctgctctaggcagacaagagttccttgagaagagcgatagtgtcgctccctaacataaccttgcctacattaggttcctggtaactgtgtactaagagcacctaaggtaagtgtccctgtgacagcacagtaggggattgatgccttctgcgggtctaaaatcctcacagttaactctccagtcatgaccaatgggtcagactacaacccactttaacagtaagtgccatatcacttgctgttacatcaaagaagtgaatatcagtgtctttacacttctgtgtctaccctctgttgtagtttgttcttgggtcgatttaaataactgaattccttctttaattccagcactgtatcgagactcccctccgaaggtaaaggagcgctcccctcctttaactcccaaggagaaaactaaaccagaaaagcctctggcttctcaaaaggtatcaatcaagaatgggtgggtgctgtgtgggcggtgctttgatttctcagtctgtataatctttatttttcatgcttatgatcttccattgtttacattgttacttcttttggtctgggcaccaatgagaaatacataaagtgaacattacagccatttccagataaggaaaccaaggaggctcagagaggataaagtcctaacccccaacccacagcctgtgagggcacagcccacaagtggagctgtgactgtaggtgctgctgtccaccccacagttgcatctagaaggtacccgctgatgccagaggtcacaagagtccatagaactcttagctctatctcgctaaggcagtttctttcacctgatattaactgaagacattttcaggccttatcagccagagaaatgccttttaaagcctgtgaaatcagaaacagtggtcagtatctttcttctgagagtaggaattcatatgagtattgcttattagacctgttctattgtgtgatgttagctcttcccttaggtcaagaagcccatcatttcttgactgtgaagtagtatgtgtgtgagtgtgtgtgcacatatataatatatatatatatgatatataaacaagtatatatcgtgtgtgtatcattgcaagtcatagtaaaaggttttgggcaactgagccctggaccagtgtgtgctcagcatgtagttaccttgagtgctggaccagcatggagttccttagttcttccatactgaacagtcctttagccccagatgaagatggtagaacaagacacttgcctgtgtgggcttaacgagctgctggtaagccacctatgagcttcagcaaactcttggaactagattggaggtgatatgtattatattcccaatgcgttggcaacacatgggaatagagcctttcgttgtgtccggggaaggcgaggaatagttgcccgggagaaatgcatggcctgaagcttaaaaggtagtgagtgctacatgaagttaggaccaaacactcccaaagaggggacttgaataaggtgaggtacattatgattgtgtctggggaatcaaggctcaaagggaaaacgttagagaggaaatgcagacatggggccacaagcggcctcgtgacctctgctaccatgcttagattttatcctccagacaagggatgccctggaggaggtgacctggaaaaggatatgaaaggatgcccatgttaaaaagataattatagtgctggcgcaggggtaagtagaggcaaagacagagggatgcacggaaatgaaatacataagactgaactagaggggtgggagataagacaggcctttaattcagtttgctgatccagtgaattggtgacattagaacctaggataatgctgaggtcgctgggttactatgtaagtgagcaggggacaagaactacaaaatggatgagctaggaagatctgggaacatagaggagaggcagagtgggcagttagagctgattagctcagtttgaatttgctactgacatcatcagtgttcccaggtagaaatactcacaagcatccagaagtgcagaactgcgttgaagaggaagcacagctccatgaagaggaattggatagtcagggcactgactggaaagcgcagtctgtgctcagggctgtggctcgagtaaggctgggaagacgcaagggaaggcaaagacagaagccagctgacactaatactaagggagtcaaagactggaaacaccagacaaaggacatgcccacagctaaggggaagcaaagaacatatctaggcacgtccaagtgtttgacattgtgacactaccttgctgtctacaaagttcctgctgaaaaccatgcagtcaggttacaaaaaggaaacaaaatcacaaacacacaaacctctaatgttttatttaagtaagcatacagtcctgtattagaccatcctcatagctgtccatgggcatgtgggctatgggttgagagtgggacacttctgccagccaaacagatggagtcattggttctcctgagcatttggtagttgggaggactctgatagggtttcactgggatcaatgtagcaatcaagagtaagccactctcagagtgtcacttcagactagagggagcagtgacactcagagtgtcacttcagactagagggagcaagtgacactctgagtgtcacttcagactagagggagcggtgactctcaaagtgtcacttcagactagagggagcagtgactggagggagcagttgctggagggaaaccaactatcaggttatttttcaagtattgaatagacacagactgataagctgtggaggcaaatccaggacatgatagattatgagagatgcagaagggctattggaatatagaaaaacaaactgatagctgagtgctggcataggccagggcttctcagctgatagtgattctatctcccatttgacaatgtctggagattttgttgttacatacatcagctctaaggaaggggcaggatgctcctggctcctcaacagtagttagagctcatcacttatccttctgcaatacaagggagaactgactaacaaaatatgccaacactcaagcttagagcagcatccctttcaaatggaaggggaagaaactaaagtcaaagtctagaaataaagagtgagagatttcctgcatggttcaccagttgggagaaaacaagaggagctagcagacttggaaagccaggttccccacaaggcctcaggaagataaccattttgctattcaacattggacttaggaaattaagcaaatgcttgtcttagtttggggctgttataacaaatatgcagtagctcataatggcttaaataacaaataagtctcacagtacgaaaagctcaaggtcaaggtgctggttagatgtggtgtcttctgttgaaggctgactttctggtttgtagccccattgcaactgcatggggcagaggagacagaagaatctacctgtgcctgttttgaaaagtacaaatcccatttcttttttttttttatttgtttgtttatttggtttttcgagacagggtttctctgtgtagccctggctgtcctggaactcactttgtagaccaggctggcctcgaactcagaaatccgcctgcctctgcctcccgagtgctgggattaaaggagtgcgccaccacaccccgctacaaatcccatttctaaggctctatcctcatcacctcattacctccaagaacaccatagtgaggcttagagactctgcatgggaaatctgaaaagatatgcatcaccaactcaccaatgttccatacaaattccctagataaattaatgcagtgaaaatctgttagcatgaggtgtactgaggcttttggtttagtatgaactgcagtgaaagatgacgccttactggtgtccccaacttgccaccatactgatcattgaagctaaggccatggagctcccaactcagtgtatccttctccgtctattctatgtcagtcagatgctaggcgttatctataactcctgtgaaactgtcctcttcctgatgtgccggtgttcctgagggaccacttaggaaaactctcactgcctgtacccctgttccttagatgcactcggtgcatcatggtcctatcttagactgtagttgacgttccgggtttgatcctgctgcaggggtaccttcacattcacctcccaggagacattcatgctacatcttcagatggtcaccttagcccaaaatctgtgccaggctcatctcgctaacatccaaaccctaattttaatatagcccaaggaaacatacagtatgcaaattaaaattttaaaaataaaataatcaggctgagcatgtagctttcagttgtagaacacttgcctagcatgcacagagccttgaattgaatccctgcagaagcaaagatgaccaacaacactgacacatagaacaagtgatgcatggtgtaaggatccatttgggacaggaactaggatatccccatagagacaggagtagagatcagactgtaaagttaaggtgatctgtcatatatgaatccatgtgtagactatagccctacaagggatcaggggtataattcagtggtagagtatttacctagctatataagacactagtttaatctccagctttttaaaaaattatgtatgtgtatatgtgtgtatgtatgtgtatgtgtgtgtgtgnnnnnnnnnnnnnnnnnnnnnnnnnnnnnnnnnnnnnnnnnnnnnnnnnnnnnnnnnnnnnnnnnnnnnnnnnnnnnnnnnnnnnnnnnnnnnnnnnnnnnnnnnnnnnnnnnnnnnnnnnnnnnnnnnnnnnnnnnnnnnnnnnnnnnnnnnnnnnnnnnnnnnnnnnnnnnnnnnnnnnnnnnnnnnnnnnnnnnnnnnnnnnnnnnnnnnnnnnnnnnnnnnnnnnnnnnnnnnnnnnnnnnnnnnnnnnnnnnnnnnnnnnnnnnnnnnnnnnnnnnnnnnnnnnnnnnnnnnnnnnnnnnnnnnnnnnnnnnnnnnnnnnnnnnnnnnnnnnnnnnnnnnnnnnnnnnnnnnnnnnnnnnnnnnnnnnnnnnnnnnnnnnnnnnnnnnnnnnnnnnnnnnnnnnnnnnnnnnnnnnnnnnnnnnnnnnnnnnnnnnnnnnnnnnnnnnnnnnnnnnnnnnnnnnnnnnnnnnnnnnnnnnnnnnnnnnnnnnnnnnnnnnnnnnnnnnnnnnnnnnnnnnnnnnnnnnnnnnnnnnnnnnnnnnnnnnnnnnnnnnnnnnnnnnnnnnnnnnnnnnnnnnnnnnnnnnnnnnnnnnnnnnnnnnnnnnnnnnnnnnnnnnnnnnnnnnnnnnnnnnnnnnnnnnnnnnnnnnnnnnnnnnnnnnnnnnnnnnnnnnnnnnnnnnnnnnnnnnnnnnnnnnnnnnnnnnnnnnnnnnnnnnnnnnnnnnnnnnnnnnnnnnnnnnnnnnnnnnnnnnnnnnnnnnnnnnnnnnnnnnnnnnnnnnnnnnnnnnnnnnnnnnnnnnnnnnnnnnnnnnnnnnnnnnnnnnnnnnnnnnnnnnnnnnnnnnnnnnnnnnnnnnnnnnnnnnnnnnnnnnnnnnnnnnnnnnnnnnnnnnnnnnnnnnnnnnnnnnnnnnnnnnnnnnnnnnnnnnnnnnnnnnnnnnnnnnnnnnnnnnnnnnnnnnnnnnnnnnnnnnnnnnnnnnnnnnnnnnnnnnnnnnnnnnnnnnnnnnnnnnnnnnnnnnnnnnnnnnnnnnnnnnnnnnnnnnnnnnnnnnnnnnnnnnnnnnnnnnnnnnnnnnnnnnnnnnnaccccccaccccccatcccctgctcctgcccccggtcttcccagcagcatatggagatggcagtggatggcagtggccggcagcagcacttgttgccaatgtggagatgggcactctcccccaggctcatcaggacgtagtacaaaatgtgctgccaatctgcatccaacacagagagaaggcaggtgctatccagagtaaagaaacttggaagctttgaaaaaatgattctgacaacttgctcttatttttcacttgtcctttagacatttttaattagttacactataaaagtaatatgtccccattcttataaaataaaacaggattagaaataagtcttgtacacctgcaatcctgttgattctaaaattgtcgtggtctcctaaagtgttctcatgacttcattcatgttgatttatcttagtgacattagaattatacttagtgttgtttttctttaactagtaagtcttgggcatattttttattaatacagaaaatatttagacccttagaattcctaaaattcccagaatattcttagttcataaaacgctgtgctgtgctgtgctgtgctgtgctgtgctgtgctgtgctgtgctgtgctgtgctgtgctgtgctgtgctgtgctgtgttgatttctgtcagtgctcggctttctctctcttttaaattttaaaaagcagtactcaactttgaaaaggaccatttatctcctctaagtggttcagcactgccagtacacatggcttttgttatagctgccaaagttagtgaagcttacagacagaaatactggagcacatctgaaggtgcagcacagtctctggtgcctgggatgttgcttgtaaaactcgttagacacaaaataatcattagccttgctattccaaaataattctaaagtacacatggtggcttatcttcctgtaaaagaaatgtggacgcagtttcagtgttttcctggcttgtagagtcagtaagagcaatctggcttaattacaaatggccagtttctaaaccagagtgcagagtctgtattatatagatattatatgttatatataataaggtatatcttatattcagtgacatatgttgttgttgttttgtatagtccagagtaagaacagagaaccacaatgcatcagataattccatggtagttactctacacacacacatacaccacggacatactcacacacatacaaacacacacacaattctatcaatcagctgatagaaattctatcagcttctcatcaaaacaataggtacataaaaaccatgatgctttcaatttttatttgtatctcttagtctcaagagaagcttataattgtgctatatgatattattttcaaaaatcactttatatagcaaaagaaatgttttggtcctataacagtaaattggaattattattcttaaaccataagaataatatttttttatttttttattttttataatattttatttttatggcaagtacccaacaaagatatttttgcagtaataatttttgatatgatatccaaatacataaaattctggaacagtaaattattgaaaatacagttacaattattacctcctttctcttgctaaagaataatcccattttgcttttgctttagtaattctgagagagaatgtagtggtgtatctttatagaatttactccaaagttacaggaatattttatcttttatcatgaaagagctaactaaaatacaataggaaattcataaacctgggctgaaattttacctcctggtttaagaaataaactatctggttcctgagctctgtgaggaagtaaggtgtttccaggactgctgtttttcttcccgcctctaggacgtaaacaactactgtagcaaagcatactcattccgtaccgcaagagtgtgtgctggtctataaacagcacttccatagagcaaatccacggagccccaatggtgggacagcagaagcagacagagtagagcagtgcctccagcctccatcctccacgtggacacagaggagcacacagcctgcagagagggaggccggtctacacatttacagattacactctctcctgtaataggctggtttgctgctgcttctccttctgcacctgtgcccccacatgagtcggcttgtttacctcagccctcctttctctctgatggatccaggatcctctggcctctacaggatgaggccatgcatactgaggcctgttttcagattatgcaacccagggtagggtcgagacagttgccaggagctctgagataaagagtctatgagacagttcctgagttgtttgaccccaaaagtagacctagaaaacactccctcatgtgtttcttaattccattaattccatttatatttgttttctctttcatcaactcctaaattgagcctgaacttggcatttatcccgttccatttcattgtgctgaacttccattagaagctcaatttatagtataatatagattcctagtgaaaagtcttttttattaaagtgggacacacaaagtatgtttagggcacatatcccaatgactttaccgaagtatagaaagtgataccccgctcttcctctgctgctgtctggggtgcccagggcccgggactctgacaaggcagagtagcacagtatatgtgatgtcttcagaggcaatctaaacatcagtaacaattctttgaaaccctgtcagagatctcaagtgggaagataagatttcaagaactccccaccagtccatctgtcagaaatgtccttagagagtggcaggcatagttatacttagcctcactgtcttcacaagcagcatggcccttccttggaagctctctggcacctgactactgtgtgctcatctgacagcctttctactgaaaagatactcatccccaactctgtaggcatttccagacaataatgcattctcctagggaaatggtgtgcattgtcgggggctgggggctggttgttgttgttgttgttgtttaaactttatgaagggggaactttggtatctggcctaaacccagccaaccctctagcccataagccagcagacctgtgtaataaaatgtctcttaaccctgttgactgctgctcgcttcctgtgcttgaggaattgatgttaattttggcacaagccatagaaaattaactacgcactcacgtcctggttattacttagtagttacagtgatgctagtgctgattttaacagttttgagtagttttggtttttatgaaatgtaaaggggactgaaccttttcttatttaagggtcttttttattcaaatgaatcatgaaataaaatttttctggacatatagaaacaagacactgccttaaacttggcactgagtgagccttctctgtttaccatgttgtttccctgttgtggtaggtgggtctaagtagccagcacctacatgcttcgtatcttaatgcagagaatttctttatagtctgtgtggcctgatttggaaagaattgttccctcataatgggagattaggaaatagctcatgctcaaaagaggaagaagaagacggagtcactcttcagttttcaggaattgaaaaggggagggggatgagtgggggacaagatggctctgctgataaaggcagtttctgccaagcctggctacctaagctcagtctcagggtccacagagtcaaggcagggagccgattcctgcaactttctctgatctccacgcccactctctgtaatacacaccctcacagctgcgtgcacactggcacacacaagtcattgatacgcgttttttaaatggagggttactttggtgtttctaccatctggcttgccgacgatccatttctgtgcttcccaaaccaagtcacttagtccccaggcagtcaggtcacacaagcaccattactgagcataaaccgcacttggagtccgtggattgtctcaccagtttccagccctggagtaaagcacttgtccattttagtcacgtgtgctctgtgtttattcattgttgtggagtgtcaggctctggtggcctgcctcagtggggcacagagtctcatcgtcttgtcgttggctccccttgactcactgccacattccctaacacctcatcaaagaaaacaacaccacaggtctcaggctgccactctagacctccgagttgactctggctcctgctctctgcaagcaaacacgcatccctcaagtcttcatgctggttctctcaagtcttcatgctggctctctgtagttctgtaagcttaccctttcagtggtgatttggggagatcagcatttcctgtgtagaaaactctttgattactttctgcttttattctcctggaagcaaagaaggaatgaggaagggactagaaatagggtacactcttccagggagtgacccaggtggctgtcctccaccaaggctctgccacactgatcacagtaattccattaaattctgcatcaatcaccatattgattctccaatgggacgcatgttgtatcctaactgtaataaataacaccaacaaaagctcaccctagaatctctgatgagactggaaagggttacagagtacttaggacctgtttccctctataccagaggaactaggaagtggaaattggtaaaggaaagttaatttatttacagtttggccaaaacagagaggagaagaatagctagatgcccgtggccatcttacaggatgtagcaagccaggaaacaaaggccagatgtgtgtaaataactgtgagacaagagatcccaggtcgcctctcttgcctctgttgtggctcacaacttcttgttcaagtctgtagatggaaggagaatcttaaagatccccctgagttatttgtttaagagcaaagactaggaaagtgggtatgagaccctctctatcactggcccgatagagttccttgtccctgggaccctttgtatggaggttggcttcagacttggctcctgtgtgctttgtagacgttctgattttgcaagtaaaagggtgatggttggacagccagaggggagtgagcaggtctcactctgttagagtatgtccccccatcagccctttgcataaatgcttcatacacatagcagaaccattaaagccatgtgagacaggatcgggaaatctctcctaatcccaaacaacttcagttaactttttgttttttttttaatgaaactcaaacagcaacttttaaaagccaacattttaatacaaatcccaaagatagagtagtttgtcacatggtatcaattgacacaaagggatttgtcacatgttaacgacttacacaaagagcatgctgtttgcctcttttgttccctaatgaaaatggttctacacaatccgtaacacagtcacctcacacctgagctgtggtcagacattcctggcactgtgtggcagaaacagtgaacagtgtagcggtgcagaatgtgtgtgctgtgggttttagcaccagggctgcatgagactgcagacatgtttatgacgcaggaaggctcaggacacagcacacatgtgtgctaacatacatgtttcacctcagactcagctcccatttgacttttaattaatttttggccattccacaacagaaccttttcttgctcccttttttcaatcttatgtatatatctcctacatttagttacaggactgtgacctacagtttaaaactcggggatctataccattggcaagggtgtgccgggccacgcaaacctagtttttactcagaatgattctttgtatgcatgttggcacttcagacttcaaacaaaatgatagtgaaaattatttgactgtgaagtcagttttagcacactaggcatagccctgcagctgctcctgtgtccttggtgactctgggcctccgtttcctcatctgtagacatcagtgtggtgctgtgccgtgggaccttatgcgttcatgctgagcccagccctagttaacaaaggccaagagaggtgggccacacacattaagaacagagccacccacccctcgttggcaacattcttctcttatatctatgttctaaaagaaaaagaaatcacacaaagtagaaatgagccatttgagagggtaaatgtatcagtgggcggataatagcatgtaaaataaagctatactctctcacaagtctgcttacctggtgctggtgtgctagttacaacgtacactgattgcatataactttacgtctattcctcgcgtttttacaagtgtctattccggtgagttgtttgcatgcccatttctcttttgcaaagctgttttaagtcgttttcttcctgataagtctccacataatcactctatttatcattcatttcctgtgtgagcctcattgcaccctaacctgccaaccatcccagagggtgtgggaagcaggcatctgtaggctcgccctgcccttcctcatcctcgctttgctcatcttcctctcttcatccctcctctccaaatcaagggtggccatgaagaggagacgaagtcacaaaccaactgagaggtgtgtgtggaaaggagggaaggaagggccggctgccatgctccttggcctcgctgatggtggggggggcacttgtgggctgattgcggtccagccgtgggggcttttgtttaagataaaataaaacagctgacagagacaactccttcttccccctcctactgcctccatgagcacttcccatatggctgctgctgctgagaccaaggaatgagtgagtaaaggttttagagtgaagtgtgagtcctaagtaagagttcttacgaatcagggtaaagacaatcacagatctactgactgaaggtttatagcatttgaacatagcccaagccaccttgcatcatgggaaaagaatgaggtataccagtggtggttataaaagaatgaggtataccagtggtggttgcataagaacacgggggcatggacaatatttaatctgttttctatcttttattaaatttggtttggacttgctgcacacactgcattctgattactacctccctcagtctatttaatgtctacagacagaaatctgagggtagcctagcatccccctctgttataagcagggtaccactggcttaacagggagactgcttgtttctctggtcagctgcagaatagatgcagatgatgggaatcagattagggcagcatgtctgcagtgggtttaccgtgctttataagcatatacgtttttgttttgttttgtttttgtttttgtttttgtttttggtaaaatgctggcctttcttggacaaagaggtagaattgatacttaaaccttgtaaagaattgttaaaattcaaacctcccattttattcagtcaatgtgtttggaagctggggaagttctgtgaggattaatgctgagtttggctttgatcctttttgttgcttattgtgctatggggtgaggacaggctagggatttaacagtttgaactattcgtagaattgaaattgactatgagtgtgcatttttcctcagtgtgttttaactgcgtcttatcaactgtactggcaaaggcacaccaattgctggggtcccttgctacagcgcccacctttcacccctgccttgtgtgtctgtgattctcacctcaaatgtttgttttaaagccacttgatagtaaacacatgaccatagtcaagatgagcagtcgtcttaaaactccttataagtactgcttgtcggaaggtacttgctgacaaagcttgctgaggcgcagtctccagaaatgtgattatgaaggagaagtgtagagacaaagtgagcgtcagtgaagagaagatgggaacgcagtggctctcaagcaaggttgaaagaaaagctgtgtccttttctttcatctagtttttcattttgtcttctgaatgactttaatttaaataactgtgtagctgtgtttcacctggaaattattcagtaatttattgccttattttgagtgtcgaatgaatcttttctgtaacatctagttttttcgattcagtctgtttcatggcagtactgggtgggtttataaatttctgtgccacagtaaaccccacttcctcactgaactttgggttggagctgatgctccagactctagaggaagcgtctgtcacttggaatctaagttggtgcctcctccgcaaggacggattcagtccttgtctcaggggtgccactaataaagcaagatttactgagcaaatttgtaaaaggttcacagtgttcaacttcagaatcttgcattcagttccgctcagcctcacttaaaaaccatggatgggctgatgagaccagagaggggagcaatgagggaagacatgtggagcccaagtaacagaccgcagcactgagttaacctcagctctcacgacatctccctttgtttctttgtggattttttgttcttgttgttaatggttttgtttgtttgggaggtctgtttgtttgtttttttgtgccagtctctgagagttgacctgaagggtgcacaccctgcggtacgccagctcctggtttccctaggactgagttaggactcaggtttccctaggactgagtatgttactgggatagacttgcaacctcaagacaggtataaacatcggtgtctgtcttcattccaggctggtagggactctgtgggtgctgaccctgtggtccgctttcctgtttgacttactgtttggttttttctcctccttcacagcagtcgctcagtaagggcagacccctggatcccagactgggcccgcagcctgtggggcagtgagtagcttctccttttggataacttgcaatgataaatagcagtgttttgttttgctgtgtttttttaacgatgatctgtatccctttttcataacacagtgaccagaccacaagttaaatttcatactactgatttttgtgagactttaggaatgtgttagaagccagagaaataatgttatataaagtatcagcacagagcatcaacactaaacatcagaggacttactgtcatctttcatttactttgcctgagtagtgttttgaaataacactgactgagtccaagtgcacggtgaggtagcactaaatgaggaaactctcctctgaggctttccaggaaaacagccagttctccagacgttcccaccagaatgcagaatgcatgtgctcggtgtcaccagcaaagcttaaatgcagcatccatgaacagcacaggcttgtgctagctcctcctgtgtccctcaagtgtgcacacagaccttccctgctgggcttccttctgatatgctgttcaagttaagataaactacatgcccccaaggtttgaagagtaattttccccttcctattagatgatgaggattaccgggtcaaaccatgcagtatgctgcaagacaatattttactccacagatgagagatgtatagtttttaagtagactttaaaagtcacggactcataatctggagataggttataattctttccacacccgctctagttagccgggtgttgatgctgtcgggccacactgtcactgcctaaattaagacctcagtctccaggccctcaccactgggcttgcttgtcctttctgagctatagtcactgccacagttgccgtgggaagatattgttacgggaatgggagggtctcttagtgactgccaaatgatacaggagaaatcaggacctctcctgagctatctctacaaacctgtcattactaagcttcacgggtacatcatgtcctccaaatgtggcctctcttcccgactttcacatgactgccttctcagtatggcacatatggagagtgtgtatgtatgtgctcccaggcaagcagattcttgtctcttttccttttaagccactggcacggttctatctggctagaagtatatgaacgtattcaccctccctaaaagtccctctgttcagatgctcccgtgagagccagagcttgaccccagtgcgcatgtgcagtgtgtgcacgctctacccttcctccatcctctacagctctgttcaggatggtctcagcttccacacatactctagggaaaagaccaggccttacttcctggggtcctctcttcatgtttctgtattcatttccctaacatataacattgtgctacaacaaaccacagtgtttccattgcactttctgttgccttctgcagttgctgtgtgaaggctcacttaggaacctcttcctttttctgtcgttaggaaaaatcctgtaacaatatgtttgccatctgtattgataaaactttcaggcattccgtatgcatctaaatgtttttcagaaacaggcagaatttgtttagttcgtgtcccttcacaggatgtggctaggatggagcagctgtctcgcactcctctggataatcccacatgtagctctgtccagtggtttcctcagaccctcccacctgtcgtctgtgtccatcccatcccttccctagatccacgccttatctaagccactccagcctctggctaactggcttctcacttatcctctttccttcctgtagttctgagaagggcaaagatcaaaacgtggaggaccgaggacacaaagtagatatggagacaaagaaaagcgagccggtggtccgcaaagtcaccctgatagaggtaagagagaatcagcagagacttattccatcaccaagaaaagatgtcagacatcctggtcaacaatggcagatgccagagagcacctctggtgtaagcactggcaaggggtcgttgggaattgcagccaagaagctattagtggcctgcaggaagtgttggtagacaggactagtagtactattaagtcagactgtcatcagcctgaaggaaaaagacctccagagtcgtctttcttcccaaaatcctgggctgtgaacagagaacagtcagactgtatagtaaccagcaggaaactcagtgtggagatctttatacagagggaatgacaagaaggtctgcgaactgagaggtgagcgccaccgcaaagcccgtccaggtgtgggaagaggcctggggtcccaaggaaacaagcctgacttatggtgtaacctagacagtgggccgtgcttacctctgagacaggcccttggggacatggtggcaggagggcaggcgtaggaatggagggaagcctgacaggcaccttgctttctcagaaggcagaaagttactgaaacaaaatgctcagtggtccagccctactgtgcccacatgcatgcatgtgggacatgctggaaatcagcttccataacttttttaattaggaaaaaaagttaatctacttgtatagaaagacatagacgaataattaaataatcctggggatggctttgtatacgatcatgatataagaattagaaaacattttaggttttcctctaggtttttgattgttttcgctgtgtcatcgtgatggcttgtttcttaggggacaggcagctcttgtttcctagactggccacagactcaggctcaagcagttctgccttcgcttctgagaacctaagactgtggctacatgtcactgtgtccagctaggaaccattttggtacagatgtttagatttatggactggaaacgttaaaagtggtgcaggcaagatggctcagcagttagagcccctgctgcctgttcccagcaggcactgcagcgtacagctgtcagcaactccagtggcaggatcagtgccttcttctgtcctccttggatactacgtggtgtacatgcatgcatatgtacgtacgcacatacgtatgtacatgcatacaggcaaaatactcatacccataaaataaaaataaatttgttttttaaaaaagaccaataaagtttttaaatagcagctgggctagaaaagaatgttacctaaaggatttgtacctgtagcgtatagaattttcctaatgattttgtacctgtagcatatagaattttcctaatgattttgtacgtgtagcgtatagaaagctccaagagatcatcagagaaagaaacatcattttttatcacaaaaatgacagcaagtttcaaaatataggaaatataatttttatgagaacacaaggaagtgggttacactcatagatgtatgtccctgtgtacagtccagtcgctcttcatggatgcaagcttgctagtaagtttgtttttattttcatgaaagagagcatgtgagtgtacggttctcacaattcttacatagctatgtgtgatgaagactgtcaccccagttgctcatgttcgaagctggaagagtggtgagagcaaggggttcaaagctgttctgggccaactagggaaactccatctcaaaactaaatatgtcccttactagacagcagggaaatatttgaggacaagggagagagtcagttaaaagactgtgtcttcaagtggatgtctaagagaaaattttaattcagtctttatgaggaaagcattggttaaattatctctgactcaatatgctggctcagctgtttgcctcttagtgggaggttgatggttaagcccacctgcgcagcacaattgagactgttgtttcagtggatgctcttctaaaaggaatttattaaattgtgaaacactttttttttcactttcaggttttatctttatttcttttttttatattttttattacatattttcctcaattacatttccaatgctatcccaaaagtcccccacaccctcccccccaccacttccctacccacccattcccatgtttttggccctggcgttcccctgtactggggcatatacagtttgcgtgtccaatgggcctctctttgcagtgatggccgactaagccatcttttgataaaattgtgaaacacttaaataatcaattgtcaggtactcattattcattggacacagtttttgtcatgtttttggcatattgcatatgagtggaaagatgcgattgataaatctagaaggtaggtataaatagtcagtgcgtgtggccctgaacagcagcatcagcaggtgtgggctcactgtctggatgctgaggctcagcacgcgcccctgaacagcagcatcagcaggtgtgggctcactgtctgggtgctgaggctgtgctgagaatttttcctttgtatctatttatttcctgatttttttttctactcaacgttttcacactacttcagtattctcttcaaaatgaacataatttcaaaagttctaacatgatctattctttctacacaagagcccgaggctcaaggtctcctaacacccagttccctaagcggggtgttctcctcttccgtgttgagagctctgcctggatagcaagttcttgcagtgctcgcaggccgccactgcatgctggcatttcctgcgtgggagctcagcacagagcctaacccgtaccgggtccagttccttctgacataaggcctggcctgccactcagtgtcgctgctctacacacacatcaggtttcatattcactttcatgatcttgctgtatagatccccctttctctctgtctacggcctctgtcctgtgttagctgtaggcctactctgtatgaacagacctcagcggaggggtttggacttgggcttgtgtttcttgagagaatggggcttccatgactgtccctctgtccctttcatcctaaccctgcctcccgctaacaggcagcctgtatgtttnnnnnnnnnnnnnnnnnnnnttcttgcactgttccttcctcctgacggtctgagtcgtttccctcagagactgtcgctgctgcttcagctttctctcagcttctctcagggcttccgctctggagtttctcctgcttctctgtttacttttcaaagctcagcctccatcttctgcacctgcggagtcatcactgattcccagctgtggcctgtcacccttccctttctttcttcctcctgtgccaccaccatgcaccctccccttctgtctgttgtgttgtcctaacctttcttctcctctctgtgctctgcaggttttagggtctctgtatgatttgtacctgcatttatttgaacctccactcttctctttccctctcttatccgtccctaattgggccagaagtgtgacatgataacagaaatggctttctgactcctcctgttactatagtattttagcatgttgtgtctgttgcattttacacttaaaccagttgctctcatgagtttcactttctgcgcttctgcacatcacaggagtttatctgtgtaattgcacttaacaaatttaaaatcagaaaacctgaactaacaacagaatttttcccaaccttggatgtaaattttttctcagatggaaaaaaaataacataaacacatacttaaagtaaggcctgttttggaaaacacaagtgtttgcctccccgggaaggccagtgggctagcctctgctcttgcctgccacagtgtgtcagcaattgcttttctcagaggtggtgagttgacctaacctgctgccattgtctcaaggctatatcttgtttctaaggatagtccagtgctctggcctctctggttagaggggtcccaggaggtttaagtccagagtcaactgtgccgctcaaatggtcaatccctctgtctgtcacccactcgctatccgtgtccactgtagattctaagaaagcaacatctgtatgttggcccttgatttttagtaataatttaacttgttgtatcccaagattctgttagatacatggtcagcatgatagccagtgatgatgacagccatggcggatcagaagcacaaaacgccttggctcacttggctcttatagtttgaaaactataattagcccagtttgaaatttagacccagccatggagtgagagagtctccatgaaagtggtctacttctttatagtgatgaaactgaaatgcctccacaagacctccgccccctgaagggaaggactttgcccgaagctgcttccttcagaagcatcttgctccgtttggagctgccacaactcctcttgagaaatttgtcttttttgttcctgtcagtgcaggaagagtcagtgcaactgctaacagtgcacagaaatgtgaacagtataaccaggggcgagctatatgagggctaatatgttaatattgttatagtaacatagcccttttatttagcaggtgaggtgtgtcactgagtctcttacttgcataactgctccggttgtagctagaagacgtcactcagtatcttgtgtgcttttctccctagtaaaaagctggagacgaagcagaagccgcctgatgagtgcacatgatgtgacgtccacgccagacggagttctcgttagattttgggtgaaaagaagcagtatttattgaccttaaaaatctgaagcaaacttagctctaaaaagaaaaaaatcactgtggcctttgggcttaattgttatgaaccattgtgagtgttactggtcaaagtattgtgcttgtgctattagtaactacatcagaattatattgctgctgctggaaaagccaatagagaaaaccccagaactgctactcagtaaatgtgaataacagtgtgcgcagtgttagtcattcactaagccatcatcccgtgtacttgtggccatgatgtggctgtgccgtaggccgtcatcccgtgtacttgtggccatgatgcagatgctctgcttttgaagttagccgcgtgtaaaacctaagtagctgctggatattgtgtcttcaaacagccccagtaacaaacgcggtagaaacgacagtttgcttttgagaactaaatgtttgtgtttcccttgagtgaatgtatgtcactcaacactcctagactaagaatgattttggctggactgacaacagtacaccaaatttatttttattttttagacagagtttatatttaacagcataagtaatttatggatgtaaactctgtagtggttatagtttagtctgaatatttgtttttaaattattacacagcattatttatgtctttagtttcagaataacagtgccattaccatatgtttgtatgttgcagttggatatagctgagactcctccatcttggttttctcttcactcatccatttcttcagctgcatgataagtctgtcagtaaagcatttaaccccaacaaggtcagactatggtaaagttagaaaaacatatttaccgaagtacacaattgatctcattgaaataagaagtgagaaccgctctgttgagcactgaggtgtaaacgtgcccagatgcacagcgtgagtagcttcgagtacgcatctgtttgcacatgttgtagaagcttaaaatgggaacatgaccctgctgtggagaaccttggtagaattgttgttagtactaaaggagatttccagcgcatacagggtggcactgaaaactgctgaagcccacagccctcagccccgaaggctcagcggccagtaccagcggccttgctgtggttgtgtgtctgcgtccctggcacacttgggcaggcagctcagtcactctgaacttgcttctcttctgtcttgtgagtgtgctgcttgagacaatgaaaaataaagctgtgttcctaccccttcagctcctggtttctttcttttctgtgtgtgtgcacatgtgtgttgtgtgtgtgtgcatgcacgagcgtttgcgtggtgtgcattcacatgcctgagtgtgggccctgtgctgatgtcagccatcttcctcagtcattcttccatttcattcgaggctgggtctcttggcttacccagagctcacttaccaacaagggtcccccatctctgccttctgagcctttgacaccccccccccccacattcacatgggattcgtcacaaagaatttcaacaaatcaaaattaaaatcgaaactaatggaaagaaacattagagctgagcatttgcttaaatcttcatgttcacatgaaatgttgaaagtctgtttttatattgaacctactgaagacaagagtaacagttgtgctgggcatggtggcgcaggcctctaatcccagcactccggaggcacaggcaggcggatttctgagttcgaggccagcctggtctacaaagtgagttctaggacagccagggctacacagagaagccagagaagccagagaagccctgtctcaaaacaccaaaaaaaaaaaaaaaaaaagaaagaaaaaagagtcacagatgtgtctttgtaccaggaaaagtaggctctcctcaggctggccagtgtgagtctagggctccattcatgaaaaccctgagaggtgtctttagcatatgctcgagaaataggccctgactacactcctgcaggacctaagacgccatatccacttggctcatgtcttttagtaactatttgttctttatcattattatgaaattatggaatgctatcacactattcagaggaacagtttgacactatctctgtatcacgatgtctatagtatcaaaactatactgtgaataatagttgcaaaactttaataataaaaacccaagatacttttcccatggctgtgtggtaagcatgtgtgtagtcaggctttcatgtgtgtggatgtgcctgtgtacagctgaaacacccagccaccccatttcaatcatggaatcttacaaatgcaaatttttgatataaaatatacatttttaactgaaattgatattttaaagggctaacacctgaaacatacaaaattttgtgcatagtttctgctacataaaaacatgttcttgactttatacattattgtaaaattttatttgtgacatctcttcaagaatttcaatacaactgtacccagaagtcaccatgttaaaggtaaatatgttacttctgtcatatgttaagtattattaagaaggtaaggacagtataaaaattaataattttttaatatatttttaattgatttccagctgaagtccctatgtgttaatgaaatagtacaatttgtttgtatgtttttctttttttgagacagggtttctctttgtagctctggctgtcctggaactcactctgtatactaggctggcctcaaactcagaactccacctgcctctgcctcccaagtgctgggactaaaggtgtgcaccaccactgcctggccttgtacaaatatttttacatcgacattaacagtttttacccaactgaacttgattacagaaaatatttcccagatcttcatttttttttttacacaatctccatttatttttgcatcagatctttgagctacacaaaacttccctgctctacaagtaagtattacaaggctctgaacgttaagttgcttgtccatgtgcacacagcctgtaaatgcccatactggctataaagtgaagaagtggagtcatcgcaaatcctcacatgctgcagagaacaaaacagtcagagtttaacatgtactccctgcatatggaagagtgactaaaaccacgctccacccaggtctagaaatgtgtatatatcaaagtgaaaactatttctaaagctggtcatttgtatgtcctataatgattcttaggagcacctcactccattccacagttcttacgtctcctgaagaaacaggttctgtagaatcaaactaattacatgtacagtaacattgtattcatgaaacagaaaagccgccattccagtcatgtacaagataataaaaacatcaggcagagtgtcaatcacaaggctgtgttgactgaagaactcaatctatggatggacccaattatctgagggagaatggaatgtcagcatcgcttaggattaacaatgggctaactaggcaaaagcagacagctcctctctgtggagacccaggaagtaaaggcagtaatgaggtgcctcattcatctagccttccgctctagttattaaactgaatagggagatctttacgctaaggcgggaactggagaacataaaaaacacttgttttgtaaacgcatagaatgcggctttagatccccttcacgtctaagggcaggctgggagcacctccctcttctaattttgcttcagaaagttgaagaggtgtttactaacaagaacctccagctttatttctccaatctaaaggaaacgtgtgtgtcatgatttgtaattccctgtccaactctcattgcttaggtcaaaatggcttaactcctagcctacttcagtgtaaaagtcatgcgtaatgatcagcggtgctggtgtagtctaagtcatttcttagttcatcctttggttcttctccaggatggagagggcttgtcattacatgaaagcgtaagagtgacacattcttacaggcataaactcacaactgccgatcaagggacaatttctcagacgatcttgggatggagacggattgctgaaaagtaagagtggcaaggggacaaacagtaagacatcaaggaagggaacttggtgaaagagtagagaaggcaactgaatcttcaaaacaaacccaggcagaagactgaaggcagccggctccctggagaaaagcttggcagattcagttcagtttttggtgtttttagcagagaatccgttggcttttttgtgggcgctaaatttgttcacagggatgtggacaaatataaatgcctcgaataatttttctgaactattactgtgaggtacgtgaagggcagctaggcagtggcgcagccacccagccctgactgctacacacaagacggtgctgagagctctgtgttgatgcagtgaagtatctcatgtggtaaaggaatgtcagtcaaatttacgtactttaagaacatcaaattcttattatacttctcctgtgtgcaggcagactacataataaactagtctatagcagctgtaaatttctgaggatttatctaaccacaaatacattgaaatggggaaatgggtctatattaaaccatgcaagatgctgctggagcctggccatttctgcaacatcctgtaattaatttatcatgacaggtctggcaaactgaaacattcactgtgcttgcaacagactgttaaaacagtacagtggtcgctggccccacaagcatgccaagggaaggtagtttttcttcccaaatatgacttcagtgtgccctgtatctgggatcattttgcccccctttcattctcaaaaataccaggaatttagaaatgctctggactcaagaaatgaacctgctttgccttctgctgtgtgtgtctgtcttcctgatagggacagctccctagtgtttggatattatttgcccaacccgcccacaaatgtgctgcagactgggactatcttatgggagactcaaatccattttggaagcctcttagaaagctccttttcatataaataaggttcacataaccacctctatttgtataacactcccttctgaaatgtgaagctacacacaagtgtgatttttttatttatttatgtgtgtgtgtgtgttacaatggatcctaacaatgagaccctttccattgcctaacaactatagaatgatctctgcctgatttgatgctactggtatcatgatggatgttaggaatgagtccgaaggtagagatggctcagtaggtaaagtgcttgcttcaaaagcctgaatgtagacacacacacccccaataccccagcactcacataaaagccatgccaggtggatcccacagacttgctggctggccaatggaactgaaatgcttagctccagattcagtgaggtagcatgtctcaaaatataagggagataaataattgatgaagatggcaacctcaagcctgcacaagtgcacacatggctgagtcacacacacacacacacacacacacacgcaaacacccacagggcaggcacacacgccctcgagcacacaatccacagtcaaagaggctctgtgctgggaaaatggaactaccacttctgaaaagtgggaactacgctgtacaaatgtacagagacctattcatttcctgggagaattcagagttcttcattccatagacaggagaaccagaccttcccagagcccaggaaagacaaagtcacagtaagtagagggaaagcttttgtttcagttccttctcacatgaaggtctccctccagagcgcatctaaaaaaaccttggaaatgtaatggagtgaaaatcgagggttgttcaaaagcaagcatgaagatctggttggttggttgggttttgttcaggaaaggtctcactatgcagtccaggcagacgtcacatttgaaatcctcctgcctcggcctcccaaattataggattacaggcctgggccactgtgctttaaaacactgcaactaagccccttgcccacagctccgtggcagggccactcacaactgcaactccaggtgtttcctaggtaaccctgcaactccaggtgtttcctaggtaacaccctgcaactccaggtgtttcctaggtaacaccctgaggaatctgcatcttctcaaccttgttcacagtcaaaagcaaatatccataacgtgacctgaatatgtatgtatgtatgtatgcatgtgtgtatgtatgatgactagtctaagtgagccaggactcacaaggggagacgtgaataacacaacagccacaggagctgccatttctgtgcacgtgtaggatagttttaacaactggatacagaggatggttaattctattgcatatcaagagctgaaatcaactatgttgctaaacacattgataattttggacactctgcctgggggtgtagctcactggtagagcacttacttggaatacacaaagcctagggttcagtccccagggctggaaacataagtaaaagagaataaatgtaggacccttgaagacttttgcacatctatttgcttttaggtgtgcatatatgtgtgcatgtgcatctgcatttacttatccaacatctggttcctggatgcctgtctgtcctaacaggcaagaggagctagatacagttgagccaggagagtcaccttgattcaccctcctgattactgccattgccaccacagagtggtttttttagagaactttcctatgcattaccaaacttaagccccttaacagtctgcatcaggaaggcattgcctgcccttcccaccccaacccctgccacccatgtttgcaaactagtcaaaatattttgtgacttcctcaacaactactaacagaacaagatcctccccgtcactctccactctttccaaacaggaaaattccttattgatatggggaagatctggaaataaattattagaagagccaatcaatgcccccatttctacagggcagcaaaacttttagattccatttgtcttcagttcaggtgtcagttatgaaaggtgtttgtgtttcttgttaaagacttaaactagaaatgtgaacctgtaaaagaattcaagtaagggcatttctaaatttttaagttaagttttctagacagaggaggaaagagatacacagaaaactcaagagtccctttttctaaaaaccttaattttcatgcaataaccctgacaataaagaggccatgaatttgaaggagaggagagaggagtgcataggagagttcacagggaggagaacgaaggaagaaactaattaaattccagtctcaaaaataaacaaaaatatttttgaaaaaaattaaattgctttcatgcattttatatttaagggatggggtctaaatgcaaatgaattatactttcagttaattattctgttaatggacaacaaattcttatttgacctaaggcatcattagatcaactcaccaacttggaaggactatggcaaatccataagatgaaatgctgtcttgaaactcttcgcagacgctccctccttgatagcgctagccttagagcatcagactcctcctgctggcttggagagccctggagctctgctcctcagtattctcttgtatcacaggacatgaaaataaaacacagtcacctggaggtgatagcaggaaaggagaattggtcagtatctgaaggtgaggcggcgacctggagccaactcgcatggcaaacacaggccttggtgttcagccccaaggaatccccagtcaagggtttcctgtagaaacccactgttcgtgctttaaggaggcctccaaagaggctggtttttcaaggccttgagttgttctcgtcctagagaagtgctttttaccaaaacctctatggggacagggcattccagtttcatcttgagtgtcactaagattcctaattaggacatgtgagagtgacttcctccctcattcttttactcacgatactgaaagtaacaaatggtcttaaagaaaggaatgatatcataacttcattgtgtgcccagaacttaccaccaattgcacatagtaggacgtagacacaaatgccaactaatctggatacagaccccaataaagaggctgaagtacagggactaagcagtggaatagccctttcctggcatgtgtgtggggctaggtccaaagccagcaagcaatcactcaatcaagtgaaatgtaataataccacaccaataatataactatatcagcacccatttcttaggtacctggtatggtccttagatttctatgtatccactatctcaggatattattttatgtttttcttttctttctttcttctagtcagtttctcactgtgtagaccaggctggccttgaactcacagagagccgtgagtgctggggctgaagtcatgagccaccatactcagctcacaggctctgagaagaagagcctcagtcttaccatcacctgcccgtggttacagcttcttctctttgcaattccctgctcgctcacactcttcccttttctaattttttttttctggtccctctctttttctcttctcccctacaccaaccaatgacatcaacttaaaagtcttactgctggccatgccagtgtggcacctggggacccaccctgggaccttggatagcattcctcacacccctagaacattctgaacaactccttatttacataaaaatatggccttcaaatgtggatagaatcctttaggccttttgctttttatggaggcaaatgagccagaaggttaaatctaatttgcatggcactttgcattccttttcatccagggtaaaagccttcaaaagctgctgacatgtgtacattgctccctgtgaaccggagaccctgactattctttgctgtgcaggtttaatagttttctaagggaaacaaccctagacccataaaagccggatctgggatctcactgcaagaattcagggctctgtgagtttatattttgttttcatatcaaccactgaacccttttgtaacctcctcttttgaatgtttgtgtgttccaatgtgtgcgtgtatgattgtatcattaactaccttagcagctgtagtcattaaagcacaaaatcaccaccatttttcagcccaccgtcttctgtgcagtcatatttgagcagggaaaggaaaagcatttattattacaattatccataattatgtgccaattttgattttttttaagctagcattcgctgagcataggttcgttaaagaggagaagcccccttgtcaaacactgtatccatgttacctcagttctcaaaataagcttacaagggatgcagtattcccactttaaagcaaagcaaagcaaaactcctgttctttaaggttagaagtgtgtctgagatgctgtggcgacagcactggatttcatgtttgtcaaattccaaaacttcccttttcatcattagatggagtctgccaagctgactgctccatttttcttaaacataaatgtgatttttaaaaaaagatttatttattattatacgttagtacactgtagctgtcttcagacaccccannnnnnnnnnnnnnnnnnnnctcattacagatggttgtgagtcaccatgtgattgctgggatttgaactcaggaacctctggaaagagcaatcagtgctcttaaccgctgagccatctctccagcccgtgattattttttaaatgcatattctaaacacggttgataaaacgagacattctactattgaacactgagtaagaaattgagacattatttcccaaatttctgatacctcttgcaaaaccagccacctgcaaaaccaaaacaggttgattcaaactaagcttgagagtgcctcttgctatgcagacgttgatttcagtcttttccgtggtagtaaagcatccctccgttttcccatcataagaaggctatctcggtgcaaagaaatgagtgaaagtaacaggtcttctcagagtggttcatgccctgaggaaatgctatctgttgggttgacggtggcaaaagatgaggtttgggtataaagctcttcttctcttggtgtacactcccatttccgtgtcctgaggatacagccccgttatactcagtcctcaggtcagcctcagccatggactcatttggactcagttcatttgctgcttagtccttatcactcaatcccagtggtcacacagtgtgagcagcaggcagagttaataaatactgactgagcagagaaaacccaggcccagtcgctggcttcctgaaaatgaatgaactgcctgaggatgagttgtgtgtagagatcataacgtggaaaaacacagcaggttcatatcctggcacaaagatgacaaatctttgtgttctctgtttcctatggaaatctgtctcttcaactctttctcctttcctccctcccttccctcctgcctcctgggtccacctgtgtgcttaccccctctggacctcagccacagcagcccgccaattaaactcttacagctcctgtattatatacacaaaattgtttgcgaggctctcctgcaccccagctggtaagaggtgcaaacaaaagcaagacaaacaaatgactcttgaatcgcccttggctccaggtggttggagagcctccatgggcacctggggttcaggtaggagcagggctgttttagcccaacagctatgattcccatctccttctgcagcagacagctgaaaactgaccagcccttggtgtgcatctggggagtgaagcaaccagaggaggtgatgaccaccccaaaatgttagccctcttcacggtgctgccacattctcagattcctatgtcctctcttctgagtatttcactccaggactaaaggaacgaacctcaccttctatggcagttcttccaaacacagcacctgtactgcctggttttatgtgtcaacttgacacaaggtagagtcatcagaggggatgtaccctcagttgaagaaatgcctccatgagacccagctgtaaggcattttctcaattaatgatcaatgaggggagaacccagcccatgtgggtggcaccatccctgggctggtggtcctgagttctataagaagcaggctgagcaagccagggggagcaagccaataagcagcatccctccacagcttctatgtttgttcctgtctccaggttcctgccctgttccagttctgacttcct

SEQ ID NO: 692 - DNA, 3499 bp, Mus musculus
cggccgggatctcccgtccctagtctgagttacctaggcaacagcggcagaggcgggcctgacgtcacgggcggcgcgcctccgcactgcggcactgagctggctggacagcgcgcgtcgccagcggtcctgccggccaagctgccgcctccctcgtcctcgcctaggcgcagggaaccgcttcgcgccgccgccgggctgtccctcctctctcctgttaccctcaaagtaaccttctggctaccttagaactaaaattggcactaaaagcctagagaagtgagcagcacgtgaagattcagaggacaatgttagtgtagagccatacaaacaagaaaagacaagtaaacactacccagatcgcacaggaaatggagccagaaactccagagaaggtggattctgcacaagagaaagtcagaggcaagaccccgacagcagatgattcagatgacagccgagaaaagactggcatagaagagaaaggagaactgaccgacgcctatcagctgcaggtagctgaagaaatggcaaaggagatcaagaagaaaataagaaagaagctaaaggaacagctgacctactttcctccagacactctattgcatgacgacaagctggccagtgaaaaaagaaagaagaagaagaagaaagtgccagtgcccactaagcctgagtcaagtccctcagatgtctgtgacagtgcagttgaaggggaacaaaagaaagaaggtacccctgaggactctcagcacatggagggaatctgctcgagagagcaggatgtggatgccactgtgccagagaacgcaaagcccaaacccaagaagacaaagaagaagactaaagcagtttcaaatgataatgaagacactaatggagatggtgttcatgagataacaagccgagacagcccagttcatcccaagtgcttgctggatgatgacctcgtcatgggagtctacattcaccgaaccgatagacttaaatctgactttatgatttctcacccaatggtaaagatccatgtggttgatgagcacactggccagtacgtcaagaaagatgacagtgaacgtcctgtttcatcttattatgagaaagacaacgtggactatattctccctattatgacacagccatatgactttaaaaagctaaagtcaaggcttccggagtgggaggagcaagttatttttaatgaaaattttccctatttgcttcgagagtttgaagaatgtccaaaagtcatcctgttctttgagattcttgactttttaagcatggatgaaatcaagaataactctgaggttcaaaaccaagagtgtggctttcggaaaattgcctgggcgtttcttaagataaagccatcttaccgctctatgatggctctccaggaggaaaggggtacaccagtgtactgtgaacgtcaccgtgaaacaagttccgtggacacagaacctggactagaagattcaaaggaggaagtgaagtggaaacgtctgcctggccagatggttggagaacattctgtacttccagaagaatgctcctttctctccttttccagagtttggaagaatgaaatcaatagcacgagcacgttcagagtcttacctcacccctccttcgtctacacggctaaattccacccagccacacgggagctggtggttacaggatgctacgactctatgataaggatttggaaaattgatgcaagggaggatgctgccatattagtgcgccagttggatgtgcacaagagctttgtcaactccatctgttttgacgatgaaggtcaccacatgtactcaggagactgcatcggggtcatcgttgtctgggacacgtacgtcaaagtgaatgatgtgcaacactccgtgcgccactggacgataaataaggaaattaaggaaactgaattcaggggagttccaataagttacctggaggttcatcccaatggaaagcgtttgctaatccacaccaaagacagtactctgaggattatggacctgcggatattggcagccaggaaatttgtgggtgcagcaaattaccgtgagaagatccatagcaccttgacaccgtgcgggactctgctcttttctgggagagaacaagtggcaatgtactctgacctgccattcaagtccacaatccgagacatctcttaccaccccctggagaatatggttgccttctgtgcctttggacagagcgagccgattcttctttatatttatgatttccaggtagcccagcaggaggctgaaatgttgaaacgctatagtgggacactcccgttgcctgggatacatcagagtgaggatgctttatgcacctgccctaagctgccccagcagggctcttttcagattgatgaatttgtcaacactgaaaatagttcatcaagaaagattcaacttgtgaaacagagactcgaaactgtcacagtcaacaaaaatctctcaatgacttcgccaccaccaggccctgcaaagaagcccagggtaaagcagtcgttcgtgctgaccactgatgagatcatacatcagtttggactcccccagactgcatttatcagcatagagagagggccttttgtgcgccatgttgatccaccaccaatggtagtggctctttatgactacacagccagccgatcagatgaactaaccatccatcgtggagacattatccgagtgtatttcaaagataatgaagactggtggtacggcagcgtaagaaaggggcaggaagggttctttccagctaatcatgtggccagtgaaacactgtatcgagactcccctccgaaggtaaaggagcgctcccctcctttaactcccaaggagaaaactaaaccagaaaagcctctggcttctcaaaaggtatcaatcaagaatggttctgagaagggcaaagatcaaaacgtggaggaccgaggacacaaagtagatatggagacaaagaaaagcgagccggtggtccgcaaagtcaccctgatagagctgcatgataagtctgtcagtaaagcatttaaccccaacaaggtcagactatggtaaagttagaaaaacatatttaccgaagtacacaattgatctcattgaaataagaagtgagaaccgctctgttgagcactgaggtgtaaacgtgcccagatgcacagcgtgagtagcttcgagtacgcatctgtttgcacatgttgtagaagcttaaaatgggaacatgaccctgctgtggagaaccttggtagaattgttgttagtactaaaggagatttccagcgcatacagggtggcactgaaaactgctgaagcccacagccctcagccccgaaggctcagcggccagtaccagcggccttgctgtggttgtgtgtctgcgtccctggcacacttgggcaggcagctcagtcactctgaacttgcttctcttctgtcttgtgagtgtgctgcttgagacaatgaaaaataaagctgtgttccta

SEQ ID NO: 693 - protein, 911 aa, Mus musculus
SHTNKKRQVNTTQIAQEMEPETPEKVDSAQEKVRGKTPTADDSDDSREKTGIEEKGELTDAYQLQVAEEMAKEIKKKIRKKLKEQLTYFPPDTLLHDDKLASEKRKKKKKKVPVPTKPESSPSDVCDSAVEGEQKKEGTPEDSQHMEGICSREQDVDATVPENAKPKPKKTKKKTKAVSNDNEDTNGDGVHEITSRDSPVHPKCLLDDDLVMGVYIHRTDRLKSDFMISHPMVKIHVVDEHTGQYVKKDDSPVSSYYEKDNVDYILPIMTQPYDFKKLKSRLPEWEEQVIFNENFPYLLREFEECPKVILFFEILDFLSMDEIKNNSEVQNQECGFRKIAWAFLKIKPSYRSMMALQEERGTPVYCERHRETSSVDTEPGLEDSKEEVKWKRLPGQMVGEHSVLPEECSFLSFSRVWKNEINSTSTFRVLPHPSFVYTAKFHPATRELVVTGCYDSMIRIWKIDAREDAAILVRQLDVHKSFVNSICFDDEGHHMYSGDCIGVIVVWDTYVKVNDVQHSVRHWTINKEIKETEFRGVPISYLEVHPNGKRLLIHTKDSTLRIMDLRILAARKFVGAANYREKIHSTLTPCGTLLFSGREQVAMYSDLPFKSTIRDISYHPLENMVAFCAFGQSEPILLYIYDFQVAQQEAEMLKRYSGTLPLPGIHQSEDALCTCPKLPQQGSFQIDEFVNTENSSSRKIQLVKQRLETVTVNKNLSMTSPPPGPAKKPRVKQSFVLTTDEIIHQFGLPQTAFISIERGPFVRHVDPPPMVVYDYTASRSDELTIHRGDIIRVYFKDNEDWWYGSVRKGQEGFFPANHVASETLYRDSPPKVKERSPPLTPKEKTKPEKPLASQKVSIKNGSEKGKDQNVEDRGHKVDMKKSEPVVRKVTLIELHDKSVSKAFNPNKVRLW

SEQ ID NO: 694 - DNA, 122937 bp, Homo sapiens
tggctccttcaagctggcttctgtgaccttttgatatgtttcttcattctgtattaacttccttaacttctggtgcaacaagaattttccaggctcctgttctaaaatcaaccatttctccaagggacccagttacttttagtgaataatactgttcagaaaccaagatctaggcacatgtgctcattgcttctagtataccattactctgaaaccctttcagcagatagagctaggaagagcataatagatagatacgcacacacatacagacatactttcctctatatttatttttacatatgtttatgtatatattgaaaactatgagttgacactgacatattcaattccaattcaacatcaccacaaaggtcactgtggaattcttcctctctcaatttgtaacgtccttctctgtcagtgagaaacctggctcccattagacccaacatatttatttcctcactcccctttcatgcttgccacctctttacttgccaaggggaaggcaaaacagctggtcatcgttttttattatttcttatcattcactcttccatccaatcaatcactaagtcctgacatttttacctcctaaaaatttctcaaattggtccatttctctccattctgatttttcttagccttgaccatgccacctttgtctcttacatggcttacagcaacggcatcttaaatggtattcccagatctagatttgcttccttcctgtctgttctccaccctgcagccagagttatctttatgatattaaaatttgaaaatttcactccataaaattctatagtggtattccactgaccaatactgtctgggtctcttcatagcttgtttaactctcttgttttgtctcctccaaaagcccctagtctcattctctaccttttagttagccaacttgaacttttttttttttcttccagttcttgtattataccaaactttcttgtagtgaacactatacgccaccttcttctacctggaaacccttcctaacctggacaactctacacattattttggtctttacttaaatgtcacttctgctatgaaatattccctgacctcccccaccccactgcacctctgcatgctactgtaaatggagaagcaagagatgataacagggttacacatccgctagtctggggattgtattctgaaactaacaccctactaagaatgagcagtcagagttataacttccctttggaaaagcaggtacttaaatgcagttgtgaggacagatgaaaagtacataaaacacctacaatgcatacctcctagaaggagctcaatatatgttatccattattcattcaacaaatgttcatgaaatgccaactatttcatagacactgtggtagatgctggggatagagaaaatacaaagtaaactatgaaactatagaatgagcatccaaagtctaatatatagaatgagtatccgaagtctaatagggagtaggagtgtttgaaggagtcagtcaacctgcttaagattcaaaggatggacaacatttggctgtgatgcaggagtgtaaaaggaggaattttcaggaagagaggacaatatgagtaaggacggggcgtgaaaggctatggattgtttttcatggtacacataattcaatgttgcataaaactgcatggtacacatgattcaatattgcataaaattggaacaagaagctaacgagagatgaaactagtcagggagatggagaatcttgtatcctaggcaaagtaatcattttctcttacagattgcctttcaaaaattttcagcaggagagtgccattatccgatttacatttttagtcaggtcattctgatagcagtgtggagaatttaagagtcaaactggagtcagagaactggtaaagggcccatctgaggaagttaaaaagagagaatggatatgctttggcataagatgcatttaggatactctactgttcttactaaaacactgggaggattgtggtggcttacagcaagatagaaatctaggagagtatgtttagaacggaaagttgaacagctcagttcggtacgcattggattagtaatctttctcgttgcttcctcacaggatttagggaagcacaagacatatagtttgtaaggtgtggcaatgtcagtaagaatggaaaagctggcctccataaactcttactgtacaaatgaagcaacagcttacagcgggtggctgtaggtacaggaaatggcctgtattcacgagtgtattcacgagtccacgagtagcgcatctagtatttttccagccctggtgactcagagctgaagatggcgcctgtggcagaaatcagaaaagtgggagggagcattaggtgtagaaaaggatggcgttttaacttttgttttgtttttcacacacagggagatagctctaaaggaacagtggataattttttcttaaaattttgtctgtagtacaacttcattttccacgccttaaaaccatgttttcttttgtgggcgcgatcgcgtggggagtgacaaatctgtttctttgcctcattcattcattttcttattctgggcggcttccatgacagcctccccagttttcctttgcccagtcagtttttccctgcgctagctacaattctaaggcgaaaagagcattttcggaggtgagggcggggaaaactcaagactctgtaggggcacccgcgcatttccgggtcccttaccgctccgagtggaggagactgttcccgctcgcgtggccggggaggcgggagccccctaagttccctgaagctcgcgcccgcctgcggcctgagggcccccgggcaggcgccgcacggcccctcctcctggaagaaggcggtggaggcgcggggacggggccgcggtcttcgcctagagcgcgggacgcatcggtcgccatgggaacggcggcgtaggcaggcgctgacgtcagcaggcggctcgctgtccgcactgcggcacagagccgcggcttgctttcaggacacgggtcgctggcgggttaggtggctgcgtggccgcctcacttcgcgcacgcgccgctaggctgggggagttgatttgcactgctccgggtgtcggctccggcgggacgggcggttctgcgtacccctctccgtgagtacatcatgggtgcgctggtggcgggagcgcgggccggggtgctcggcctgcccggccctctcctgggcggcgtgtcggggctgctggagtccgagagcgcggaggctgatagcgtagtgaccgacgagcgtgggccgggtgtcccgggggaatgcgatttctgagagtcctcaccgtacttttgcgcttctttcactggtctccgtgtccccggagagttgagcatggtgctctgatagagaattcaatctttgcctttcctactcccgattcttatttaaatgcttttaaatcagatgtgtactgagtgtgtttatttccttttagagtgtcaacctggggctgaatcttcaacctgtcaaagccttcttaattatgtctgagaaaaggtgatcaatttgttatatttataagagccaaattatattaatagggttgtttcgagatgcataaaaatagaacaaaaatgtagaccatttaagaatccttatcaaaggttgtgctgcgtttagcattcctgtaaaaacatctattgtgaaaataaagctttcccctttcttttgagaaagagatgccaacaattttttcacctgttgcattaacagttgctgttactgcttgggcgttaggaggaagattgcttcttatgagtactctgggaaattttttaaagaatgcttgaaagaaattcaaataccaaaagtgtttttaaaccatacctagaatcttgtttatgaagaataatatttatgaagttagaatcttgtttacttatgaagaatcttgttgatttattcattgaattttgtatacaggatttttgtttgtctttttttcccttgcgataacatttggttaaggagcgaattatcaagcctctcagttttttctcccaatgatattgagccacatattggctgataatcaggttgtctgtaaaataaaatgagatgaaatgtaatccatttaattttcctgtgtaatatctcttagacgctcctgtgaaagggtttgtgagggagaagttgtaaaataatggaatatataagaatcagaggtgtcttttaaagtcctatctgattttttgcagaggttactaatcaaatattagccgttaattctatcatgtttgctgtagtacatattaagatttagagatggctgagcgcagtgggtcacgcctgtaatcctagcactttgggaggctaaagtgggtggatcacttgaggtcaggagttcagtatcagcctggccaatgttggtgaaaccccatctctactaaaaatacaaaaattagctgggtgtgatggcccacacctgtagtcccagctaccagggaggctgaggcaggtgaattgcttgaacccaggaggcggaggcagcagtgagctgagattgtgccactgcactccaacctgggcaacagagcgagactctgtctccaaaaaaaaaaaattagagatgatttctgtactgtatttgctgtgttatcattacataatattagtatttattagtttagttgtgtattaagctgttaatagtaaataagtatatgatttatgtattttatttgtaattatttacttatttttaatacaataataatggacataaagtaattttattgcaatgtactgattactttgctttttggtattttctcttctccttacagtactaaaataggtgccattttaaattcccagacaaggaaaaaccaaggattagaaattaagtagcttgcccaaggccacacatcagtaagtggtgacactagagctcaagcctgagtcttttttactcgctttgcttttgcttctcttcacttcgcttctctcttcttctcctctcttttctttcatagtggcagatacataactataagagagcattggcttggtcctccaaagctagcagtttggtgggagttacagaacattttaccagggtgaaaattcaaggttgaggtagagggagctacaaagattaaggcaccctggaagcacagaagagaagttcttaaatgcccttcaaggtgagaatgctctctagagaagatatcatttgcctttaaaggatagtgaggagtttgttagagagacaaaggaggaagcacatttttcaggggaggggatatgtgtgtaatgatacaaaagcaagagagaacttggcacacgtgaaggcctgcaggtagtttcacatgtctgggacacagtggatgtgtgaaggggacatttcataaatggccttggacctcactggtaaggacttgatatttttttcaatgtgcgattgggagctagtgaagaattttaagcgaagaaacgacaccatcacatttgaattttagaaaattacactagttgctgtgtagatgatgatttttttttttaagggaaaggtgatagcggcgtggaaacaatcttaaaacaaaaagcataatccttccacagtgtttttgtccctcagagttactgtctcatgtcactgcctttgggggtgatgggaagacagttggaagaattctgtaaagaattgtctacatgtcccttctacaggtgtcaccttccattcattccttagccccagcctgctaagtttctgcccctctataaacagctttgacacacgtgacttcctacttgcagattcagtggactttcttcaaaacctccagccccttttgatgccacacagtatataggcaacatctcctttaaaacttgggtttgcttctgtaatgcttctatctcccagtttttcacctatctccctgattttactttatattgtaggctcacaggattctcattggctttttattttcttggaactatcatatttataaataactcccaaatcttcagcctattgtctccctgctggattagtagattgcctaacaaacataatatgattatatacgtaaacacacacacacgtgacagtaataacagttgttgtttttgaagggcttgccatgtgctaggcattgtgcctagtattttatttgcatattctcatttaatctttataaaaacactgtgagtgatttactcttattattgtgaaagattaggaagttgatatccatagaggtgaatctgctggcagatagaactggtatttggatccaaggatctgaaaatggagctgatgcttgtagctgctcagtgcccttcagatacccaactcaacatgacccatactaagctcagtgactgcaccctaacaacctgttacagttatagctaacatttattgttgcttcttctgtctacggtactgttctaaatcatttaacccttacaacaaccctttgagtcggcactggtagggtgtttttatagatgaggaaacaaaagtcacgcaagtgactatggaaactaattctaggacatggattttaaactactgccctgtactgcattatattacagtgtaatgatactactaatctacttattctagttctagaaacatgggaattatctccgattctttctcctgcctcttcattagttatttaatctttctaaaatattacctcactccatcacctggagcgcactggtgcagtcttggctccctgcaacctccacatttcaggttcaagcgattttcctgcctcagcctccccagtagctgggattacaggcacccaccaccacgcctgactaagttttgtatttttggtagagatggggttttaccatgttggccagacaggacacaaactcctgacctcaagtgatccacccgccttatccttcccaagtattgggattacagacatgagccacggcgcccagcaggcttttttttgatgaatcatagtcataatataggtcagctttttcctggcctattagatgaccatcgagtagtataaatattaaatttttatttgttttatgatttttctacttccgtgctctcaggtttcaattactcatgctgtcattgcacttgcctttgcagcttctcttttctaatttaatatagactagaaagtagaagactagatttattaaatttataactgctagaaggagtaaatacaggctcctatcactaaagtataggaatttttactccatggatttagtgatgtctgttttgactgggtgccacgtagttgttgcctaagttaactgacatagttaggtatgtttacataatcattcctttctttttagaatttcttagacatttctgcaagaggaacatgaatgtggatgtccagggaattggagcattaaccaataatgccttgggcccagtgtggtggctcacgcctgtaatcccaacactttgggaggctgagtcgggcagatcatatgaggtcaggagttcaagaccagcctggccaacatgatgaaaccctgtctctactaaaaatacaaaaattagctgggtgtggtggcgcacacctgtaatcccagccactcgggaggctgaggcaggagaatcgcttgaacctgggaggcggaggttgcagtgagccgagatcacaccactgcactcgacaaagggagactccatctcaaaaacaaacaaatcaataattcctgaaccagcttttttttttaacactcttcagttttagtctcaaaaacatgcatattacattctaaatgttctaatgtgagaatatgttcattttagacatacaccgatttttttaataaaatgggcaatttagtaatatacatactgagttgaaccatggttttgagtagttctgacacagtaatacacatccaggttttattaaagaaagatggtgcaaatatttgtactatccttctctattgtagcagaattttcagtggcagacacagaggtatttaaattcactgtgagtgtgctacccacaagcatgctttaatgtaatattgaatgctcttaggaaagtcaatcctgagatggagtttggtttcttaaaagtgcgttgaaatgttcattaatgtattaaaacactttaaaaagtttattaacataccacattagatgtgcactgccttcaaaatgttttttttgtttcaaatatataaatactttattcagatatgatctagtttgtttcccttgattttagagccctaaactgattcaaatgtacccaagtcatttgcataagattgggttaagggaacatagctttattggtataaacttaatgaagtagtggacatacaatggcatgatcttgtgtgaagaacgttttataatttttatttggaagttccatattacaaatacatctcctttgtttcgataggatcctgattgagtcaatgctttgcattctcagtcctctgcataaagctgagagatgcctacaggtaagacttctatgaaatttatgtataaaatttatattttatacatttacttttaagtttggtttattttaagggattcttgaacagattaatgaatacagtagatgtcattgaacaaatatactacatttagagatacttattggttttgtattcagttttctatttaatattgtgattaaggttagtatgtatttaatggatggtagtttgggactcagatggacaaggtaaataatgattacaacatagggttagtttttattctttatcatcaaaattgaatgttttactccaccacaagcattggcaatcttttctaaaagggctagctagtaaatattttaggcttagtctctgctataactgctcaactctgtctctctgtctcttttaaagcatgaaagcagttataacaattcttaatcaaatgggtatgtctgatttcaataaatctttacaaaaacaagtgactagcctgcaggccatagtttgccgacacttgctctagagcacccattcattcagcatttattaatttaaaacataatgactatgtacactatgtcagacctcataatagtagctggggatgtagttatgggggaaacagaaaatatgtttctttatatagatataaaaataattatataatttccatttgggttgagtgctgtgaaggaagagaacaacctgctatgtgagaaaagggaaaattagatgagtttgtcaggaggtgttttatttacaggcagcatttaaacagacaggttaacaccagccaggtgaggaattagaggaagcttgcctcagaaacagcttcatgtgggaaggagcttgctgtgacggaggagctaaaggaagggtattatagctagaacataggcatctaaggggatatttgtcttgatttgaagccctggagatagatcaggaggtatggagccctgtagggcatataaaagacttattttatcctaaatgtattgggaaattttcaggggcttaagcattatcttcttcatgttttaaaggaaaaacctgttaatatttgtggaatactgattacaggctaggcacaccttagccatttttcatgcaaaatgatctttggcataagataattgtgattttacagataaggaaaatgaagtttagagatcttgagtaacttgtctaaagccacataacacgtaactaacagtggtagatgctactgtttatcagaaataaaaagttaacttagcaaaggagacttttagagtgagtggccaaaaaggtcagagggatacaggtgaatgttgtgtcactaaagtcaaaataaaaaatattttaagaaggaaagataggtgagtttttctaatgtagctagagaactcatgccgatatttacaagaacttatttcttaacatcctagtagtgtaggttgtgtgttatgatagagtcatttacaaaatcacatggctgtatcttttgtagctgagagtgaagcaaaagtaaaaaccaaagttcgctttgaagaattgcttaagacccacagtgatctaatgcgtgaaaagaaaaaactgaagaaaaaacttgtcaggtctgaagaaaacatctcagtaagtaaatgatcattgggtaatagtgatttacatatgcgcataaaatgcagatatggctgcattttatgttaaaattctaaggaattttgaaaattaaaaacagtaacactatgtcatggtcaataacatgtggtaaaaataaagtttatattagaatcaacatcactgtgagaatattgacttcattcttgagtgctgtcctacaggaagaacacacacacagtggggaaaatgaccagagatagtggggaaactcaaaactagccatgataacatttttgaagaaaatatttttaacccagaattgtgaagaacttaggaagtagtatcttaacttcagatattgaatagcttgtgcttatttaaactatttctgtgtgattctacccaacagaaccaggagaaatcaatggccgtatggtaataattatccttttatgtttgaggcacactttcaaatgatagaatctttggcagcacacttgaaggaattaaaaatacagtgctcaaagactaagcaaatcagcaactaactacaacctgatccccttggaatcataaagagtctgtattggcatccacagttaatgctctatgccctctttatacctatctccctacttgagttgcactttttactactttgaccattatctcttctgtcctcacagaaaaaaataaacaggctcttgtgtaaatggtacatagttttttttttttttttggcaggagttttataatgagttataatcctacattttgcttgtagtaagatttaccccattttttcttaagacctgttcattttagtattctgtctggcagatgtcaatgtaacaatataaattctgaagtgaggcaaaaacaagtagtaaaattgaccaaaatccagctgcacatatgtgagggttcatagtgtatacactggtgtacgactgcacaaaaatttcgaactactgacagaatggacagattagcactcccatagtgattgctgctctgaaatagcatgtgctttttctggtggtactagtgcacaatatggtagggaatagtgacatggaggatgaaacattgcttattgatatatgcgctcccctcagatggagtggtttatgttgggcaaaagcaaaaagaaccctggaaacagttgtctgcagagatgttttatgctcagagaagaacctcatattgtctcttagtattaaagaactgggagttgtgagccatgaacaaaatgcaatttagaccaaggtttaaattaaatggataatcagaataggcagaggctatgtccatttacctaaggtccagtttaaatgttgaggggcacataagtgtgaggtgactaagcataatttatccagcctctctttgcaaacaccaggactgaataggcttcttttctttcagaaataagtacactaggaacaaatatttgggaagatatttcgcagctcaaaagaacaggaatatttctaaaggacttagaggagaacaaaatatttttgacatgattaacttgaggaagtaaaagaggaatagctgctttcatttgctagatgccttaatgctttctatctttaggcactcttctaaacactttatatatatttagtcgtttaatacaaacgacgaaattacagggttttatttctgtacaggagaaaactacatcagaagttaagtaacttgctgaaagttacatagtaaatggtagaaccaggattcaaacactgagtggaagtgcagaatccactgccttaaccacaacccaatattatctattttaatgaaatttgaaaagataggacttcttcttgaaagaagaacagggagtcctatgtacagaacaggctgagatgagaaatggagcagtctgaaataaaattaagcgaggaaaaaagtcaaaatagggattcataataatggcaggttcatcttatgttccagttatatataaggcacaataataagagttttacaaatattatttctaaatctcatgttaatcatgcaagatagatattgggattctttttttgcacatgagaaattttataaacagacaaacagacatgttaggtgatttccttaggtcatttagtctaaaataggataagtgggatttaagaccacagtctctgcaattttaaagttcatgttcttcagttgcttccttaaaactatatctcaggcctaaaatgatggaattgacactacggaaaaatctaatcagtgaagtgggagacaaattcgaggtgggaagaaatgaccaaaactaaaatgaaagaaataaatgatgaggacatagaaagatatttgacccacaaataagtatcccgggacagtactagtggagcagaaacaataatgagcatgatgaagaaaccttgctgagatttctgaagagatgagtcatcctgcattccaggcaaaatttatgagatgagaactatatctagaaaattcttttgtttgtatcttaagagtcaaatattacagacacctaaacacaaaaacatatagtacatttgagacttctctgtaaaaacactaaatccaaaagacaatggagaaatatttagagcactaagagaaaaattgtagcctgaggaatctggtcacctaagttgtcagtcatttgtgatggtagttgtaaacatatgtgcattattagagaaatatcagtgttccctccctggaaaaaaaaaaagatttaagatttattaaagatgtagtaccatttctagatatgaatcaaagttaagaatttaagaatagaacatcttaagatcttagaggaagggatgaagagaagttggttaaggagtacaaaaatatagttagaaggaataagttctagtagtcagtattacagtagggaaattacagttaataatttattgtatatttcaaaatagccagaagagaagatttatgttcccaacataaaagataaatgcttggagtaatgggtatctcagatgctctgatttgattattatacactgtatatggtgtcagaatatcacatgtacccccaaaatatgtacaactattatgtatcagttaaaaatttttttgatgggaaatttatgatccaaaaataccattggatgaactttgaaatcagttaaatatgtagaactttcttaattattatatatgtccagaataattcctgaagattttacattagatatatgtatatgataatgtgagagaacagaaccaaattgttttcaaagattgagcaaagcatcctagcttaggaagaaaaagtcacgtaaccattactcttgtccctagcgtatagttaaaagttattatttcatcctagagtttgaaataaataaaacaagtatatatataaaatagattattacactttctaagttgtcagagttaaaaaaattaagtgagtttttttaaaagaatgtaatgaaataagaaatttaagtaagagcaaactgagtcatgacaataaatgtaaatagtttaagcttcctattttaaaaagtgggttcaaaaatagacttttaaaatatcaggaccaggcatggtagctcatgcctgtaatcccaagactctggaaatccaaggtgggagaattgcttgagtgcaggagttcaagactagcctgggcaacataataagatcctgtctctcaaaaaataaaaacttacctgggcatggtggcatgcgcctgtagtcctagctactcgggaggctgaggtgggaggattgcttgagcctgggaagtcgaggctgcagtgagccataatcatgccactgcattccaaccggagtgatagagggagatcctatctcaaaaataatactaataataaataaaataaaatatcaggtattttacttgcaagattcacacattaaacaaaatgacataaagtttaaaagtaaaagtgtgcaaaaatatagacagttgtctatgtttttcttcctgaaaagaaacttatagctgtctcatttatgaatgtgtgttgagaacaaaaaaccctatataaatatatgaacacattgaaattaatcttgttaaaagaataacctatctcagccagatagttccccccaagaactgcttaataattggatatcagtcaatattaagatgttagtgcaaataaattgaataaaaccatataatataaaaataacaaggaaaaaagctatcatattttaattggaaataggatagtaatggattttttagaacattggtgttcatgtgtgttaaaaccatacatgtgagcaacaaacctagagcatgctgtggggttctaggaaaatttaaatccacagtatacatggtatattatgtatgatttcgatagttttccatgggtccctttggaaagggagacacctagcctacaggttcttcctttaaaatcaggacctgcaagggaagatgtcttttcatcgtaactgtttaataatcttgaagtaaatatgttaaggcatgaaacataaagatatgatagcttttttcaataggtatttgtccatatttgttgcatagcaggcatcataataagtgctttacatgtattaactcatctaattctcacatgcatcctataaaatcagtataaactgaagaactgaggcacagaggttaagaaatgtacccaggatcatataactaataatagtgaatccaggtcctactgattctatggtgatgtgcctgccttggcctcccaaaatgctaggactacaggtgtgagccataacaggctccctgttatgccagtgtgtagtgtacagtgtggacaaataatgtgacacttagtgaggagaacaaatgatcattattgatggtttgaatgcaaatattagaaaacctatgtgaatcaacctgtgtgaacaaaataagtatacaaaattaaagattatagctagaaacaataagaaaatattggagaaaaatacaaaaattaacagatagatatcacctacatagaaactacaaaagtcctgaaagatcttaaaagtaaattttccaaaaatacagattcaaatagaaaaaatttattagtagatattacacataggttgcactttatatataccagttgtttccagattaatttttaggtttaatccaattgtaatggtttccagtggatgatttctttagttgcaaaattaggctaaagttaatgcagaaaaatacaaaaggaagattaactgaaatatttaaatatttaaaacaaaaggccaggcacagtggctcacacttgtagtcctagcattttgggaggccaaggcaggcagatcacttgaggccagcagttcaagaccagcctggccaacatgttgaaacctagtctctactaaaaatacaaaaaattagccaggcatgatgttgtgtacctgttatcccagctacttgagtggctgaggcatgagaattgcttgaacccgggaggtggaggtttcagtgagcctagatcatgccacctcactccagcctgggctacaagagcgaaactctgtcttaaaaaaaaaaaaaaaaagaaattgtacatataattaataaatattattgttaggttgctttagcttttgagggaaggaattttatctcacaaactaaaaattacatttcagataactaacaaacttaaatgtaaaaatctaataggcagatatttccataagaaattaaaaatggctggctggtttaacattccagtgtggaaagatattctgttcttaaaagggataaaagacctcccaaataaagacagcattttctgcctgcacacagaagactcaataagtatttgttgaatgaatgaataaatctaatgtataagtttttttttttttggtcaaaaaccaactcactgagaaaaatatgtaatatttttatagtcatagcattaatagtcttacatatagctagtgataataattgctaatacttattgagcagctacataatgtggaataagaaggaccttctgagtattttataattatcctataatccttggaacaaaattatgagtaagtttcatcccttttgttaacttgtaaagaagttgcataaattgatgtcataaatattaagataacagctaagtgagcaaaaggaatgaaaaaataaaaccagatacaagagaaaataacattgactaataaaatgtagtaatattttaaaagagattcagattggaataccaagatatttttgcttatcaaaaaggtatttaaaagtttattagtagtaaggtagcgagcaaggctttttggtagaatgctggtagaaaggtaacagtacaacatgtgacatggtttggctgtgtccccacccaaatctcatcttgaattgtaactcccaaaattcccgtgtgtcatgggaggaactcaatgggaggtaattgaatcatgggagcaggtctttcccatgctgttctcatcatagtgaataagtcttacaagatctgatggttttaaaaatgggagtttccctgcacaagctctctctttgtctgccaccatccatgtaagatgtgacttgctccaccttgccttccaccatgattgtgaggccacagccatgtggaactttaagtccattaaacctctttcatttgtaaattgcccagtctcagttatgtctttatcagcggtgtgaaaatggactaatacactgtctttgaagtggttcaggtttttccagcagtattcaatagcctggttataattatggaagtaaagttcactaaatttgaacagtgcctgcagttttaccagacaagtgtatggataggaagtacatgaaaatggcgggtgatgattgaagtgatggattgtggaatcaaagcatcaggaattagataagaggggcttgataaataaagagaatatactgggctcagagcataataaactgcttattattttacactgctaagtctggagtggtttgatactcagcaatagtaactggaacaaataaatataaattgttaagagtaagcactcaaattgtagctataattatttatgaagttgcgtatacattcttttaaaaggggatagttgagccaaaatttcctcacttttattgtgtataccgtattatctttattttatcctctctcactttatttttataatagttcttttgtagaagtgataacttcttcatcttatgaattacattctctcaaactttttgttttgtgcagtgaattgattttaaaagggtagaaaatcttcatggtttcctaggtattaataatatctttcatgtgttcattcacctatataagtgctggcctggatttagcttataaatctgtaattaccttggctgtgtcaaaaacaagtttagaaccctagtgttttcagggggtaactaaatttaaaaagccttaaatgggctgggtgtggtggctcacacctgtaatcccagcactttgggaggccaaggtgggctgatcacgaagtcaggagttcaagaccagcctggccaacatagtgaaaccctgtctctactaaaaatacaaaaaaaaaaaaattagccaggtgtggtggcaggcagctgtagtcccagctacttgggaggccgaggcaggagaattacttgaagccgggaggtggaggttgcagtgagctgaaatctcacaactgcactccagctcaggtgacagagtgagactctgtctcaaaaaaaaaaaaaaaaaaaaaaaaaaaaagccttaaatggattatactggttgaagtcatttaactgtatcccagagcaaagcccagcagtatttaaaggattcccaacaaaatccagccaccaacaatataaaattgataatgtcagatattcagtcaaatctaccaggcatttaaaaaaagaaagataacccgacccattaccaaaagataagtcaatcaatagaaacagactctaggagaggaataggaaaacataaaaaagatgtaaaagaaagaaatagaacatattttcaaagaccaaattatacttctacagattaaaaaaataaaagtattcaaaattttaaattgactgtatgcaattagcatactggacagtgcattaaaatgatcagtaaatgtcaagaaataacaatataaattactcaaatcaaacaaacaaaaaaaaaaacagtggtgggctggcatggcctgtccaggtttataagagctggttgttaaatattagggaattttgtaaactggttgttaaaccattagtaacttgaaattggctatttatgtgaatacttacatcatggaagttggtaaacactagactaggctttttgtttatactgccctatccttactggagagtttaacagcataccactaaaaaaggcctttggaataggagttggagaggaggaggaagagaacaccaatgacctataggacaatattaggcattttaacttatgtgtacttgaaacctgaggagtggggacagaatacattggaagaaataatgactaaaaactttgtagactgtgtggaaacaatacacccacagatcagagaagctcaacaggtcataaatgaagaaatatgaaaaaatcatactacagtttctgaaaatgaaggataaattggaaatcttaaaagtagccagagaaaataaagacattttatataggagaataatgacagcagacttctcatcagaaactattctagctaaaagacaatggaacaatattttaaaatactgaatgaaaaaaaaattgtcaacctaaaattctcggtcctcaaaaagtttttatttcgccttcatttttgcaagatatgtctccttgcaaaaatgaaggcgaaataaaaactttttgaggtgcacaaaagctgaaagaatttgtcagtaaacctgtagtataaaaaagtgttaaaaaaaaaaaaaggacaacaataccaagtggaaattttgatttacaaaaaagaagagcacaacaaatagtaaacgtgatatagaaggatttttctcttacttaaaaatctctttaaaagatattttataaaagcaagaataattaggtttttttaataggatttataataaacgttgagtgtccctaatctgaaatccaaaatggtcaagaatccaaaacattttgagcatgaatatgctcaaaggaaatgctcatttgagcgttttggattttgaattttaaattagggatgttgaaccagtaaatataatgcagatatacaaaatccaaagaaatctgaaacactttttgtctcaagcattttgtataagggatattcaacctttatttgtagaagtaaatgatttaacaactgtcttagttttctgttgcttataacagaataccagaaacgtaatttataaagaaaaggaatttatttcttacgggttttaaggctgagaagtccaaggtcaaggattcacatctgatgagagcctttttgctggtgaggactctacagtcccaaggcagtgcagagcatcatatgccaagggggctgaatgtgttagctcaagtctgcttcttataaagccaccagccccaccgttatgatgatctaatccagccgtccccaacctttttggcaccaggggccagttttgtggaagacaatttttccatggagtgggccgggggggatggtttcaggatgaaagtgttccatctcagatcatcaggtattagttagattctcataaggaacgtgcaacctaggtctcttgcctgcgtcatttgtaatagggttgttgctcctatgagaatctaatgctgctgctgatctgacaggaggtggagctcagccaataatgctctcacccaccactcacttcctgctgtgtggcctgatttgtaaaaggccatggaccagtactggtctgaggcctggggcatgaggacccctgccctaatctgttagcccattaatccataaattggttaacccattgatggattaatccacccacgagggcaaagtcctcattactcaatcaccactaaaaggccccaactttcaatactgccaaattaaggactaaattttaacatgagtttttgagaggacaaatgttcagactgtaagacccacgtagcacaaagtatgggaggaaataaatagaagtatacttttgtgagtttctttcttcttttttttttttaagacagggtcttgctctgtcactcaggctggagtgcagtggtgagagcacagctcactgcagccttcacctcctgggcttaagcaattctcccacctccacaccctcagtagcttggactacaggtgcacaccaccacatctggctaatttttgtttttttctgtagagacagtgtctcactgtattgcccaggctggtcttgaacttctgggtccatgtgatcctcctgccttgtgttcccaaagtgcaattacaggcgtgagccaccacgcctggctgaatttcttaaaatgtatgtgaagtggcattatttaatggtagaaaattgtattagtctgctctcactgctataaagagctaactgagactgggtaatttatgaaaaaaagagatttagtcacctcacagttcagcacgctgtattggaggggcatggctggggaggcttccagacactacaataatggtggaatgggaagcaggcacagtcttcacatggccagagctggagagagagtgagcaaagggagaagtgctacacactttcaaacaacaggatctcaggagaactcatgagaacagcaagagggaagttgacacccatgattcagtcacctcccacctggtgcctctttcaacatgtggtaattcatcatgagatttgggtggatacacagagccaaaccatatcattccacccctggcccctcccaaatctcatgtccttctcacatttcgaaacacaatcatgctttctcaacagttccccaagtcttaacttatttcaacatgaacccgaaattccacagtccaaaatctcatctgtcacaaggcaagtctcttccatctatgagcctgtaaaataaaaaaaaagttagttacttccaagatacaatgtggggacagggtttgggtaaatgatcccattccaaaagtgagagattgcccaaaacaaaggggctataggccccatgcaagtccagaacccagcagggcagtcattaaattttaaagctccaaaataatctcctttgactccatgtctcacatctagacgaccctgacacaaggggtaggctcccaaggccttgggcagctctaccctgtggctctgcagggtacagcccctgcagctgctttcactggctggcattgagtgcctgtggcttttctgggtgcatggtgcaaactatctggatctacaattctgaggtctggaggacagtggccctcttctcacagatctactaggcagtgcccctaggcagtgccccagtggagactgtgtgggggctgtaacccctcatttctcttctgcactgccctagtagaggttctccatgagggttccacccctgcagtggacttctacctggacatccaagcatttctatacatcctctgtaatctaggcagaggtttctaaacctcacctcttgccttctgcacacccacaggctcaataccacatggaagctgccaagacttgaggctttcaccctctgaattaatagcctgagctgtatcttggccccttttagccacagctggagccagagcagctgggacacagggccccatgtctcaaggctgcacagagcagtgaggccctgggcctggcccatgaaaccattttttcctcctaggcttccaggcctgtgataggaagggctgctgtggaggtctctgaaatgaattggaggcattttccccattgtctgtgctattaacatttggcttttctttatttgtgcacatttctgcagcctagaattcctcctcagaaaactggtttttctttttaacctcttgatcaggctgcaaattttccaaactttcgtgctctgcttcccttttaaatataaattcctgcttcaagtcatttctttctttatgcaaatgagcatagttttttagcagcaactaggccacatctgaacactttgctgcttagacatttctttcaccagataccctaaatcatctctctcaagttcagtgctctgcatatctctagagcagggtcacagtgccgccagtctctgctaaagtatagcaagagtggcctttactccagttcccaataagttcttcatctccatttgagacctcgtcagcctggccatctctgttcatatcagtatctgcattttggtcataaccattcaacaagtctctatgaagttccaaaccttcctgtcttcttctgagcccttcaaactgttccaacttttgcctgttacccagttccaaagtcacttccacattttcaggtatctttatagcaatgccccacttctctggtaccaattttcatattagtccgttctcacactgctctaaagaactacctgaggctcggcgctgtggctcatgcctgtaatcccagcactttgggaggccaaggtgggcagatcacctgaggtcaggtgtttgagactagcctggccaacatggtgaaaccctctctgtactaaaaataaaaaaaaaattagccgggtgtggtggcaaatgcctgtagtcccagctactcaggaggctgaggcaggagaacaacttgaacctgggaggcagaggctgcagtgagccaggatcacaccactgcattccagcctgggcaacagagcggagactgggtaatttatgagaaaagaggtttaattactcacaattcaacaggctatacaggaggcatagctggggagacctcaggaaatttatattcgtggtggaaggtgaaggggaagcaggcatggacttcacatggccagagcaggagagagagagagagagagtgcgaaggaggacgtgctacacactttcaagcaatcagatcttgcaagaactccatcacgagaacagcaaggggatatccgtccccatgattcagtcacctcccaccaggcccctccttcaacacatggaaattacaattcaacatgagatttgggtggagacacagagccaaaccatatcaacaatgagaagctaaatatgtgtattataaaacctagagtcttcataaatttgttttaaaaggatagctaaaaagccaataatgataatggaatcacaaaaatctattgagaaagatagttggaaaagagggcagagagggccgggcatggtggctcacgcctgtaatcccagcattttgggaggccgaggcgagtggatcacgaggtcaggagatagagaccatcctggctaacacagtgaaaccccgtctctactaaaaatacaaaaaattagccgggcgtggtgttgggcgcctgtagtcccagctactccagaggctggggcaggagaatggcatgaacccgggaggtggagcttgcagtgagccgagatcacaccactgcactccagcctgggtgacagagcgagactctgtctcaaaaaaaaagaaaaaaaaaaagaggacaaagagacaaaaaacaaataggacaaacagaaaggaaataatagaatagtgtatttaaactcagcaatatcaagaataatttaaatgtggatggtccaaataaaaagtagaaagtgtcagattggcaaataagacccaactatatgttgactataagaaacttgctttcaatgtaagggcataggtaggttaatatttaaagaatggaaacatataccatgctaacactagtaaaaagaaaactggagttgttatattgatagcagagaaagtatattttacaataaagaatattgccaaagatgaaaaggaatctttttaatgataaaggtgtcagtatcaaggatataactgactgtgtgtgaaactcataacaaagcttcaaaatatgcaaagcaaaaacctatagaaatgaaatgagaaatagataaatcagcaattacagttagatatgttagtatcctctttcagaaattgatacaacaagtagtcaaaaaatcaataagaatgtagatttcagtaactgacaaatttgagttgagttttatgggaacattgtacccaacaaacacagaatactcattgttttctagtgcatatggaatattcaccgagacagacatcattctggcccataaaacaagtctacatagctttattttatatataaaaattaaataaaaattttaaatgtaaaagaaaattttaaaataatacaaaatgttttcttaggccacaacagcatcaaattagaaatagttaaccaaaagttatctgcagtatcaccaaatatttggaagttcaataagaccccagatcaatgtattgaagaagaaaacacaaaagaattagaacatattttgaactaactaaaaatgaaattacagcatatcaaaatttatggaatgctgctgaagcattacttagaaggaaacttgtagcattacattaaaaatgaggaatggtctgagatccatcattgaagctttcaccttaaaaaagtgtgaagaacaaattagacaaaataaacacaggatagaaataagaagagtataaatcagtaaaatagaaaaccttcagtaaatccaaatgtaattttttaaaagagtaataaaattggttatcatatgtgttgggggtttccatggccacccccgggcttgataattcactagagagactcacaggactcaaaagctgttatacccacaccatttattactgtaaaaggatacagattaaaatcagcaaagggaaaaggtgcatgggacacagcccaggagaaaccaggtgcaagctttcaggtacaccccccagtagagttgcaagggactcacttaattcctccaacaacatgtgacaaaatgtgcaaagtgttgccacccagggaagctcaacccaagccttgatgttcatggttttgtgtagagggctatgtgggctttgtgtagaggcagagcattcagtgcctgtgtcaccgacctcagctgctcagactccaaacccccaaagcaaaaacacatgttcaccataaatcacattgctaacataagctttctggcaaaactgttacagtgtggcccaaggcttcaggcatttagaaacactcttatcaagcacaacatttcaaggactggtcctaaaaatatgcccttcttgggatttgcagctttttagcaacccaggctcatgaattaactgttttctgtactacctgtaaccaggctgattgggaaacaaggaaagaagacgcaaattgccgatatcaggattgtaagagggtattcactttagatgctacagaccttaaaaggataataagagtattatgagtaactttatgacaataaatttagcagtttagatgaaatgtgtaaattacatgaagggcacaaactactgaagctcactcaaaaagaaatagataactcgaacattatatatcttttaaaaaaacggaatctgtagttaaaaatcttttgtcaaaggaaactactcccaggtggcttcattagtaacttttctcaaacatttgatgaaagaataatgccaattctatacagactcttccagactgtaaaataagaggtgatccttgtccactcctttttgtgggcaataattacacagctgccaaagccagacaaagattgcaagaaaaatacataccaaaatccttttaaatatagatggcaaacatcttcaacaaaatattagaaaatcaatcttatgaaaaggataataccccatgtctagctggagtttatgtcaggaatatactgtcagttcagtgttagaaaaagcatccaatgtaattcaccatatccaaagattgaattagaaaaccatgagatcatctcaataaatggagaaaaaagacttgacaacatttattactcattcttaaaccagcaatagatgagacttgtctaaggtaatgagttatctcaagggatttttcacagtcagttacagattgaactccttgttctactcatactctcagtactgcatttgactagtctaaaaaaaaaaaaagaatagacagtaacttcctcaacctaataaagggcatctaaaaaatatgcagctagcatcatgcttaatggcacaaaactgaatgcttttgctctaagctgagcatgtgtcagtcactgtgtgtattcacaattgtactggagaccctgacgaatgcggtaatgcaatttttacaggcatacagattgtaaaggaagaagtaaactgtgtattcacaaatgacataatcgtctatgttaatatcccaaaaaaatctacaaaaaaagtgctactagaagttacaggtggttcttatgatgggattatgtcctttttaaacggaaagtattgtaagttgaaaatatatttaatacgcctaagcaaccaagcatcagagcttgtcctagcctaccttaagtgtgctcagaacatttacattagcctacagttgtgcaaaattaataccaagcccattttgtaataaagtgttgaatatctcacataatttattagatactgtactgaaagtgaataacagaataattgtatagatacttggaagtatggtttctactgaatgcgtgtttatgcaccatcataaagtaaaaaaaatcatacgttgaaccatcataaatagaaccattgtgattcagggaccgtctgtattagggagcttagcagaatatatggtcaatgtgtaaaaaccaattgtatttctataccagtaatgaatcacttgaaattaaattttaaaataatttataatagaaaaaatgtgtagcattcagggataaatttatcaaaaatgtgcaagagctgtacactgaacccctcaaagtgctgaatataaagacctaagtaaatagatattcatgttcatggatcagaagaatcaacattgtcaaatgtccgttctctgacaaatgatctgttaaattcaatcctaatcaatgccaggagacttctttttctttaaaatctagatgagaaatagacaaatcagcaattacagttagatatgtcagtatcctctctcagaaattaatagaagtagtcaaaaaaccagaaatttattgggaactgtaaacaacagacctagaacagccaaaacaattttgaaaaggaacaaagttggaattacactttctgattcaaaactcattataaagcaatagtgatgaatacaatctggaattgtcataaagataggcatataaatcagtagagcagaatagggtatagaaatagattcaaatatatatgttcaattgactcttaacaaagttgccaaggtaattcactaaaggcaaggataatcttttcaacaaatggtcctggaacaatcagatattcatatataataaacttgggatcatgtcatgtttaaaaattaactagaagtggatcaaagacatatttaagagctaaaactgtagaacttataagagaaacataggataattgtaaccttgggttgagcaaagatttctcaggatacaaaaacatgaaccataaaagaaaaaagggctaaattggactttgtgaaaattgaaagcattgctacaaaaatgaaaatattttatagctataggtttagataaaatatttttaaagcactatctgatacaatgttgtatctagaatattttaagagctcttacagctcactgatatgaaaacaaacagcctaattaaaaagggcaaaagatttggacacttaacgaaaggacagctatagatagcaaatagacacatgtaaagagtcttgctgtcatagtaattaggaaaatgcagtttaaaacaatactgaggtactattgcacacctaatacaacagctacaaaacaaaaattgacagtattaagtgcaaacaaggatggtaagtaactggaactctcttagaaattgctgataaaaatgcgaaatagtacagccagtttgagaagctgtttggcaattgtttaataagttaaatatctgtttaccatgtagcacagcaattccacttctgggtatttacccaacagaaatgaaaacatatctaatactagcacaaaactggaaataattcacatctattaattggtgtatggagaaacaaaatgtggcatataactgtacaatggaatactactccacaaaaaaggaataaactgctatgaataaagcaacatggatgaatcctaaaagctttgtgctgaatgaaggaaaccagacacaaaaggctatagatggtataatttcatttatgtgaaagtctagacaaggcaaagctattgtgataccagatcagtggttgagtagggtcagagcatggagggaaggcattgactgtgtaacaggacatgtagaatgatggaaatgttcaatgtcatgattatggtggtggtcacatgactgcatacatttgccaaaattcatttaattatacaattaaaattggcaaattttattgatgtaagctatatcttttttttttttttttttttttttttttttgagacggagtctcgctctgtcgcccaggccggactgcggactgcagtggcgcaatctcggctcactgcaagctccgcttcccaggttcacgccattctcctgcctcagcctccccagtagctgggactacaggtgcccgccaccgcgcccggctaattttttgtatttttagtagagacggggtttcaccttgttagccaggatggtctcgatctcctgacctcatgatccacccgcctcggcctcccaaagtgctgggattacaggcgtgagccaccgcgcccggcctgatgtaagctatatcttaataaagctgattttaatagcagataaaccaaagcaaaaaaaacctgaatcatttaaagaggtaaaaaattggcaaaggtataataggaacatgaatgaacaaatgtatttgggacgtttcaaaattcaaacataatttgatccatgaaactgctgaattccacaaaggagacttttttaaaaaaaatagtacagtacaactagaagttaacaaaagtttataatttacaaactacttgggaatttatcccataaagctgttagagggaaaaaggaaatcaaaaccacaaaatcaggctatttaaaaagtaatgaaaatgtcagtataatgctatgaaaggtagagatgctactgaagatactctggaaacttcattcattgctgtatttaaaaaacagaactaaagaaaaagacaaattaataataaagtcataaaattaatgttattagtgcaaaggctgacagatcagtggtaaataaacaaaaaacagccttttctgattagtttgcctggagtttcaattttaaaattttttccttgagaccataaatctttcttctctttctaattcttgattagctcttttttctaattatttctttcaggagtatcctcacaatttgtatatattggtgctacattattggtactcactgaaaaagtagaaacaaaaatttgcatatgccccattttaacataatggaaattcaaggttattgaggtatgaataaaagtcataaaaaacaaaaagaagattctgaaacaaatagcaattttttcaaatgttattttatgttccaggatacatgtgtaggacttgcaagtttgttacataggtaacaaacctctccacccatcacctaggtattaagccacacatgcattagctatttatcctgatgctctccctcccccaaactccctgacaggccccagtgtttgttgttcctctccctgtgtccatgtgttctcggtgttcagctcccacgtacaagtgataacatgcagtgtttggttttctgttcctgcgttttatccatgtccctgcaaaggacatgatctcgttcctttttatggctgcctagtattcattggtatatatgaaccacattttctttatccagtctatcattgatgggcatttgggttgattccatgtctttgctattgtgagtagtgctgcagtgaacatacgcatgcatgtatctttataatagaatgacatatattcctttgggtatatacccaataatgggattgcttggtcaaatagcaattctggttctaggtctttgtggaatcgccacagtgtcttccacaatggttgaactaatttacattcccatcaacagtgtaaaagctttcctatttctccatagcttcaccagcatctgttgtttcttgactttttaataattgccattctgactggtgtgagatggtatctcattgtggttttgatttgcattctctaaccatcagtgatgttgacctttttatcatgtttgttggccccataaatgtcttcttttaagaagtgtgtgttcatatcctttgcccacttttttgtggggtcgtttagtttttttctcacaaatttgtttaagttccttatagattctggatattagacctttgtcaaatggatagattacaaaaattttctcccattctgtaggttgtctgttcattctgatgatagtttcttttgctgtgcagaagctctgtagtttaattagatcctgtttgtcaatttttgtttttattgcagttgctgttgacatttttgttatgaaatctttgcctgtgcctgtgtcctgaatggtattgcctagattttcttctagggttttcatagttttgggttttacatttaagtgtttaagttatcttgagttaatttttgtataaggtataaggaaggggtccagtttcaattttctgcatatggctagacagttttcccagcaccatttattaaatagggaatcctttccctattggttgtttttgtcaggtttgtcaaatacaggatggttgatgtgtagtcttatttctgagatcttatttctgttccattggtctgtatgtctgtttttgttcctgtaccatgctgttttggttactccagtatagttcgaagtcaggtagtgtgatgcctccagctttgttctttttgtttaggattgtcttggctatacaggctctttttttgttccatatgaattttaaagtagttttttctaattctgtgaagaatgtcaatggtagtttaataagaatagcatagaatttataaattactttgggcagtatgactgtggatttgtcataaatggctcttattttgaggtatgttccataagtaccttgtttattgagagtttttaacatgaagcaatgttgaattttatcaaaggcctttcctgtgtctattcagataatcatatggtttttgtctttagttctgttcatgtgatgaattatgtttattgatttgcgtatgttgaaccagccttgcatcccgtggatgaagccgacttgatggtggtggataagctttttgatgtgctgctggatttggttgcaagtattttattgaggatatttgcatcagtgttcgtcagggatattggccttaactgttttttctttctttgttgcatctctgccaggttttggtatccggatgatgctggcctcataaaatgagttaggaaatagtccctccttttcaattatttggaatagttttagtagaaatggttccagttctgttgtgtacctctggtagaattcagctgtaaatccatctggtcctgggctttttttgcttgtttgtttctaggctgtttattactgcctcaatttcagaacttgttattagtctcttcagggattcaacttcttcctgcttcagtcttgggagggtgtatgtgtccagcaatttatccatcttttctagattttctagtttatttgcatagagttgtttatagtattctctgatggttgtctgcatttctgtggggtcgatggggatatcccctttatcattttttattgtgtctatttgattcttctcttaagtgattcttgtgcctcagcctcccacgtagctgagattacaggtgtgcaccgtcacgcctggctaatttttgtatttttgatagagatagggtttcaccatgttggccaggctgatctcgaactcctgacctcatgtgatccacccacctcggcctcccaaactgttgggattacaggcatgagccaccatgcccagcctcattgattttttgaagggttttttgtgtctctgtatcctttatttctgctctgatcttggttatttcttgtcttctgctagctttgggttttgtgtgtgtgtattttctgggggtttttttccttatttatttatttttactgttttaaattaaatattgcttctaaaacagaacatgtgaatataattagatttgattagtgaatttttttggaggctgtggcaccataatttaccctcaaagaacagatagaatttggaaatatattttaggtgagcaaaagagtcttagagttggtaaaatcttagatatgtattgggatactagttctttcagcattttttaaatcacctttttatatacattggatattttttaactacttttaaaatatggggagtttcaaagatcaaaccccagtatgtattgttaagtttattcatttctggcacatttctttattttgattttagattcatcttgtagcaccgaatgttaacatgtaaggtgcatacattacaatgtgacattgtgcatgacaaaatgaatccaaagtgttaatccaaaatgttaatctgaagttacattcagagattattaatgaaattctggaagcataaattatgagagtactcatcaaatgctctaagatagtatcactatgtccaggtaaaaaaactaaataattttcccaataattccacatagttgaacattaattattggtttttcttgatacaactaatctacgcttagctgaaactttattatgtcttcctttttagcctgacactattagaagcaatcttcactatatgaaagaaactacaagtgatgatgtaagtactgctaacactaacagcctgaagaagagcatgagagtcactaaaaacaaattgaggaatacacagtcagcaatggtttttgtccattctgtttttcaacacatcagttaaacttttatttttatcattcagaattttattttaatatcagcagttgggttttcttgctccagtatgcttttgcatttctttattaatattaactatacttgttttaaatacttacatatgatatgtattttcctttggtgttcatttatttattgtatttgatttggtggctttccttcattgtgctaccttcctttagtgtttgttaattttcagttgtcaagccatctttacatttgagaatctctcttctcttccttgttagttgtttttaacatggtctgcctctgcagtttatgggaattatacctacctgaagcatactgccctttctctctttgctgggatgcttaatcccatgggtgaaagtcaacacaaatggaggtgggaaacagagctgttcatcccagctcctcgattggtcatcctctagtttatcccctcctcctcttccttgtattacttgactcttatccttatttatttttttctattaaaaatatatctcattttaaataattttaattggggaaggaggtacaagattgtgcttagtctgtcattggatttaacttaatatgtaatatttagcagcattttagtgatacacttagatttactgcagggtgatcttagagctgtagacttttgcttttagagtgtaattatgaagcaaaataaatgacccatgtatatttcctattgggtgacctgaaatgtcacattcaatggctcttttagcaatttctcgaatatctattagagtgtagatcatgaggaaaatatgtatgaggaaaatagcatttgagatttgagcaattaattcacttcttataggtccttaagtacttttttcccatgtcaattaactcatttaatctgaagttacattcagagattactaatcaaattctggaagcataaattatgagagtactcatatgctctaaaatagtgtcactatgtccagatgaaaaactaaataatcctcccaataattccacattgtcaaatattaattattaggtttttctttatataactaatctatgtgtaactgaaactttgttatcatgtcttcttttcctagcccgacactattagaagcaatcttccccatattaaagaaactacaagtgatgatgtaagtgctgctaacactaacaacctgaagaagagcacgagagtcactaaaaacaaattgaggaacacacagttagcaactgaaaatcctaatggtgatgctagtgtagaggaagacaaacaaggaaagccaaataaaaaggtgataaagacggtgccccagttgactacacaagacctgaaaccggaaactcctgagaataaggttgattctacacaccagaaaacacatacaaagccacagccaggcgttgatcatcagaaaagtgagaaggcaaatgagggaagagaagagactgatttagaagaggatgaagaattgatgcaagcatatcagtgccatgtaactgaagaaatggcaaaggagattaagaggaaaataagaaagaaactgaaagaacagttgacttactttccctcagatactttattccatgatgacaaactaagcagtgaaaaaaggaaaaagaaaaaggaagttccagtcttctctaaagctgaaacaaggtatttttgcattgataaatgtaaaatatcctcttagaaaaacactgttattttcaggttttgaatattatctgtggtttaacaaagaaaattcttacgcttttatttggagacattgtcactaagataagaacagctaacttttacataacaccttactatgtactaggtgctttacgagaattaactcatttatttcttatgacaatcttatgaggaaaagtaatattcttcctatcttgctgatgaggaaatggaagtacagaactagtaagaggctgagccagatccttgtccctaccctgaactactcacttacatctgctttcaaagtaatagaaacctaattacttccccttttttgagttacaaatacctgtttggatatataaatataactttttttcttatacagataacattagctcattgtagaaaaactattcaaagataatcactattggcaatttggtattctaatctttttctctatatgatgcttatatatgtatgtacttctatatagagtgtgaggttaagtgaacatacacatatttatatgttttctatttggagaaaacaataaggtaaaaatgctttttaactgctataattaactttgttcccccctgcagttctcctctagagaaacaacttgaggtgggaacattttatatgtgactattctttggcattcagcatcaatttcccctaaagccctcagccaaaaataattcccctcttttcaaaagctaggtgaccggtggtaataaagatatggcaaaccaagttgctgcagggacatgatagtatatattagttatctgttgctccattaaaaagatgatcccagaatttagcagcttaagacaacaagcatttactgtctcagagtttctgtgggccagcaatctgagagtgacttcactgggtgtctctgtcaatcacaggttgcaatcaggatgttagctgggactgaagtcacctcaagccttgactgggggaggatctgtcaagtgacatagctgttagaaggccttagaagatccagttctaagctcattcatgtggttgttggtaggcctcaggtcctgactggctttgggcccggtataccagttccttgccacatggactgtctccatatggtctacacacaacatggccacttgcttccccagaccaagggctctgagagagtgagagcaagacagaagtcacagtctttttggaacctaatcttataagtggcattcattacttttatcatattctgtctgtcagaagtaagtcactagtccagcccacacacaaaagaaaggggattacacaaagacatgaatatgaagaggtggggatcagtaaggtccatcttagaggcttcctaccatagtatactataaatcttccttctcatagctaccacctctgtggtagactggtaagccatagtcaatatgaaatagggttagctcatgaatttttaataacacgtgacagtggcacgcaaagggtagctgttctccttaaagaacagggtttggtgatgtgatcaaatagaatggctttctggaatgactaatttgaaatatttctctagtcttactttcctcaacccattttttttttgaaatatgactaaaaatattggaaattaattttttattatttacatgcagattttttactagatacattaaaatgttagtaggctggtttttctttaaactcagtatgcttctgggttgctacttcttaccatttactagttcatgtgatatagattttaattttagtaatagccttctgaaaatgtagtgactcaccaaggaattaatttttacctagaaatccatgcctgagcaacatagtgaaagtccatctctacaaaaattacaaaaattagccaggtatggtgcctgtagtctcagctatttgggaggcagaagtgggaggattgctggagcctgggaggttgaggcagcagtgagctatgattgtaccactgcactccaacttgggcgacagcgcgaaacccagtcttaaaaaaaaaagaaaagaaaaaagagaaatcaaaagttgtgcatgtgaagcctcttgaagacggaacaaacctagaatactttttatacctttaaataaggtaatttaaaaattggttgataaatcatttacttggcagcagggtgggcatgctttgataagtcctatgtaaagagagatcaattgctcataaaatattaatacaatttccctttcccctggggtttagagctcagttttagttgaatcgtgtaactcctcacgaagtataaaataccacctatgatacctatttgacacttaaccattttagtgtataagaaaatacatgcatctctcaagagacaataatagtgattttaggattatctttgctcctatttactgttcactctgttgcatcatgaataataattataatgataatatatctgtaatggctgatacttggattatatttgtagtacattgaccatctctggtgacacagttgaaggtgaacaaaagaaagaatcttcagttagatcagtttcttcagattctcatcaagatgatgaaataagctcaatggaacaaagcacagaagacagcatgcaagatgatacaaaacctaaaccaaaaaaaacaaaaaagaagactaaagcaggtttgctatacaaattaaatgaaaaattgtgtatgttggtagaaataacttgattctaggaattttagccctttaaaactgatgggtatacttgaaaataattcaatataggatatttggtacttgttcttgaattcatctagattaaagcacacatgtatttgtagctgtaggtctctgatgagtttgtatcacttgagtcttctctgattttttttatttttgagatggtgtcttactctgtctcccaggctggaatgcagtggcacgatctcggctcattgcaacctccacctcccgggttaaagcgattctcctgcctcggcctcctgagtagctgggattgcagatgcatgccaccatacccggctaatttttgtattgttagtagagacggggtttcaccatgttggccaagctggtctcgaactcatgacctcaagtgatccacctgcctcagcctcccaaaatgctggggttacaggcatgagccaccatgcctgaccttctctgattcttgacatactttaaattcaactctaaaatgatactgactttgtagttgctattgggtcatagaggatttcttctttaaaccattgagtttacatcctctaaatggttaggactcagttgttgaaagctataaatggtcagcagccaataaacatttctgatgttaaggctgcatcctgtccaacatggtatcctcccaattcgtcagcctaataccacttctttcctttctcaacttttctctttgccttgttgatttctgtcttcttcttttcttgtttgttttctcttatttttctttacatgttcttttctactcatacatccttttttagtctttcagtttccatttgattggccaaaaattgggattaaaatgggcaattttagattttatagtacttattcattagaagatgtaagtgatgatgttttgtggtttctataattaaaattttaaaatcttttgttgaagcataatgtgtatatagatatatatagaaaagcactaagcagtatacttgttttatgtgtttctatatatataaagcactaagcagtatactcatatacatatttttaaagtttttttcacaaactgaacatacctataaaatcattacctaaatttggaaacagaacatcattagcacccagaaaaatcaccttcccgttagttgccctgtgggagtaaccactacctggacatctaacagagtttatttttgcttatttttatactttaatatgaatagaatgataaatactgtgctccttgtgcctgactttttttactcaatgttaattttgtaagatttatactactgttgcttgcatacagttgagcttattcattcttaattctgtttttgtattatttagatatccattgtgtgaatataccacagttaatttgcctattttattgatggtcatttgagttgtttctagttttaggcaattataagtaaagcggtaattcacattgcagtcacgtatttggtaagcacatgcatacctttatcttgggcatattgttaggagtagaattgctgtcatagattatgtatattttttgctttaataattacttccagttttccaaagttggtttaccagttgacactagcagtgtttgagagttccagtcactccacatctttaccaacatgtaatactgttttttaacgttttagtcattcttaggagtgactaaattttcctcattcttcaggaatgtatagtgatattcattttggttttaattttatttccatggtaactattgaagttgagtgttttcatgtttattaactacttagattttgacatttgtaaatatattcaagttgtctgcattttttaaaacacagaattgtctttttctaattgatttgtagtgataggtttatatacctcaatatgagattattctcagatataaatacctacccacatttatatcgcaaatgtcgtcctactctggtttgattatttctctctcattggtgtcttttgaaaaacagaaatttttgtattgtccagtttatccatttttttcctttgatggtaagtgctgtgatttaagaaatctttcctaagttctgaagatatttttctaaaagttttattctaaaagttttactgtttctgttttactttcacatttagatatgcagttcatcaggaattggtttatgtttatgataggaagcagtgatcaagatatccatgtgaatatatattatgattgacccagtaccatttactgaagagagtgtctttttccctctgtgttgcagtgtcacttttcccataaataacatgactgtgttacatgtggatcagtttttgtagtctctattcttttaaattagacagtttgtaccaacactaccatgtctaaatactgtagctttttaataggtcttgctatttagtattatactctagctttttccttcttcatctgcattgtctaggctattctttactttgcatttctgtatggattttagaagagcttctccattctccctcttcctttttaccctcattctgtcttgcaagctgtgattttgatctagactgggtgaatctaaagagtcacagcataacaactctctaaagagacttgacatttttacacagtattgattctcaggctatgaatttggtatgcacttccatttatttgcatcttatttaatatatcccagcaatatacatttcagcagaatctctccttagatttattcctgggatttgatgtttcttaatgatattataaatggcatttaaaaaatttttgttttgtatttgttgctggtacatatatgtagaaatgtatttaaaattttttaacattgtgtccattgatttgctaaattcacttattgcaagagtttatttatttatttatttttgagacagggtcttgccctgtcactcaggctggagtgcagtggcgtgatctcagctcactgcaacttatacttcccaggttcaagcgatcttcccacctcagtcttccaagtagctgggactacaggcatgcaccaccattcttggctaatttttgtagagacaaggtctcactacattttccaggctagtctcaaactcctgggctcaagcagttctcccacctcagtctcccagagtgctgggattacaggtgtgagctatcgcggcccacagagtttattcttacattgtttggatttttctacatatgcaatcatgtaatacgttaataacgatagttttatcgcttctttttcagtccttatgccttatcattttgcttgccttgatacaaatcaagatttaatctctttattatcaatctttttttttttttttttacttctgtcagctatttgatatactgtagtttttgagggatgtgtctatttcatccaaattttgcatttctatagcatctgaaaggctgtcccatgttttcattcatggtattggcagtttgttttctctcaatttcttgatcagccttaggattttaaatttatgagtcttttcaaaaaccaacctttagctttgattttctctgttgtacatttatgtactattttagtgattttttttcttgtaactgtattttccttctttgtacttatttgggtttgatttgctacttatttctagctttaaaattgggttttataagaaagatttcagtcttcttttatatgcatttaagactaaattcccatttaagtactactttacctgcatctccaaaatttttaatattgtgtgtttttattatttaacacaaaatattttctaatttccattttaattgatcattatttagaagtatgttgcttagtttcaggcagcagatgcttttctagttatcttttattggtttctgtcttccattgttgtcagataacatattatgaatgatttcaatcctctgagtttattgaggcctttttaatgaccattttatggtcagatttggtaaatattccatgctcatttgaaaagaatgcaatttctaatgttgagtgcagtgtcctatgtatgtcagttaggtcaagtttaattgtgctcagttcttcttattaatttttttggtctacttattctgtcagctgttgagagaggtattaacatttccattccgattttcagtttatttttcttgtatctcttgtcaagttatcacttttatcataatgcagcgcccttctttatctctaataattcatagccctaaatacgatgggagatccagttttgcccttcagtgcttttccacttagccatttagtcttctgtctcatgccgcttcaaaatttggcaaattctttgagcaggagactggctatatgttagacatccttcaggtatccatttttgtcactgtagcccccaagcatgccaaaatatccgctggtttctctgtccctcagtagcaaccttctgccagaaatcacacctggattatcaacctagaactgtgaccagaattggtagatgaccccagatgaaaagttgctcttggtcctcagtgtaaattgaccacaccctccagggcttcacctttgcctattttgttttggtccccttcccctggcagatcatggtctgctagcaccacaagcctgggagatttcactacctctctagcttctctgtagcatcagaattcagttttgtgagaagaattggtcatgtgtttgaggcttctcaaatctccagttttatcattttagtcctgtggaatcactaaaagttttgcttatttctcattctcctggcagtgactttctgcctaagccaaactctcatcttcagctcacaccctgaatcagcaaatgtccccagagacaaaaacagctgccagtccatcagctgacctctgactgattctccctttctggaattttaatctgtctactatatcttctttctgtacttttctgatgcctttaaaatttaaaataagatatttgtaatttatttggctctttccagttgttacccaaagtgtttacctgctgcatcctactgcatcccacccagaattagaaattctagttgtcatatatattctacttagaaaatacctggataaagttacttttctgactttgactctcttttttttctttttgtgtttctcctacttattaggaaaaatataaacaaggatttttcaccttatttgtaatgtattagcaaatgtagtattttactttcacactatggtttgctgttgtctggctttttctttctttccccctgaagttcctttgaacacagtgagatcatcacagatcttaaagattaggttatatgtaaatactactatgggaacaactaattataacattgatttttttttccatgcgtgtagttgcagataataatgaagatgttgatggtgatggtgttcatgaaataacaagccgagatagcccggtttatcccaaatgtttgcttgatgatgaccttgtcttgggagtttacattcaccgaactgatagacttaagtcagattttatgatttctcacccaatggtaaaaattcatgtggttgatgagcatactggtcaatatgtcaagaaagatgataggtaattttttttaattgcacaactaattcttgaaactgaaactagtagaagtcttttttctgccattggtagttgaaagtcagtgggaatagagttatggatttgtattagagaatagtctactagttgtaggtgttcatcagtcattaacattgatcagaatgttgtagaagaaatggagaacatctaattcagtaattactttttttccgagatggagtctcgctttgtcgcccaggctggaatgcagtgctcaatctcggctcactgcaacctctgcctcctgggttcaagcgattctactgcctcagcctcccaagtagctgggattacaggcactcgccaccactcctggctaatttttgtatttttagtggaggcggggtttggccaggatgatctcgaactcctgacctcaggcgatctacctgcctcaccctcccaaagtgctgggattacaggcatgacccaccgtgcctggctcagtaattacttttaagtggaagggaataattcattttaagtggtagagagcttctgccagcttagtagatgtaatttatgacataaagttgcattgtaaatattttatattgcattgtaaatgctttaattgtctaacctcatatttttcttttgaaagtaatgttatctgggcttcaggtaaggtaaatgaatcttgaatgttttttctaagagtacttctatagctaatgcatgcttgaaatcccaaatgaaaagtacaatgaaatacacatttatactagaattttttaaaaaattgtttggaaagccagtggggaatggaaacaggaagattgtccaaaaaaagcccattcacctattcatttgccttagggcacacaaagaaaatatgacaactcaaagggtttacagtcttgtgccttttttatgtaaaatcaattttatgtcttttttttttttttttgagacaatatctcactgcgtctcactggctggagtgcagtggtgcaatcacagcttactacagcctcaacctccctgggctcaggtgatcctcccacctcagactcccacgtagctgggactgcagacatgtgccaccatgcccagctaactttttttctattttttgtagaaacgaggtttcatcatgttacccaggctggtcccaaactcctgagctcaagcagtccacctgcctcagcctcccaaagtgctggggttacaggcttgagccgctgtgcctggcaatgtctattttattataaactcttacaaaattctgaaggagttagtttatcccagctttatatggcaaaggtataatcatacttctcactttatatttctataataaaataatcatgtgaaaccaattgatagtagacaaatataagatggactgttacttttaagtcttataaaatttgtaagtttctagatggacactcagaataatttttccttttgtattattatgactattcattatttctggttgcctcaccttgtacactatatatttttttctcacctcaaaattatgaaaattgtgttaatggaagtatctttttttgtacagtggacggcctgtttcatcttactatgaaaaagagaatgtggattatattcttcctattatgacccagccatatgattttaaacagttaaaatcaagacttccagagtgggaagaacaaattgtatttaatgaaaattttccctatttgcttcgaggctctgatgagagtcctaaagtcatcctgttctttgaggtatgaattgaatggaccaattcaaattaaacgatagttaatatttaatagcacaaatgtaagctattatttttagtagtccagtaaggcaaaaaaaaaagttgtgtgagaatttaatctctaggatttagttttccaatgctgtggaatcaagtgagacgcccttttataaacagtgatagcatatttgctgagtgtttactatttaaccatttggcctactttgtataatttaataattacaacagctctgtgactgttaactgtagtgaagtgatgaatccactcgatatgaatgcatttctccattttaaacccatttcacaaagcataaactcatttaaccatgtcaggcaccctaagaatatgtgtaccacctggataaataaagataaatgtacacagatcagttaatgcagtttaatatgtaaccaaaaatgatgtagaacttatatgtgaagggttagtggcgggtcagtggagtcagggaaagctttatggaatacatggcttttgagctgactagttgttattatataattttcttactgaaaatgataacaaggtttggaataaaagtgatttccccaaagttactcgaattttaagttaaaaaaaatgcgtttgcagatagtttgaacctagaataccacatttctttactctatcatgtgttctgtctccataagcaaaggacaatagagaaagcccccttccagtgtaagctagatggagaagtttagcatgggaacagcaggggacttggcataaccagtgccgaagattcattttgtagaattacttgtttttatgatccttgactttcaggttgtctatttgtatttatgatacaaatattccaatatttacatttgtgattatgttgtgtgtgatttacataaagctgttattgttgaaaaattgatataatttgtatcttaaggaattttttgtcttcaaactttgtcatttgttacaattttcttctgtattcattttagtattaagagatgaagaaggatagattgttgtattataaacgcttttggttgcttcttaagttttaatgtaatatgttattgcctatgcaactgctttttgatctcagttttttaagtgttgaggacaacttgataatgtctcacagtctttaaaaccattattttactcttaggtatttatcttaaggaaaaaaatgacaagtccgtgaagatgtgtgtgcaaggatatttatttcagcactgtttataatagcaaaaattttagggagataaaataacctacatttagatcagtaagagatttggttaaataagttataatttttgttaaatttatggtatttgtgacagaatagtaggcagtcattaacattacggtattcatgtgtatgtattgacatgaagagatattcactacatactatatgaaaataatttgtgaaatagcattattagatttgtagttccacacatatgtttaggaatgcacagaaaaagatttggcctgcaaactagatgttaatggtgaccatctatgggtctggattacaagttgtttttactttggatctatatattttttatattatgttttcactgagcatgtattatatctgtaaaaaagatttaggtatccaaaaagcacagatgattggagtctgtatcatttcttaagcagtcttctttctataaaaatctcattttcgcagctgagcttttaataagcaccagtaagtttgaagtgatagcctttgataaatatctagaatacgatctctgtggcaggttggttgcaaatccatgagctttaatgtccagacaggatagaggaatggaagaaatcctcttgagaagcctaattataacatacatccaaagagaaaaaccccaacttcaggaaggtgatccaagacaaagacccagaaatagggttgtgagttttttaaacaaacaatcctttaaagtctgctgtgatacataaaaaacaatgaaagcttaagaattctatgcctattatatttgtacctaggttatatttgaggtgattaacactttgctttggatttgaaataaatcatagtatttattaatgaaagataaaatagtcagaaaatggaccctccctaactgaatgagttaactttaaggtgaatgaaatgagataaaaatgtttttattccctgtaaaggttaatgtttttaagcactatacaaatgattttttaaagttttaataatgtaccattagaaaatattaaattttaggtagcttagtcttctgtgaatttatttgcagattcttgatttcttaagcgtggatgaaattaagaataattctgaggttcaaaaccaagaatgtggctttcggaaaattgcctgggcatttcttaaggtatgtttttcatccattttaaacactttaaaactagtcttcaaatttagttggctgctttctcccaaatcagtttggtctcatataaggaattagaatctaaggtaatgttgtagggatgaagagttactaattcaagctcaggttatgctcattcagattcttaaatatttattgatggcccagtatgtgccagttacactatttggttctgaggatgtagcattaaaaaagacacaaacagccatgccattatttattcagttcaaaaaatattaagacttttctatgtgccagctactgttgtcagtggacaaagatgacaaattccttgaactcctggacttcatattccagcaacacaaacataaaacaattgatttcacaatttatcatttaattataaatttttataaatatcgtaaagaggtataggatggatgatgaactgtggggtcagggaaaacattcctgaggaagagacacattgccaccggtggggaagaaatggtctatggtagagggtacaatatatgcaaaaaccctgatatttgaaggagcagggttaattcagaaaatcaaaagaaggccaccaagattggaggacagagactaaggggagaagaatggtgcatgaagaggttgctaaggtcaacgggatgttaattatgatgaggtcttctcagtcattatagcaagaggaagccattatagaatttaaagagcaatgggaagccactgtgggattttaaacaaaagaataaaataatctgatttgtgttttagaaagatatatactctgttatgtggagaacagattctagagggagcaaatgtagatacttgaaaatcacattaggaaattcttaacagtagtctaggtaaaaaatgtctttgtacatttgtctttgactaggtgtctctgactaggatgtctttgacgagatgtttcagcaaagatgaaaggcgtagattgatgtttaaaaaaggatattttaattttgtaattatcttttccttcaaacatcaatttaaattatgaaaagtcttgagtaattattttgtaccatcttataaaaacattttcatttgtgaatccattcattcaacaaatatgatctataaaatgtgagacagtctgctaaattcagtacattcatagataaattagacattgtatatagctgccctccaatttaatttctatacagacctgttacctacattattatgtgctatagaacagatgctgttaaaatccagttgagacatttaatccatattggaggttagagagagattttagaagttttatagtcaaagggctgaacagccaccaggttggctatggtgagtaagtaatttgagagtggccttagcaatcacctggtccagtgtgctatcgatgatcacccttttataaatctgttaatgcctttttccataacaccttccatactgatttagagcaaagaaaaaaagccattaaaaaaaaaaagcaaaaaactcactttcacatagtaaacagtgccatcgtgtggttttattagaaactgcatttcttttatgctaagatttgtgcagacctgcagaatttactgtaagttgcacttaggaagcagtaacatatttcagggcatttctacctctaagtactatatggatttttatttatttattcatcttatgccattggcaaaaatggcagtcaagaattcttatcccatccccaccccccagaaagagtaaggtattctatgtgcttcacgtcttctaacacttacctgtcttcttcattagactgtaagctttttagagtcaccaatgacttcttttgggtaaatatgttgaacatttttagtccttattttactagatctttttgcatttaatatgtcactctgttgaaactccatgctataatatcaccagctcccagcatattaatgtcacatagaaagtgtttggtgaatatatattgagggaattaatcattgatgatagaaagagtggcaaggataaaattcatcttcaagaaagtggcatgacggatgcagtagctgactcctgtaatcccagcacgctgggaggtgaggtgggccgatcacttgaggtcaggagtttgagaccaacctggccaatatggtgaaaccctgtctctactaaaaatacaaaaatttgccagatgtggtggtgtgcacctgtaatcccagctactcgggaggctgagcggggaggattgcttggacacagggaatggaagttgtagtgacctgtgattgtaccactgcactccagcctgggtgacagagtgagactccatctcaaaaaaaaagggaagtggcatgaagacaattaaaatttaaatcttttattacctatcctgttggtacgagggatgtcttggataattgttaagttattacagtaattcaaatgagactttatcctaattctcagctatgcctcagattctcaggtactttcagttcttttagtacatatatgtggctattcttctaaactaaaaagtaataaagccttatttatctgagctctacattatataatttataaccataatggcagggtcttggctgaatcttagttgtttactcaggctaagcaacgtattaatgtaaactaaattgcctgtttaaattaatctatggaaagtatgatttagaagctggggaatatctttttaaaattaccgtgataagctttggggagctgtaggagagtttatcaagggagtctcgagtgcttatgatttaatgactgaacatatctattactcaattgggaatggttctttacccctgtgtgtcatttgacactaatcacaatgtcacccgctcagcttataacctccattgtctttacattctttcctaaaggggtaggggaaaagatgggctatattttgccatctctttttccttgttgatgcatcattccttaacttatcattcctgaacaacgttctgaattttgcctctgccactaaagcttctccaaccaaatcactagtgatttctgtttgctaaatatattgaacattttttagttattttgtcacatctatgcatttaacatatcacactcttgaaactctgttaccttggttttcttgacaccatcctctcctaatttttcttataccattctttgagtttccttcatggtcttctacctacctccttaatatcagtcttactcatggtttcatctttaacccacttttcttggaaccacttttctcacctgtgcttcagatttgtaaattcagtcacctgctggacatttcagcttggatgacttatagatatgtcagattcctccaaactgagtatccgtgctactctctctgccacttcaattggtggtaccaccatctgtccactctcccagatttacgaacttagagttacactgttttggtagctacaagtcacatggctgtttgaattcaaattaaatataattaaaaatttactttcacatttgtgctagccatacttcaagtgcagggtagccacatgtggattccgtattggttagcacaaattggttagagtattcccatcattatagaaagctctcttggacaatactatcttagagcctttcttgcctctttgtttttttttactttccaagttacataagtctacaagtaacagttgttaaatgtgttccctgcactcagtgcctattcttctaatttaagatattaagttacatgagtctacaagtaacagttgttaaataccttccgggcactcagtgcttattcttctaatttaagatacttcatgttttgtgtgaactgttgcaaagggttcaaactatctttctgctcctaatttgcagaagacataaaggttagaaagacgtttcatttcctattttgagtcatggtctaatgaaagagaacgtattctgagttggtaagatttttatgtttctcataaaaatctccatttagggccaggcgtggtggctcacaactgtaatcccaacactttgggaggccgaggtgggcagatcacctgaggccaggagttcaagaccagcctgaccaacatggcaaaacctctgactatactaaaaacacaaaaatcaaccaggtgtggtggcatgcacctgtaatcctagctactcgggaggctgaggcacaagaatcacttgaacccagaggaggtggaaattgcagtgagccaagattttgccactgcactccggcctggataacagagcgagattctgcccaaaaaaagagacaaaaacctccatttagttagcttaaatataagttttgtttaatagggttttaaaaatagacctttgaaagaagatatactaaaatactgaaaaaaatgtaacgaatggcttgaatgagtttaattatcttgaaatgattttaactttttaaaaatttaaaacataaaattttaaccattaaaaatactgatattaaacaaatggaagatttgtgtcttgtgtaaatatacagtttagtctttatcataattatttcaaacatgtgtattgatcacttcctttgttcagcgtgaaatctggcacagtaatgtaaatgctgtaccgacagtctgaaattgttgtacacgtgaaaagagagctatcaggaaaatattttaaaagccatttgggctaccttttgtcaaaaatgatctggaagtgtgcttaactaactatttaatgttctttgctttttaaaactaagaaatttcagcatgccatattaatcttttaaaaatgtttctgactttatgctattgctttattggatatatttattttcaatgaaggtaacattttatatgaattcttattttaagcttctgggagccaatggaaatgcaaacatcaactcaaaacttcgcttgcagctatattacccacctactaagcctcgatccccattaagtgttgttgaggcatttgaatggtggtcaaaatgtccaagaaatcattacccatcaacactgtacgtaactgtaagaggactgaaagttccagactgtgtaagttaatagtacatattaagtgtatatcatctagtgttgaaattaaatggtgacatagcatgtttttcatttctaaaaagataaggcctctaataataattttaatagatttctggggttatatattaagcctgtaatagctgatatttaaaagatgcttaaatgaattttaaatgtgaaatgtggcttttagtattaggaaaaatgttttgttataatttgattttcaaaaattaaagataaaaggttgatttaaagcaggagttgaaaaatagtttctgtaaagggccagatagtaaatattttaggctttggccctgtagtttcagtcaattttgcctttatagtgtgaaaatagctacatagacatatgtaggccataactgaacaaatgggtgtgatgtgttccaataaaagtttatttacaaaaacaggtagtaggccagatttggtgtgtgggctgcagtttgcagactcctgatttctgggcacatttttcacaatattattcaaataatcagtatgtaatgtttctactgctgctgttttccatagattaatattataaataatcttagcaaagaattggccctaaaataaaaaagttttgcttttgtctagtttcttgtaagacattaatttttcaggtcatttgcacgttctgtagctgatatgtactgtcaccacagggctgatttgcattggtttggatggagttaaatctattatttgagaaatgaggatttttaaaacttgagatttttatgatactagttttgtgatattaaagccagagatatgatagtatatcagagccatggcataactcataagtattggtgaagaagcagaaacaaaggatagagttattaaaatcatttcatgtgacctttgtggtcatattttttcctccaaaatttttatggctttttggttacaggactgtagttttaagcagcttttttattttatttagaataatgtacaaataaaagtagaatttttttctggattacattttgaaaatattttcatattatttgtttcagtattttaaaaactatatgctagaaaaagaaaaaggtgaacatggtatataaattttcatattttaatgcatatttagataaagccatcttaccgctctatgatggctcttcaggaggaaaaaggtaaaccagtgcattgtgaacgtcaccatgagtcaagctcagtagacacagaacctggattagaagagtcaaaggaagtaataaagtggaaacgactccctgggcaggtgaagtgtttgataatagtggatttatttagatgtttacttattaccttaaaaactccaataactcctaggatatctagcttactacttaaaatgcttgctatttatccttgtttttaaccacaattttgcctttccattaattaatttgacaaataataatagagtgcctagcatgtgtatataagcactatcttacattctttgggcacttgggcaattgtattagcttgggctgctataacaaaataccactgactgggtggcttaaacagcagacatttatttctcacagttctggaggccgagaagtccaagatcaagatgctagccagcctagttcctggtgagggtccactttttgacttggagcccgcctcctcttcactatattctcacatggtggagagagagatcacctttctcgcgtcttttcttataagggcacgaatctgattcatgagcttctcactctcaggaccaaattacctcccaaagacccccacatctaaatactatcacataggggattacagctttaacatacagtttttgagaggacatagcattcagtgcatagcaaagatcaaggtgatgactgggttgatttcttctgaggcttctccttggcttacagttggctgccctcttgctgcctcttcacatgatctttgtgcatgcacgcccctgttgtctctccccctattggattaggacccttccataattatttcattttaatgtaattacctttttaaagaccatgtctccaaatactgttacattctgaggtgttaggggttagagctttagcatattcatttgggtgacaaggggtgggggtgtgagtgggaggagagaggacacaattcagcctataacagcagtcagataacatagatttttagcctgggcaatgtagcaagacccattctctttttgttttttttttgagacggagacttgctctgtcgcccaggctggagtgcagtggtgcaatctcggctcactgcaagctccacctcccgggttcatgccattcttctgcctcagcctccggagtagctgggactacaggcgtctgccaccacgcctggctaattttttgtatttttagtagagatggggtttcaccatgtttgccaggatggtctcgatctcctgacctcgtgatccgcctgcctcagcctcccaaagtactgggattacaggcgtgagccaccgtgcccggccagcaagacccattcttttaaaaaaaatttttttaattaggtgggcatggtggcatgcacctgtagtcccagctacttgggaggctgaggaaggaagattgattgaacccaggaattcaaggctgcagtgagctatgattctgccactgcactcaagcctggatgacagaatgagatcccatctctttaaaaagaaaaagaattaaaaatttaaaaaaaaattttttgatgtctgtaagatgtatatctcttaatgtttatggattcatgaaattcttcacagcacctggcttcttcctgaatcacactttgatagagatatgtacatgtatatacttctgccacaagctgagcagaatttaagcttttactaaagtgttcttactagattagcattttatgcagtggcaagaagcattgctgatacaattttgcaatgttttacttgtttttataaagaatgaagtggtttattttatgcatatgagctgctaccagatgaaatttatccaaaatcttaatttattcaaacatctaatgtagaaataagagcttactattcttacttattcatcttcattttctatattttatatcacatttgactttctttttgaggctgattttacagatacattttaaaatcactttgagttagaatactttaagcatgatatggagagaataacacttagattatgcccttggggaacttccaagttaggtgggaaaagaaagcagttacattgttgtttattttcagatatgcttcagagaagtcttgatgaaatgaggaaatgtaggtataaagatgattgtacagatcagcagttctcaaaatgtagtttggagacctctgggagttctgagtccctttcagggggttcttgaagtcaacttcttttcataatgattctaaggtgttactagtctcattcagattcattctcttacaagtatgtactagcattttctagaggctaaataacgtgatatcacaagagagcagaggcacttacgaaaatctagattttattcagctagacatttaaagttagcaagttacttttattttatttttatgaaaactccaaatagcctccaaaaaaatgttccaagaatgtaaagcatctcgaaactaaaaacatttgagaattgcagatatgaagactgaactacaatggtggaagaagggctcattcaacagtggagcttgagatagactaggatgctcaaggtaggggtgagtgaaggagggacaagggcgggtatttcatatgaaggcaaagttgcaaataagtgggaaaggacctgttgtattcattaggcactcaaaagcttagctggttggaaaccagagtttgtaaaagaggagataaagtagtgtactggatgaggcccacattgtggagtgtctcaaatggtagcctaatacttgattgtgagggatgtgaggaataatggaaggttttcgggtgagtgagaaaaataacaattgtatttgaggatgaattaatgcaggcagtggcatggggagatcttgaagtagtaacatcagaattagatggcagtcattgatgtgtgaggtgatgagggtctaatgaatacgagagacagaaagtaggaaccagcatgatttagtgactgacaaggtagtaaaggaggagaaacagtcaaggcttttgaggacctttattgttgttatcagactttcattgagtgtctgttgtggatagggcacagagtcaaaccctgagaatacaaagaacatgatagtgggttcaatgttttcattttcagcctaggtgattgggcacagagttttccttaattacacttcctactctaggagcagcagcaagtggttataaagcctcctgacatttctttcagtttttgttaccttgttaccctcctctcccttttcttaattatgtggttggaggatgcagagaaaagatgggtagcatggagtctggagaatgcagagaaaggatggggagcatggagtctggtacatgattgacacttaacaaattcttttgaatttttcacattcctagtagctggtcataatgctgtctccagaggaactgctagatcttggtactatttgtgaaaaacctggtacctgtctagaaagcatgcccttgaagtaacagtctttgagtaggtccattaagctaggcttgaccctttgaataatccctcttagccatatagagctaataatggttactcttagctagtaatagctactcatagggtggctgtgatgaatatattcaaagacctttgtaataaagtacaactttcatgacatatagtaagagcccagtatatgtttacttcaactttttgaattataagaaacagaagaactaaggctcactgaaggttgcaagagatagaattaggataaataaacgtaactggtattttctacagtagacattaatacccagaaaatttgggcttcatctggtagaagagggtgaaaacattaaaattttgaagaaattgtaataatgaatgagagaccaataagggccgattgattactttgaaaatacattttggaaggcagccacaaaaggtgattattttaagataggcaaagagagaataagcattcatacattctggcttaagctaggccccataggtacttgtggtcttaaaaaaagcttgtgactttaacaaaagtgacttactagtgctgtcatagaataaggctgtgacatacattcttttagtagctatatagaagcagtgtggcagtgatggctttagagtatcagatattgaaatttttctattcatatttaggtgaattaagtactacttaaacatgaagaacaaacccactttaaaaatttcatggacactgattctctttttacaaagcaatttactatggtttttcaccattctgcgtacttgtttttctctttctctgcatcataaaaggacttaaaagaactacagtaattgaaattaaaaactagccttcgcgttttaatgtttgctaatttatattttttaaatgtatgttttttaggcttgccgtatcccaaacaaacacctcttctcactaaatgcaggagaacgaggatgtttttgtcttgatttctcccacaatggaagaatattagcagcagcttgtgccagccgggatggatatccaattatttgtgagtaataatcctacctgtttaatctgattgtagtccacgtggaggacattctttagtttttttaaattcatggaaatcttaacttgagtaatcccctgtactactaaattaaagaaaacggatttcttcaagcaaagaaagttcttttgtaataattttacacttttctatacagtaactgttcgtaagtagaatgagattgatcaaatgaaagatggtaaatttatttttaaaacatgcaggaggatttttgtaaacattttgtattttaaatatagaaatttggaaacaaggatgaataaatctcatggggaacattagtccaatgtggctagttgatagcagtgatgatttgagttacaaaagcctccagatttgctgtgtagtggaataccaataattgactcaagagtacctagatgaaaacttctcattatgatagagaagtcagcagagaggccaagcaattatttctgttgctttagagacattctaaagtgagcattatcatactgttctagacttagaagcattaaatactctctcctttacttctgactcaataataaaaccagctctcctctgcagaagtagccagctccttgtgggcatctgccctaaacactagatcttattgaactttcctcagcttaacacagtttgctattaattggttgattcccttttttttaatcagggactcataattgacttgattggcatttattaagtagatattgctccccatgaaatagtaataaattttaaaaataaaaaataacttgtgtcgtttgattaccactatgctatttttaaaattcaccaaaaacccatatgtagagggaaaaaagattcttaggaaatgctcctaagttattaatagtaatttatttcttttggatagtgaaagaattattttattccgattttatgttttaaaagcttctgtgataaatatgttactttatgcttaaataaacttgctttaaaatgctatgtagattgagatattgcttaaatctcaaaaatagaggaggaagaggaatctttgtctttggtttttgactatttgattatgatgtgtctacttggaattcctttaacttgttgaatatgcagatcagtgtttttcacaaattagagatgtattcagtcattatttcttgaaatgttctgtttggcccttttctctttcttcttctgggagtcccgttatgcctgtgttggtactcttggtggtgtcccacaagtctctgaaacttttctatttttcttcattctttttctgcttttttcagactggataatctcagttgacctgttgtcaaatttagtaattctttcagtttagatctgcttttgagcccctctagtgaattatttatttcagttattgtacttttcaactgtaaaatttctagttggactttttttttaatcatatctatttctttattgatactctcttttttggtgggaaatccttttcacactttaattctttagatatagttttctttagatcttggaatatatttataatagtggattgaaagtctttgttgagaaagcccagcgtctgggcttcctcagtttctatgtggatgacttttttcccctgtgtatgggccactctttcctgttttttccatttctcataattttgtattgaaaactggatgttttaataatgcagtgtggcaactctggaaatcagatgccctcctttctcccctcacgcccacccaagatttattatttttgcagttagctttgtgattttggactaattctgtagtctttactgtctgtcatgtgttgccattgatgtctgtgctcggttaagttcgtggtcagacagagaccaccgttgtggttagacagagatttttaaatacttgagtggataggtctactggtctttgccaagagactctgtgtgtgttggggtataccttcaatgcttcggtacacaatctacagctctgccttagctttactttctgtttgtcctgagcctcctcacgtcagcccgagtgagaagtaaagcctgtcaggtctttcttggttgtgcatattcccttcacatacatggatgggaatccttctagatacccaggaatattttggagtttatcagtgtcccctatggacatctcatgcccggttttttgttttgttctgtttcattttgttttttgtttttattttaagttctttggtgagcctcttcttagcctcacttgcagctgtgatattaaatgatgccacgggttgttttgacatgcaccttagggttagggctgtcctcccagagcatgctgtgagccaggtcaaataaaggcaggccctgacagtggatctttcctggagggccagactgtcaaatagtgagaagtctttggggatggggcttttagggagcatcagacctgttctgccccaaccagtctcttgatttttattggtttttaaggctcctttaaagtttgagacaggaatgagaacatagcaagttaaaacaccgtaaagctcaatgttcttaccaaattcagccatttttcttaaatactcttcaaatttttgtaagctttgcttaattttcagagttctgagaatgttgatttttgacagtttttgccagtgttcttgttgcttctgtggggaggagattttttctaagattcttactttgctattccacaagtacagtagtccctctttttccatagggtatatgttctaagaccctcagtggaagcctgaaacctcaagtagtactgaacccgattgccatcagtagaaacacatgtatgctcatgctttccacccacagatttatatcttttccatcttaacaaaacacttaccatgcactaaaggccattacttttgtcgtttgaggtgtgacagcaaaactagcacaaacctctttttcgttcttcacaatttcacggatagaagatttttactgtagatcctagcaacctcaacatatgatttttttttctttcctttttaaatcaagaactttcaccttttcagtcaaaggaagtactttatcatttccctttggcatatgccaattgccaacatgattactcttgcaccttgtgaccgttaagtaaaataagggttacttgaacaaaagcactgggtgacaaccagtctgataactgagacagctactaagtttctgatagacagcatctatagcatggatacattgaacacaggataattcacatgctggagacatggagctaaatggcatgagatttcataacactactcagaatgatgtgcattttaaaacttaggaattatttatttctggaattttccatttgatattttcagaccatggttgactgcgggtaactgaaaccacagaaggtgaaactgcacataaggggggactgctgttatttctgaactgctaagtattttaaagggcaattgatttttaccactagatggaagcagagacttggaaactttgtttttccgtgttactatcttagatttcattgtatgtttaaacatatagtaaaataccacagtgctttgtgtgtctgattgagtcattgttaattcccatactatccctgattactatccctgttcattttagtattaaaatttacttttgacaatagcacaatttaaatttctccttacttcaaataattaaatttttggttggcatttagttgattttcaggtgaaataataatgaaagcctaaattatagaatataagtgaattgcaatgtaaatgttattattcaactgatataaatttattattaaagattcttaggggatttctttaaagagatgaaaataattgataattgtagcaaaattataactgaaaattttgcatgtgaatttttgtgtaaagcaaaagaaaaactattcttaagtaaattttgaaattttctctgtgctgcaaatgtctttggttataattttgttatagactgcttatgtctaaataatattaaattatatatttgtatattattggattaaggatcttctgtctggaaacctaatttctaaatattttcattagtatatgaaattccttctggacgtttcatgagagaattgtgtggccacctcaatatcatttatgatctttcctggtcaaaagatgatcactacatccttacttcatcatctgatggcactgccaggttagtatccttgagaagtacttatgtgcatgctgtttgctgtcaaggaaagcaaagagaatataaactgatgtaactactcttatgctccagtcgtattttcccaagaagggactgtcataaatatgcatcatgcagactgattccataaattatagtaacactttttaaagacatttttcttaaatgtcttttatttatgtagcatataatatttctagtcctcaccatctttaaatgatcattatgtaaactgattaatgctttgagatggggttaggggttattaaacacttgagattttttcctagagcataagctcttggtggcagggatactgtcttcactattggctggatttgcagagggtagaatccagtggtgctcagtatatcacagtagaggaaataaatatgtaccttatattttaacagttttatagattggttaaacatttacatttttcagaatgtcaatcttaaaaataatttatcccttttcaatttaataagtatcacaataaaacattttaaaagctaactttaaaagtttcatttatactttttttagttgcttgttctaccttgaatgtgttctaaaaatactgttagttttcagggtgcttttagatacatcacttaatttgattcttacagctattaggtaagacattattctctccacacactacgaaactgacatgtaaacagttgagatccatgctgaattcattgtcatttacttctgccttctactctcttaacacttcgtgttacttttagtgttcagaccacttcttctactgatcttgccaacctccttttctgtataaaatatctaatcaagatgttaccattattggttagtttttatttaaatgaaaaagatgagaattagtaacaattgacttccttcttggtcatgctgggaacctactattactcctttttgacaatatcctcaagaaactatctgatctgttcttttagcacagccattctgtccaatgccaggccatactagagaaaaatatgtaactttgctgaggggtgactttggatttgtaagtcttaatgtcacctaagctgtcatctctgctgaggaatccttttactttactcagcttccttttctttttcctctggcagcagatccaaacttaccatgaacattctctacagtaaatcacagtcttcccacttcattagatgactatcttcaatttagatgaaatttagtcagacatgatcttcgtatatttccctctgatttccctcctaatatccatagatatgtccatttttaatctctgtccatctcttttaacaaagaggcacgtgactgacgttttaaaggctatttgacctgtacttttcatctcagtccctgaaaatttgtattacatctactagtctgattaatatctttctctctattgattgtgtcctctcatcttagaaatatgctcaaatgggccgggcgcagtggcttatgcctgtaatcccagcactttgggaagccgaggtgggcagatcactggaggtcaggagttcgagatcagcctggccaacatggcgaaaccctgtctctattaaaaatacaaaaataagccgggtgtggtggtctgcatctgtagtcccagctacttcagaggctgaggcaagagaatcacttgaactgggaggtggaggttgcagtgagccgagattgcgccattgcactccagcctgggtgacagattgagactctgcctcaaaaagaaaaaagaaatatgctcaaattgccttatcttaaaaacatcattttcagttcttcctgccttctagactagcccattatttttctttttctacaccatcaggagtattctacacatactgtctttacttcagcccagttattctggctttctttcccaccatgctacataaacttctttcttcagaggttggcagtttcttgctatttttaaatccatttggacagtttaactcctgctctgcttgccttcactgtagtaattgattattgaccagtcttgaaatattttgaattcatagttttcattgacaacctcttctcttctctttttattactctgaccagttctatccattgtctttctctgatttattttcctctgccgatcgtctatatgttttatccccaggatcctttagctgatcatctcctggttttatatgcttatcctagtttctcttacctttcccagctttgactcttgctgatatgctaatgacttctagcgcacaccttttttatgaatttgacttcctattacacgtttccatttgaatggcccattgccacctcaaatccaaaaccaaacttacccacctccttaaattttgttttcctcttttaattctcttacatatattttaatggcatccttatccaccatctcccaagctgaaaactcagagtggtgttcatctcttctttctttcccatcatttctttcacatccaactagcactaaagtctgccaattctccctcctaaaaggctcacagttttgtcacgtcctctctattgcgtttgctttaattcaagccctattactctttgcttaaattgttgctattgacctcagtgttcagtctctaagtcctctgtctctgctgtgctaaaattatctttccataactatctttcataatgccttaattttttaaaagactttacccattgcccattgaaaaattttccagttccttagcatggcctaacaggcatgttcctcattgacccaacattcttttctcatgcgcttcccttgtaccctttgctttacccacgtaatcttttgaaacaccctagcatcttatcttctttggcatcttcctgccctttgaaacttacctacttttcctatacttaaatgaccttctcctacccttcctgaataacttattcattcaacaaaaattaagtgccttttgtgagctctcataggtttgtagttattatttaaaatccagcccaaattctattatttcttgaagctatcttgggtttctgcacacaatatgtagtatattatgctaaagcacacattttttccttatttatctttaaaactgatactaatttaggactctttacatcattaaaatagtattgtgaaagcattaactgagtgaaaagagaagcatgtggctagcatcaaaatgacaaggagagttttgaaagaggtaaggaatacttgtaataaaggagctgttgtccaaagaaagagaattagaattgcaaatgctcacaagtggcagaagtatgaatttctgtccatgtcttctccttctttattcctgaggatccctgacacatattattgttagtgtctcctaagtatttcccacttgattagctttctgccatatgggtttatcctaaatacccttctttagttatccctggaataatctgtgtttttctcaaatcaacaacttctaatacagtcagagaggcttttccatatgtaatggctcccacacaggcctatatgtgcccactattcccttttctcaaacatatggcttaactttatgttttttctttcccaaatctagtaatttttgtgtgtgttcattcagtctttacaaatttgtatttctttgttctctatgatctggtctgattttttttccccaaacccatttatatatttattttaatctcagattctaccatggcctgggtaacagaaaccatcattgattccagttcagtttttacacaaaaagctttacttttatttttttaatattatgtctgttttaattatattgagctgttttgaagatgtatttgcttcatttctgcctgttatatagtattttaaataatgctactaagatttattaccaaacaactgagtttttcatctatctttttaatattttcccaaaattagtggttttttcttttaataggcatcatatttcatataaatatgcttattgagaatacactgtggtaaaaatgcttgtgcaattgattcattcatgggctttatttttactcgaaaacatgttctttcacttcctctattattagtttggattcttagtaattgaagatcatatcctatattgtaagcagctgctgaggaaactcatagaatatttttcttgaatagaaactgtttttttttctcttatcagtaatcttgtaacagactcaatttgctttagttttcaagcagtaattaaaaggatgaatacaaatcccatatttaaaattaatatgttcttctaattttgataatttaacaaaatatatttaaaaatccaatgcttcacacttatatagcacctgtatattggtagatttcacctagttttatacattgttagaaatgcagagtatctaagaggttaacccttaagggtttactcatttgtcaagactgtagcagtgataataatcttaattttttttagttagccattatttagaggacaggataatgagtgttaaacaaaaagaacgtgcttaatgtaggatagtcttttctatcaaaatgtcataattattttaatcttattttacttgagaattcaaaatataataattttagtatctcttaaatctttgagatcttcatttttactatctaggctttgaaattacaaatataaaagttaatagactattctattctctaaacccccattaataaacactttgtaaaagtggtatacacaacctaaatgggaaatcattaaagtttctccctatatattttttatgtatattgtactaaatgcaatattttaccaactgttcaatgtgtgtttaaccaacagcaaaataggtaggttttaaaaagttattaattttatagtatagattacaattagtggatataatatgctggataataactataacaaataactttgtcacatgtgaaaattccagtcatcaaatatgagatcatcattatatttttcattgttttaaaacttggtttaccattggtcgttgtcacttgcttgcttaaggttcattggctgtgttggttcttagaaaaactgttaaaagaaacttctgcttttcagaagcaatatgtaacttcttatccttttccaggatatggaaaaatgaaataaacaatacaaatactttcagagttttacctcatccttcttttgtttacacggctaaattccatccagctgtaagagagctagtagttacaggatgctatgattccatgatacggatatggaaagttgagatgagagaagattctgccatattggtccgacagtttgatgttcacaaaagttttatcaactcactttgttttgatactgaaggtatgtcagagactatgaatgaagaccagctatgtgaagaatttttttttaccagaataatagttatttaggcttgagagggttatgtactgatgattgcgcatatttaggtttatgcttattttgcaggtcatatgatagatatgacactaagggacttctgtttgtaatttttaagtttttaaattcttaaacatttagattcaattaatctttgctataacaaccagtcatatgccaaattgcataaatatatttctttgaactggtgattatcattcttactttttcttcaagaaccttaaaatttgcaaacatatagaagggaaatttgcaattatttaaagttttatcttgatataagaataatatggtggccgggcgcggtggttcgtgcctgtaatcccagcactttgggaggctgaggtgggttgatcacaaggtcaggagatcaagaccatcctggctaacacggtgaaacaccatctctactaaaaatacaaaaaattagccgggtgtggtggcatgcacctgtagtcccagctacttgggaggctgggacaggagaatcgcttgaaccctggaggtagaggttgcagtaagctgagatcgcgccactgcactccagcctgggcgacagagtgagactccatctcaaaaaaaagaataatgtagtatgttttaaagatgtaaaacgtaaatcattttattatctgaaagaatgaagaaatttattgtatctattaaatagtcactttttacataatttcagagactgggcatgtaggctagcgctataattaattggtatgggatccagatcaaaaggataatactgctgatttactcagttcagctgtagggatgttaataaatttggaacatattcaggaaagactctgaatagaaaggtatctgaaaactaactctgtcataatagcagtagttgagattataaaagagacataaagactttcttcaactatttggccatacgatatccaaatgtgcaaaaaaaaaaaaaaggaaattggtccatgttactccagtgggtagaggtgggccaaagctgtagaagatagattttctttgttcagaattagaaagaatattttaatacaggaagcagttcaccagttgaatagctgttttataaaatactgaattcacagttgctgaacagccatctgttagtggtggtgtttgagatattcctgagtgggtatgaagttgaacttaatggtctctgaggtctttcaattttaagattatttgactccaaagaattgatgttaaactggtgcatattagaatataggtatttttctaggaatccaaaacagatttataggttaataaagatgagaaataatgttacatgtcggatggttcaaattatttggctttggaatataagccatatacacatgtactgagaggctcatttctttttatagttaaattcaggtaagtgaaaaagggaaagaagtcatcaaaaataatttaaaagagtaaagaattcatttaaagataattggggtttgtttgtgagttgcattttgatttttggcttttttaaactgaaataccttttaatagcccttcaattctttgactgttttactggggtatagtttcccccgatttcctattatttgtttctaactctgtgtgacattcataagtgagtgatcttatttttttaaataggtcatcatatgtattcaggagattgtacaggggtgattgttgtttggaatacctatgtcaagattaatgatttggaacattcagtgcaccactggactataaataaggtataaaatcatattttatattttgggatttaattaaagaagttggaaaaatccaatcacatgactttaagataggatgtcaggacattctgttctctcatttcaaaaaattaacagtttttcttagttatcaataattaattagcacaccctcctgatggctgactgatgatataacgacttagtgaagatttaaaattttggccaggtgttaatttcacttttttataccccatttgcactgtggcattcagtaatccattgggtgacatttatgctaaaatgagatgtatgttatattaccatcgataagtaataatttatatttcctattatatcctttttccttggtccaattatatctctaaaaacagtgttctcagtattttatcaacactggtgtctttcagagttatgcggttattatgaagatctgtcatttaatcacaataattgtttcatttgaaatttgccgaatagaaacaaatgaataagttctttcatttgggggctggagtgtttttaagacagcttgtatgttaagcagttttgttagtgtacattttttactttttatttaaaaatacaaatgaatcattaaacttgaatttgttctatataaattgattcagtttctgcctaacatattatacctttttcttcaatttttcataatataattatgatagtagttgaaaaaagacaccctaagtgaaaaataatttccatgaattttagttaaatctgttgagtctatcagatctgttgaaaaagcagttcattctgttgttagaaattcttatctaaataagaatagaaacttgaaaattatttctacatgtggttttgaatttataaaaattggaagcttcttacatgattttaaacaaaaaatgtaatgttacaagatgtgtttgttggaagtacttcttgtttgggactgaccaaattttgggaaagtgaacatactacaaaaacacatactaattaaatgtgcatttgcacattgcataacaacacaaaaatacaattcatcagctttattttcagccctaaactgacgttactcagaatccttttgctaacaattttaaagcatcctatacagtggaattggaaatgatattttaagattaattttgtacccccaaaaaagtttaacattagacaaacttttcagtagtagtattttttttaatcattttaggaaattaaagaaactgagtttaagggaattccaataagttatttggagattcatcccaatggaaaacgtttgttaatccataccaaagacagtactttgagaattatggatctccggatgtaagtatatttcagtgttgacaggataagtactcacagagtaagtaatgaattaaattatatttataaaattcggtagtggttctcaactaagcagtgtccccacactcaccaaggaacatctggcagtatctggagattttttttttttatgttgcttctagtatctaatgagtcgagataaaaaatattgctaagcatcctacagcccataggacagtccccctaaaacaattatccagcccaaaatgtgagtagttctgaggctgaaatgtagttagttgcttttattttcacaattaaaaaaaagaaacttctaccttcaacaatgatattgattgatactgatattatcactatgatactgttacagcattagtataatatgatataactacaggagagggcttttgatttatatgtccttgtttttttgtttatttccaaataatcgcaaatgtagggaaatatccttcctgaaaaaggtggaagcagtgttctgggaaaatcaacatggacttctagtgcacttttgtttgatgttagagatgataataatacttacctggcacaaagtgtgtgctgaaatggtgtttactattttttcgtgagtgaaaaaatatggaaggctatgtaccatatttagcagatggtttaataatatgttttatctaattttttttcagagatcaaatattccttgtattattttaaaaattcatcagaagaatatatgagtataaaaattctatccattagtttagtaaccagctcaaatgctacttccataaagtagtctctcttgctctatagctagaattaatttctcttgtccaagtttgaaaagaactcttctgtttttcttttgcagtatgttctacatccaccttctattttacgttgacatgtttctcctctcttgctaaattataaactccctgggctcttgggactagctctcctttattctgcatccattatattatagaatgtctcccatatggcagattctcaaaaaatgtttgttgaatggaaattaagtatttaagagaaaagattttataccaccagtcatttacatgattaagacagttacatttgtaaaatcttttttgcttgtagattagtagcaaggaagtttgtaggagcagcaaattatcgggagaagattcatagtactttgactccatgtgggacttttctgtttgctggaagtgaggatggtatagtgtatgtttggaacccagaaacaggtgaatgtttattgaactttaaaaatcatttggggaggtacaggggtttgaagaagtgtgaaaattctaccattttatggaataattttcaaggaaattctgattttgggttttcaattatgttttttaagattagaaagcctttaaaggaactcagctacagtctaaacttgtattaaattttgttctctattgctttaatatctttatggatttagaatttcacattataattcaaggtttgttctttcatggcctataatgagacattgctgatcttagaaaagcgtttaatggaggctaacacaaagtacaaaatgttacaagctgaatttggaatatgattaggtagacaaattgttaaacatctatattttcattagtaacggaaacatacctgtgaaagttttgatgtctgaaacttaaatagcaagttgcctgaaatactgcaattcagtttttttccaataaacaattacattgggaagctcacttgtgcctcacctttgcttttcaaaagaaaagctaaagctacatgaatgtttttaataagaaattgagagaatttcataaaactaactttaaaatttctttaatgaacagtatttgattttttccttgttttttttttattctttctgttaggcattttgactagtcaggtaacttaggtttttgtttgattgtttgtttcctgtaccgtgttttgatgctttagcatcaattcagtagcaacaagtctcgccttcaataaatgaatctagattctttgctttttgactcctgactgattttcctggattccacagatctctactttagacatcttttaggccatagtcataggtatctttcaagcaaatgggtacctcaaacagcatctgggaaaaaaaaaatggaaaagttaatccttcaccaaagctcacccaactagagtttctttagttttagagtcctgtaatttctcctgtagttctacccagagttctctgtcatttggagtttgcttagctctgtccaatctccaatcttagagtcatatacctctctacttccgtctgtgccctttgtctttattttgtgccttgaaaacctcattgaagaggtagaaagtagaaggaggagggtcagtggaatgtaaaataaagataatttaatacattgttactcaaacatttttaaatatttgaggttttcacataaataatgtgagcatcattgctataaatattttctaataaatggcagaataatcttgtgagaagatttatcgatacagatatgctctgatatacatttttgaatctctctttttatttaggagaacaagtagccatgtattctgacttgccattcaagtcacccattcgagacatttcttatcatccatttgaaaatatggttgcattctgtgcatttgggcaaaatgagccaattcttctgtatatttacgatttccatggtaagtctaccacttgataagtaaagaatttttagagtaacctttacatttagactaaaccaggaatctgtctggaattcaaatgttgacaaaagtacacataacaattgtgcccttatgttggaatcacagaaagctagccacaagtttctttgtaaatcaatttaagtaaatagaattcacctaaaaattatttggaatatgttaactaaatttaaaaggtaaataaaacttagggaatacagatctttgatgttttcagttgactgttgagttaatattttatcctgtgttgttactaaagcacatagttttaataaattgtagttttgagagtttcttaacataaaaagtagggggaaaatcacatcagtgaaaacatcacctggaattagaaatctaatgtctttcgtgtccgcaattacactattctatcattctgagaaataataaggaaataaaaagtgtggatacattatttttcagggacagtatggtattctaagaattctttggatatatgctggttttcatatatttctttaatttctatcctgaaattaggattccactcttctatattatactattagtgctgtcattctcaaaattgcatttctattttcttcatatagtattgtacaaaaatgaaaagtctttgttagtttctttgatttgcttatggaaagttaagtgtattaagttaatatagattgaattgattaatggttgtgataaatactaagtaattaggcaattaagttagaaatctgaagttcttgatcacagtgtggattatattatgccttccagggtaaattatgctagaaaataatgtgtaaagtcaaaatgtaatcttattttaaagaattttatagagaagaaatcatttctgcaatgcatactcagatttatagaacactgttagtaatggtagaattgccaagcaacacagtaccatttactattacaagcagacattagcaaagataaacactgcctgattataggaaaaaatagatggattcctcaaatcattcaatgtccaaatctggtgtctagtttcaccatgtatcctgaaacagttctctctttgtacccactctaaatcttcacataaatgaagagttataccaaagtactttatatttggaactgttatacaggaaataggcagcacagttatttcctcagactcttaagaggttttacagtagtcttcattcaatttctaatttgctttttatgcctttgaaattttcactacacatacacattaaagttgcactctatcttttcttaaagcaatttattttttgtcactgacaggattttatcatcagagtagcccaggatagttaggtttgccagtttggtttttaggcagtaagcaaagaagtccattctagaggcctagtaggagaaagagctaagcattttaggagtctaaaaaaatggggtttaggctccattctgttactctagtgaccttgcacaagcttcttgccttcctgaagctccattttcttatctatgaaaaggtactacagtactaatacctgtcctacctaagagaggtatttgtgaagatactatgagaccatgactgtgaaagtactaggtaaattgataagcacaatattgaaacaaaagataaaatgggttgttatgcccatccaaccaatatatgcttgactatatgtaagaatttctgttttaatatgctaataagcatctctatatggaaagcagttgaagagttttttctcctctcttttactctgttggtcagtcttttatttattaaagtatgtttctttccaggtcaatttattagaatataaatgcataaaattaaaaacataatgttatttccacactatcttaatgtgcaagaggaaggatttccatgagcattttagaaatctaaatattcaaatagtagacacattaaatttaaattatttgtgcaatatatcacaaacacaatttttgatatgcaaacacacctttacaaacaaattaaaactaaaaaatgtttcaacacattttcccaactcgttgctatttttaaaaagaggaagcttaggaagaagttaagtaatcttaagccatctaagattgagcagagttcttgtgaatggtatagatccataagaaaagtataatatttattaccaacctattagagttttgtcttatgttttattttttaatacaggaatattttgctcataattttttggttgaaaataaagtttacatatggctttacataaatattttaatagtataaaattcaaaaaacacaaaagacttaagggatttttaagtggtgtttaaaaaaaattatcagataattttccaggaaaatggagcaagcttatttttttttataagctaaacaagttgtgaatgagaccacagtggtaactaaatgtatcatccatctttcagttctagcaaaatctgtgaagagttagcaagcatctttccctggtaaacatatgttcaggttgtggtcttttgggtctttcattctactgactttttgctttttttggtaagaaatatgatttttactttcagaaggcagttttatttgcctgatgttgaaagggttaatcatccagtaatacaaaatttagtcacagagtaccacaaataatgtacttttaggattcccataataacagagtactagtcagagaaacggcttctactgaattaaatttatgaagctagacttcagttaatgtgttgttattaatcaatattcacctcagtctctaggatattgttctagatttaataataattttagtaaatacttacatagcattttgtttgttcctggttctgttttaagcattttaccttacatatatttaagtttctgcaataatcttatgacataggggctgttatcctcgctttacaggagccatggctttaaatcaatgcagtttgctcctggagtccatgctcttatttgctacactaaatttccttttcagcaaatttcttgaaatactagtttctaaatgtctaataatcaaaccttgttttttctacagtacagttttttctatgtttctctgtggagtatgtggtttccttgtattttctatacgttgtaagaagcaaagatggaagcttgttcatctttttcctactagtacctaccctgaatactgacacataataaatatgcatgtagtgttttcagtggagtcaagtcagtggagtcaagtctaatttgagaagttctcagcattgtctgataattctaggtaatgaggctgatttttcgctaggtggcaatgtctcctctgaaccagagttaatactgagtttattaaccagagtatattaaccagagttaataacagagtatcaactctggttcagaggacacatagtcatagtatcttagacaagacaaatctttattaagcacctattgtgtgtcaagttgagctgtgttatgaaacacaggaatcagactcagattaccattcttttttctagtcctttgtacttcctaagtagttgattacatttctaaaagaaatttaaaccaaaaagcagtttctactactgacatgattttattaacacaattcatattaattaatgatagcctacgttgtcattgttgacaaacttattttttatattgtggcacactttaccagagttcagggcaacatgtacctttagtttcctataaaatttgttatttaagttgctcattgcctagaagcgtgtgatatttagaatgccatatgtctaacatagtacctggcatgttactaatatgcaataaatgaataaatgttggcattaacaattacaaatcctatagaatagcattttttccttaaattttataaaaatatatgctgagaggcatcatcagtaaatttggggctaataacagtggtagtagtagctaacatttatcaagcatttactgtgtctaccaatcttatgagcattttacatatattatctcataccatccttctaaaactcttcattgtaggtcccattattatcctcattttgcagatgatgaaacggaggcacagagaaaacaataattttcctaaagtaacacagttggtgtaaagccaccattttgtctaagctgactccagagtccatgttctcaatgcattaagctatctgtcttaggcacttatttagtctttgcatttcctgatcatgaagtaaatttaaaaagtagctaaatattcctatggtaaaatgtgttgttggttttcaatttcaacatttaggagaaccccttaagaaaggaagtttgcttatctagtattattaatagttcactcccttaaaaatgtggggggtggctgggtgtggtggctcacacttgtaatctcaacactttgggaggctgaggcaggaggatcgcttgaggccaggagtttgagaccagcctgagcaacatagtgagacctcatctctacatacatacatgtatacatacatacatacatacatacatacatacatacataaaaataaaactttgaggagtaacataattatgatgtaataagccattatgttctcaatatagtttaaaatacaaatattctttagtatatagcactaattttttttttttcttgagacacagtctctgctctgtcacccaagctggagtgcagtagcacaatcacagctcactgcggcctcaacctcctgggttcaagcagtcctcccacctcagcctcccgagtagctgggaccacaggatactcgactaatttcgtgtgtgtattttttgtagaaacagggttttgccatgtttgagacaatcctaggcctggtctcaagtgatctgcccaccttggcctcccaaagtgctgggattacaggcgtgagccaccatgcctggcctcattaaattttaatataactccttttacaatatttttgaaatcagataatgtctagtagaaataaatttaatatccacagttttctgtacaatatagatacgatgtagtggttttctatattggagatagctatttgtatgtattcatttgcaatacgatgtacatacgatacatctacaaatgtagaaatacatttgttttctacgttctatatggcattcatttgtaatacttatgaatagttcaaaagcacattcagataacataattctcatacttatacaagattatgtcattaaaatatacctaatagtagggcagaattttaaatatttatttttagcctggtaggagaaattaaaagatagaaatgccacattttaagacatgccaaaactacctgtttcttggttatatgctgaagtacctattttaatattattcacataataggtactttgatatgaaagtttatatcattcaagaactcaagacatatggaaaacttaacttgatagttttgagcataaaccagagccctgacttcctctttaagacattttttttaatgtttacagtggtgtttttaattgcactaatgcatgaatgatatgatgtaaaatagacaacaacaaagactggagtaagagagcgctggcattctagacaaaatactaccactctgtatttgaccctgatcaaataatttacctttctgcacttgttttgttctgcttgtaaaattagaatagcatatattctattttatatcaatatttttatcaaaggataaaatgaaactataaaatgaggcatgaagcataaatacaggcatacctcgttttactggtgtttgctttattgtgcttcatagatattgcgttttctacaaattgaaggtttgtggcaattctatgttaagccagtctgtgggcgccatttttccaacattgtgtgctcacttggtgtctctctgtcacattttcgtagctctcaaaatatttcaaaccttttcattattatgtctgttatggtgatctgcggtgagtgctttttgatgttacattgtaattgctttggggcaccacaaactgtacccatataagatggcgaacttaattgataaatgttttcagtgttctgactgccccacccaccagccgttctcccatttctctccctctcttcaggcctccctattctctgagacacagtattgaaattaagccagttaataaccctgcagtggccttttaagtattcaagtgaaaggaagaattgtacatttctcattataaataaaaaggtagaagtgattgaggtcagtgaggaaggcatggggaaagctgagatagggcaaaggctaagacttttgtgccgtatagttagccaagttgtgaatgcgaagtaaaagttcttcatcagtgaacacacaaatgacaggaaagtaaaacagccttattgctgatatggacaaagttttagtgatctggataaaagatgaaaccagccacagtacccccttatgccagagcctaatctagagcaaggcctctaactctcttaaagtctgtgaaggctgtgagaggtgaggtagctgcaagagaaaagtttgaaactagcagcggctcattcatgaggtttaaggaaggtaaccgtctccataacattaaagtgcaaggtgaagcaacaagtgatgatctagaagctgtagcaagttatccagaagatctagctgagatcattgatgaaggtggctacagtaaaccacagattttcaatggagatgaagcagctttctaatggaggaagatgccctccagtagtttcatagctaaagaggagaagacatggatcaaggagtaattttgactttcacgtcttagtatttaagaaatacatttcgtaagtccatagctgacatagatagtgattcctctgatgaagctgggcaaagtaccttgaaaacctggaaaggattcacctttctaaatgccagtaagaacattcatgattcataagaggaggtcaaaatatggacactaacagaagtttggaagaagtgtattccaacccccatggatgactctgagggcttcaagacttcaatgaaggaagtgactgcagatttggtgaaaatagcaagagaactagaattagaagtagagcctgaagatatgaatgaattactgcaatctcatgattaaactagaatggatgagttgttttttatggatgagcaaagaaagtagattcttgagagaatctactcctggtgaagactctgtgaacattgttgagatgacaacaaagatttaggaaattccatatatttagttggtagagcaatggcaaggtttgagaggacacaatttctgtgggtaaaatgctatcaaatagcatcacatgctacagagaaatcttttgtgaaagtaagagccaatcagtgcagcaaatttcattgttgtgtaaattgccacagccaccccagccttcagcaaccaccccatttatcagtcagcagaccctttattaacattaaagcaagaccttccatcagcaaaaagattatgattaactgaagacatagatgattgttagcattttttagcaataaaatagtttttaaggtaaatgcattgattttttagacataatgctacacttaatagactacaatatagtgtaaacataacttttataagcactagaaaattaaaaacatatgactttctttattgagatatatgctttattgcagtagtctgaaaccaaacccgccatatctctgagtaatgcctgtgttattagagttcatgaactaggctgcagtcgggaaattgtagctattctctgtagcagggtatgtatgacacattttcagttggataacattctgtgtgatgattgataatggaataggaaccaacaagagcagaatagcatgtactgcagggaatttgcagatagttgattcaatttttatatccagctaatcaatttgccagatgctggtagatgctgtctcatttggttgactgtgagacttgaatctgctacacatcactctatagattttgaacagttttattagtaatacttcaaagttctaattgacttacaaggtgtgtcaaggaaatacaaaattgctaacaggccctgaaacacaggctaccagaattgaagtgttaagtctatagaacttcttggatccatcacctcagtatctcaagattagctgaaggaggaacaagtcaggccagataaaatacaaaaaaaaaaaaaaaattataagtactgaacatttactgcagatgttagagaaggagaatgctatgtaactgctaaatgctgggaaactaagtagaactaccaacttatagggatgatattataactggaaatataatagtttatagctaaagaaattaggtatccagtaagatgaccatataaagtaacagggctatatataatgaaatgtcttgaacaaaggaattaaacggtgaaccaaaggggaaccttattgttaatataatgtaagagaaagaatatgttgtgattccaggttcacttcattataaagtcaataatgtaagtacatagattgtaataatagcaaagtttgcatttgcttcaaatgcaaagggcagtggattaaaatatcttatttcctccgtccttcctcctgtaaagataaaaatctcttgagaaaaccacattattttttcataattgtttaactcaagaacatacacaaaagcaccaagcttattatataaatcaaaggattttccatcataaaaacattttaagaattttttaattttgtaaaattttgaatcccaaatgatagcctattagaagtaaatttagaaggattttgatggatataacatttctttaagcaaatgtagttgccatctctgtgctctcatcatctgtgcattcctctgctataccacttagcaccttgcagtaatttattctccttcagaaggtcgaaacctcaagtggggccagtgtctgtattcccagaatctgcttagtgcatggtacatgacagctcttcaaaaagtgaggaaaagatgggagtgagactgttaaaattatgagttttaaacataccaggttagagtagagctaaattttaaatatgcaaagttaaattaacacaaaaagtaatgacaaaatgaagaaatagagttatttaattgcaaaattatactccaactgtggcctatgtcaaagtgttttagaaacccctgaaatgttaaaagcatagagcttgaaggaatatcagaagtcatatattaaatcctattaatattttacaatgaaatctatatagtctgatacaagttgatgtatgtatttgtggaggctggaggagggggaagagcagaagaacttctgaacggcttctgtttctagtatctgagaaactaagtctttatgaatatttctgcagatttttttgtggctgccttcacagaactaaaggtgttaaagataaaatagggtgtttaatttgaccccttgaataccaatcagttggcttctgtatagaaaatttcctttagatgaaaaaaacaagtgttcataattgtttgtatttatttgtgttatccgcttccatttgggccattttaatccttccgaaaggcatattaatacctggaaaaataaagagataaataattaggctctgctttttgttacttttttttccagttaaaaatgtcatttttaagaaagaaaaataatacatgtttagcatattataatacttagaaaatagtttgacaaaaagagtaaaatgaaaaatactgaaatcttactaacctatgtaactgttacttacgtaggtgtatgtgcttctgggccatttctatgcatgttcgctcactcatattaaaatgaaatcatggttggtaggtacacaatctcagagaaaatatagggagttaaaaaatgtcattaaataattaacccagttttattttccattcatagcagcaaaacacaattaaatgttgaaaggacaattttaaaaagcaaataagacaaagatcatgaaacatgatatgcatttgtttatttatttattcctgaaacccacctactaatgttaaacattccaaattccagttcatggagcacttattttcttttacagctttaaagtttctcttgttctgtaagcagtctttgaatagttgagggtaataagtgttctgattgttttggagaaaagttcaaaatgtgtaatgaaaaataatagtcaaatccacaacaatctacagagaaatggctacacttctgtttaaaaacagtaattagtattgaggaatgcacatcactaaaagggtggagtgtaagcaggtcctctcccttgataatatcctttggtactcactagcagggagagaacaccaattattattgagctggtcttcatttagagtgcctgaatgaaatagtacatgaatataaagatcaaatacctaatattgtttatatgcatcatctcagactcatagttcatgaaaccaaggcctataacttgaaaaagtggtcgtccttttgtatatactgtctatattgttttataaattattttttccaatgaataatatgagcaattttccattgtgataattacatttctatacataattttagtggctaaattccctttcattaaatgaatacaccgtagtttaaacaactgttgttgcacaattatactgttatatctttttcaacatttagatagtgcttcagtacacactaactacccttacattcctcaggaaataatgtcttgaggtacaatgggtcagttaaacaggcaaaaaaaaaaggcactttctaatttgcatttttattactaattaatttttagtgaagttaaatatatttttattggacacagttcttttgtgaattttctttaatggttctttgcccatttttctgttcgattattaatttttaatggatttcatgggaactctgcatagtaagattaattacccctttcattacaattttgtcatttgctttttttggtgaatggctttattgaggtataattgacatattataaactgaactatttaaatgtactatctgataagtttgggcatttataaacctgggagactattgcctcaatcaagataatgaacatatttcatccccaaaagttactttgtgcccttttgtgttctgttccttcctcacccttatcccaggcaaccactataaattagtttgcattttccagaattgtatataagtgaaactgtatataccatgtactctttttttatctggctcctttcacttataattactttgataaatctgtgttttagcatttatcagtagtttattctttatattgttgggtgttgtttaattgtatggctatgccacagtttgtttatccattcacctgtcaatggacattggggttgtaaccaggttttagctattacaaataaagctgctccaaatattcacatacaagtctttgtatggacatatgcttcatttctctttgacaaatttctaggagcagaagggctggatcatattgcagatgtatgtttgacttcttaagaagctgccagactattttttaaagtgattgtgccgtttaacatttaacattcccaccattagtatatcagtgtacttgccaactttgaaatggccaatcttggcaatcattaaaaagtcaggaaacaacaggtgctggagaggatgtggagaaataggaacacttttacactgttggtgggactgtaaactagttcaaccattgtggaagtcagtgtggcaattcctcagggatctagaactagaaataccatttgacacagccatcccattactgggtatatacccaaaggactataaatcatgctgctataaagacacatgcacacatatgtttattgcggcactattcacaataggaaagacttggaaccaacccaaatgtccaacaatgatagactggattaagaaaatgtggcacatatacaccatggaatactatgaagccataaaaaatgatgagttcatgttctttgtagggacatggatgagattggaaatcatcattctcagcaaactatcgcaaggacaaaaaaccaaacaccacatgttctcactcatagatgggaattgaacagtgagaacacatggacacaggaaggggaacatcacactctggggcctgttgtggggtggggggaggggggagggatagcattagggatatacctaatgctaaatgacgagttaatgggtgcagcacaccagcctggcacatgtatacatatgtaactaacctgtacattgtgcacatgtaccctaaaacttaaagtataataataataaaataaaaataaataaaaaaatttaaaaaaagaaatgtccaatcttttgaatattagccattctaatatacatgcagtgctattttattgtggttttaatttgcttttccctaatgactaatgatactgagcacctttttttgcatgcttatttgtcatccatatagcttcttcagtaaattgtcttttcaaatcttttctccattttttaaattgtcctatttgttttctgattattgagttttgagatttctttgtgttttgtgtatacaagtattttatcaggcatatgatttgcaggtatttccccccagtctggtttgttttctaattgtcttaacagtttaaagaacagaagtttgagattttgatgaagttcaaattatcagcttgttcttttatgcattttagtgttgtgtctaagaaatctttgcctaacccaagctcacaaaggtgttctctgtttttttctagaagtcttacagctttgggttttacatttagatctgtggttcattttgagttacttttgtacatgttgtaaagtatggatcaaagttcatttttttcacatatgaatatccaactattctaacaccatttgttggaaaaaactgtcttttctccactgaatggcctttatactttgtctatacaccctgggcactctatactattctgttgatctgtttatttatctttatgccagtagcaaactgtgtggattactgtagctttataggatttgaagtcaggtattcttttctttttcaaagttgttttggctgttctaggtaatattcatttccatgtcgattttagaatttattttacaatttctccaaaaataacctgctggaattttgagtgggactgcattgaatctacagatcatttggggagaatttacatcttaccaatattgagtatgccaccccatgaacacaatgacaaattgctttgtcagtttctctcagcagtatttttagttttcagtatacaggtctttcacatctttctcctttttttccccaaagtatgtcactttttttatgccgtagtaaatggcattttttttttaatttcaatttttggttcttaattgcttgtatatagacatatagatgatttttgtgttttgatctcaatcctacaacattgctaaagtcaattctagtgccttatttttttagattccatttagaatttttacacagatatggagccaggacctcagagtgagaacctccttaaattttgctgcctgtgtgcctcacttgccttactccactttagctctacctagacaatcatgtctgcaaagacagttttttttttttcttttatacagtttgtccattttttggtagtttcaagcagcagagtaaatctagtccctactccattttggtcagaaatggaagaaccctattacatcatttcctttttaatttttgttgtggtagtttatttatatatttaagtcttaaatatgatttaaaaatcacattagctctgtcatccagtcttcactggaatgcagtggcagcctcgacctccagtctcaagcaatcctcccacccacctcagcctcctcagtagctggaaactacaggcacatggtaccctgcccggttaatttttcaattttttatagagacagggtctcattatcttgccagggctggtctcaaactcctaggctcaagtgatcctcccacctcagcctcccagagtgccaggattaaggcatgagacactgtgcctggcaagtttttttattttaatgaagactctttaaatgttcatgttacaaaatctgttcattggtccataagaatgttgacaattattaaccttttctgactcatgtaatccttcgatggataacctgataaaaattatgaatctgctttccagaaatgcttatataaacacactcacatttccatagtaatttcagtagtccatagactccctgaaggtttatccattgattccatattatgaatccctgttttgagatttatttctttcatgtcatgtttaggaaggctttccatttcaagattatgtaactaaggaaatacttttttaaatgatgagtttatatattttttctcctttgtatatttagacagacatttaatatttttcaagttcatgtgttttaaatgatcaaatgaggtaatgtatgtgatagcaccccaaaaaatacaaagtgcagcacagatgctaccatgctcattatcatcatcatcatgatcagtcatcatcagaacattcaccctttgagccatcttcgtcactctagagaattaaatccaaaataagaatgatgttaagaaacaaagttagctatgaaagtaattattcttgcatgatctataagggagaacagagaacactataaatagagttatctcttgttatctatagaggactggttccagaacccctggggataccaaaaatctatggatgctaaagtcacttacataaaatgtcatagtttttgcatataatctgtggacatcttctctcatacttggaatcatctgtagattacttacaatacctaatatagtataaatgctatgtaaatagttatcatactgtattttttatagtattgttatttttttctgaatattttttatccatagttggttgaattcatggatagggaagccacagatacagtggaccaactgtattcagtataagagaatgtgtaaaaaaaaaattacggtgcttcattaaatgagatactgtaaaacatttaataattataattacgtcattgtagaaatgtaagaaatacttgcatttaaattgagaaatgttaaattgtatttacattatgatatatagaatgtgtgtgtaaaaattaagaagggtacagaaatatgaaaatagttgttttagagaggcttgtgaataaatattattttagcatttcccttaattctgttatgcctttgattttttagtattatttttctatatacatatatttaaagttagtctcccatcccagtttacatggccttcacagctcaattataatgctgcctgacatgaaattctatttgcttccttatgattttatagcattgaataatttcaaattttgctagttatggtgtcttattattacccagtttttaagatgtgttatgcagtttctgattatttgttgaatgctacagttttagggcttgattatgcttttgctatgatgatttaactaattatggattcatttcttcagttgcccagcaggaggctgaaatgttcaaacgctacaatggaacatttccattacctggaatacaccaaagtcaagatgccctatgtacctgtccaaaactaccccatcaaggctcttttcagattgatgaatttgtccacactgaaagttcttcaacgaagatgcagctagtaaaacagaggcttgaaactgtcacagtaagtttattttatgcagttgaaactttaaaactatttctatcctgttttacattgccatgccaataaatattcatttaatgaagtaagttaattacttaaaattagaccttcctatacttttatggttcctttcaggtacttattcctaaaaccttaattgcaacagacaacctgaatttaggataatctatcatgctgttctgacttgatatctctgtaaaggctagcccagcacctagtgataagggagggctctgaaccagatgaccacacctaggacttagcatacaggtatgactccatctcctaggaaagaaagagaagctgtgactttatcagcccagcatggtggcgtacacctgtaatctcagccactcaggtggctgaggcacaagaatcacttgaaccagacaggcagaggtttcagtgaggcgagatcctgccactgcactccagcctgggtgacaaaatgagactgtgtccctgcttccccaaaaaaggaaaataagtaaaggcaaagcgtatcttaaaatgctttgctataagaaacagaatatttagagtgtgttctcagtaaaatagaagaaaacagaatttctattaatgaagagatgagagtcccaagattttgattttagaaagacatctaagataaaatgaatttaaagaaaatcaaaaggtaagcttcaattaattccacattgcaaatggtaaaagagaaagttgacactttaaaataccagatcaatagtgtagcgtagagaactaatttcagaagcacgcaagaatacagaaaaaaagagataggtgaaaactatggtttagagtgtagctctggggtccagctgcttaggcataggaatggcataggctccaacctgtgccagctttttgactggagaagtttaagtaaacctagttttcctcatctataaaatgaggtggtttttggttgttttgttttgttttaatttagagacagggtctcactttgtggcccaggttggaatgcagtggtgtgatcattgctcactgcagtctcgaacgcctgggctcaagcaattctcctgcctctgactcttgagtagctgggactgtaggcacacaccaccaggcctggctaattaaaaaaattttttttgtagagacagggtcttggtatgtagcccaggctggtctccaactcctagcctcaagcagtcagcagtgctcttgcctcagcctcccagagtattgggatttcaggcatgagccattatggggattgtagtatttcttaccttacaggatttttaagattcagtaagaccctaaaagtaaacctcttaacagggtgtctgatacatagtgccactgataaatgttagttattattgttgataatgagagaagagatgaatatgagatagattgtgcatatagttgatcagtgttgttaaagaagagaccagcatgtgtgaaaagagataacaaagatcaaatacaaaaggccttcctgtgctaaagtcccaaaatctataaaatgaaagtatctattaccagaccaattaatgaaaagatgccagtatcttagaaatatcctagtgaaatcgcttgatttttaaagatttcttaaagaaaaatcatagatataatgggggggagaaaaaaagactggttatctacataggaactaagctaccttcgaacttctccatgagagccaaagtaataatgaagctgaaataatactagtagtataattgaaattcactaagatagaaagataaatcagtggggaaaggaagaattgttcccttgtatggtgttgggaaaccttgttaactatgagttaactgaaaaatacagtccatttacatatatatcttaggtcactcacctaaatcaaattctcatttaccaaggagttaaatatgaaaatccagatctttttaaaaactagggaaatacacttgcaattatttctcaaatgaatgaaaacatactaattttaaaagcagtggaagatcctctcccaaaatattaatagattattgacatagaattttaaatttctctgtttaaaaatataaggatgtgtatatttgtgtgtatatacaaaacatacaaacacacacatatatgtgcaacaaacaccagcctggggaaatgtttatataaaatgtattaaagaaacagcccttttaacatgcaaataattaaacagtgaagaaaaatagtaaatctttaacaaagaaatgagtgaaagaaataaactgttcttctaaaaggaggagatagaaatgtttcataggcatattttaaaagttctatctcactactcataagaaaagtaccacataaaccaggtatttcccataaaattggaaaatagatcatgaaaatgatgaggaggaagatgctttgttaaaggtagtgtagcattctgttagtgaaaattcctagaaaatttttctcaaagataaatggtcaaatgtagtaagaagcctaagcatcctgagaaatatctttgaccatacttctagtagaattaagtggaagtccttttattagaattactttgagctccttgaagacaggggctgtgcacccttgttcattgttttattcttaccttctttaataaatgttatcccttttcttgcttccttgatagatatcttgattagttttaaactatacaaggaactacattgagacagctttagttctgactatgctctcttcctctctcttctttctaaagttagagacttgaaggtgtatcaggatgcagattacattccatctctgggtttagatttaacctaaacccagaataaatgtaggaatatagaaaagtatatatatttcttagttaacttttagaatatataactataaattaataaatttatttcaatattgcagttctttgtattttaacatttttaatataatcaaataatgcatgctgttccagattttaaaaggaagtctgaatagatacattgagctttaaagatgaagagaaacatatttcttcactaggaaaaaaaagaaaatgtgttccttgtctaaaaacttgcatggcaaagtaacttcatctacaggcataaaaacaactcaccaacagatttataaaaacaagtttcctacagtctatccgtctttattctgtaaaacttaacatcctggaatcaactaagtcttgtagcttttttctaatttcattttatatacctgtcatcctcagataaatgaaaggatgtaagaactaaagaaagtagatgtaaaggaaaaataaaatcagaaatttttttttttttttgagacggaatctcactctgtcgcccaggctggagtacagtggcacgatctcagctcactgcaagctctgcctcctgggttcacgccattctcctgcctcagcctcccgagtagctgggactacaggtgcccgccaccacgcccgattaatttttttttgtatttttagtaggctttttgtatttttagtagagacggggtttcaccgtgttagccaggatgatctcgatctcctgaccttgtgatccgcccacctcggcctcccaaagtgctgggattacaggcatgagccactgtgcccggcagaaaaatgttttttaagaaatgaaatcaaacgcaagagagaagcaaattgataatttattataaaaaaatttactttgaattattactttatttagcttttagcatatcatttctttttaaaattatttagagaatatgtctgctttggtattgaggtagatagaagctgcctttggaaatgaaagttttgctttggtttttaaaaaccattatttttcctttgttgagagaattcactgaatttatttttctgatgctatctgcaatgtattttctttcagaatgtacatagtatgtatgggaataaaaacaaagtgtcgtctttattcccatggcagcctcattctatattgtgcaaacatttaggttgactgaattcccaccttttgtcattatgccttttctcgtttcttgccatttatttcagtagaccccaaattcctttttttatttattttttattacaataggaatgtttttctaataaattatggtacaggtttagggtgtaatttttgtggggtatgtgtgagtgaattgcataataaattcagttcagcaggtatataataggtgtttaggcattaatgagtaaaagatacaaaaaatagataattgtcggttattgggagcattaccatttagtcataatataaatcacttaattatttcataattagcatacttgactgcatgttgctgccacagcaatacctaacagcattctgcaacccaggtaagacttcacgggtatcttgagagcgttggtaaatctcattctaagttttcagatccagaaatttgattttatcagtgcatccagggttgctcagaatctgtagtatctattaagattaatcaatcctacaaaaagttgattaacaaatgagaatccatgaaaatacaccttataatataataaaaggtagaccattctggcagcctgaacactcaagatctcatcctgtctaaatttaacctgaagcccaggctaatgatcacagagttgattgctaagtagagccataggagtatggattgaatgggttcgaaaatgttttatgccaattttgaaaaaagattaattttctctaccccacaggagataccaccgtatatattgattaatgataactaacatctgcttaattattagtaataattgatatatttctggcactgtgctaaaggctttacattttattgtatttaattctcaaaccatcctatagggttgagtattattcccattttccagaagaggattttgaggcttacagagatcaagccacataaccaagatcacacaagtagtaagcactggagctgggattcagcccaggtagttggactcccatgtccacagtcagtttaactgtctccttttagtgactgaattactgatacgctttagatacagtatctggctcttagaaatttatagataaaaaaattaataggtattccagattttgagcaactgtggatgcactgataaaatcaaatttctggatctaaaaacttagaatgagatataccgatgttctcaaggtactgtccacctgtgaggtcttacctaggttgcagaatgcttttaggtattgctgtggcagcaacatgcagtcaagtatgctgataaataattaaatgatttatattatgactaaatggtaatgctcccaataactgagaagtatctatttttttcagttcttttttttcctaaactccatgttgattatgaccatttttcactagcactgtactaggctgatgctatatgctggctaactcctaattggactggacttgagtatttttttttctttttctttttctttttcttttttttttctttttttttttttttgagttggagtctcactctgtcgcccaggctggagtgcagtggcgcaatcttggctcactacaacctccacctcccagattcaagtgattctcctgcctcagcctcccgagtagctgggactacaggtacgcgccacaacgcctagctgatttttgtatttttagtagagatggggtttcaccacgttggcccaggatggtctcgatctcttgacctcgtgatctgcctgcctcggcctcccaaagtgctgggattacaaggcgtgagccaccgtacccggccagacttgagtatttttactctctccttagcagcagattttcaaattgtccataatacatcgacttttactagtttctctttcaaaatgatcttttcttggccgtgtaccatgaattgtacagagttcctttctgtagctctttcaataatagtcatatattttatcatttagtagtatttactatttaatattagatttcatctgatacaaataatatgggaatgatagttatggctattattatttatagagataattatatattgcatttaactcagcatgtgtcttttacacctgttagtgttctagtatagaattttattctattgattgaagagcaagtttttcttgaggcagataacctgtgagccctcgggagtttcacagtgccatttgtttgggcaagttagatttaccttgaacatgtcattaagtctctttcattggaaacaatgcagagtgacaacggcaggataatggataaagaaacttccaaatgctgatttaggttattagaagataaacatctgagtgttttgcaaacagtcaatatttaatgaaattatgaatacttccttattttattgtatttcttttaggaggtgatacgttcctgtgctgcaaaagtaagtagtttttattaccaggaagataacttcaaaggtatagtgatgctccaaagaactggaatgcaccattcatagagtttggaacctttataagagttaatctgatgtgtactttcattattggagctcagctttatcacagaattacaatactggaagctgataatttagtaagggtgatcatttagcaagtagcttcacatttttaaagatttaagaatactaagtgatggagatactttcagtaaaggatcaacaaggtcatgtcattctctgagaaaaattttatatgatatttaatttgtataagacaccggtcaatatagttccagtaggtatatgctgagtaaactgtataagcattgaaatgcatgcaagctgtacataaatgatttattgtactgataatgctctccttcatttataagtctttcacatttcttttctcatttaactatactgtataataatcctgagagatggattagatataattgttattccaattttagaaaggaggagactgaagtttattcaggttgagtgatttgcccaaggtcccaagttagtctaaaaatggtagtgtacaaaaaggctctcgattagtaaacaatttcaactaaattgtatcttatatgctttcaacacagcagctttcctcttttacaagcaaggttattttatgtgtaacttttaatttaggtgttgggaaaataaggagttggaatggcaacatgagttcatccttccctcttctgtccactcccaaaattcagttgaataattagacgtctattcatttaacaaatataattacatatcacaaagagaaggtaaaacatccagaaggaaagaattagaatgttagtatatttagagactgcttcatataatgtcagtgcaatggaatttttttttttttttaattcagtgggcacctactaccatttggtagtaggcacttggaatgcaataggctattgtcgctttcctgatggggcatgttagggagggaggaacatgtcagaaaatacaagacttaccccatcactgagctgtccagcatcagtcacagaacccatcacttttatacctaattatcacaagtcaacaggatatggaatatagacaaggggaaggaagacgaggggggaaaagagaacaagctatattctgacttgtactgcagatgttcaggaaacgttcctgatagcaatgattggtgtaatgattgtagctccaagattactaaaccttctgaagtactcattgtgtataaaatcagaggcaaaaatacaatttattttctgactagcaattcaaagctatttctctttatttaacaaatgtactgcatactcttcttttggaatgctgtctgaatgtccagagaataaagtgtcctgcacagattgagcaaggctttatggagaacagcctctactaatctggaaactccccaagggtgaaggatcatgccattcatcttcatatccctagtatttaataaaggtagaataaatactcattgaaaaaatgattaatttggaaatgaatcagtgtctggaaaaattaaccttactagtatcttcagttattctttttttataatagttttattgagctataatttatataccgtaatgcccactcttttaaaatatacagttcactggtttttaccatattcacaaagttttgcagccatccctactatctgattttagagtttttcatcacccctgaatgaagccccatatctcttagcagtcattcccaattcctacacatacacactccaaatacaaactcttggaacataccccaaattcctggcagccattaatatactttatagatttgtctaatctgaacatttcatataaatggagtcagatggtatgtagtcatttataactgacttcttttactcaaaataacgttttcaggattcctctatttgtaacatatatcagtgaacaacacagggattagggggaccaaccacctgtgcagtcaaaaattaatgtataacttttgactccccaaaaaaataagtactcatcgcctgctgttgactggaagccttactgataatgtaaacagttaacacatattttatgtgttatgtgtattatatactatattcttaaagtaagccagagaacagaaaatgttattaagaaaattaaaaggaagaggatgtacatttactattcattaagcaaagtgaatcatcatagaggtcttcctttgtcttcacattgaatagcctgaggaggaaaatgagggtttggtcttgctatttcactgggggcagaggcagaagaggtggagaagtgggaaggggaggcaggagaggcaggcactcttggtgtaacttactgaaaaaaaatccacctataggtggacctgcacagttcaaactcatgttgttcaagggtcaactgcactactttttattgccaaataagatttcattgtatgaataggttacgtattgttatatttgatcagtttatgaacatttgggttgtttctactttttagctattaagataatactcctacaaacattgtgtgtataagttttggtgtggatatatattctcatttctatgggatatgtatctaggagtggaactgttgggtaatatggtaactatgtttgacactttgaagaactcccaaaactttttccagagcatgtgaaccattttcgaattccaccagcagtgtacgaatgaggttccagtttcttctcatcctcaccaacacttgtattctcttctttatagccatcctagtgggtgaaaagtggttatatcatagtgattttgatttgtgttttctttatgactaatgatgttgagcgttttttatatgccatttgtacttttttttctggagaaatgtctgtttaaatatttcacctggttttaaaattgggattttttgtctttttattgtttacttttaagttctttatatattctagatacaagtgtcttatgagttagatgatttgcaaatattttatcccattttgtggattgtcttttcactttcttaatgatgtcttttgaaacaaaaaggtttttttatgaggttcagtttattttttcttttgtcacttgtgctttttgtgttgtaataaaaaaccattttctagccttgtgtcacaaagatttactcctatgttttcttcttaagatttttatagttttaaatcttacattcaggtctgtgattattttgcattaatttttgtatatggtatgatggataggtccactttcattctattgcatgaggctatccagttgtctcagcactacttattgaaaagagtgctttgccctttgactggtgttggcacccttgtcaaaaatctttaatcttaacaacagagtgtatttatgcagtttatcatctattagatctaggataataaatttttcccaagtgtccgttacataagtttttgcccttctacagtatttttatattgttgaaggctcgcttgttttttccattagcattctttaagcaagtatttattgagtatctaccaagtatttttctaagtgcttggaatgtaatagtgaacaagaaccttttattgtagagagacacataatcttaaaaggaaacaaataaggtagtttcagataataagtgatgtgaagaaaataaaataggttcatgggacaaagaatgactgggaagggaagctactctcaagaggatggtcatagaaggccttgctgagagaaacacttaacaaggagctagtcatgtcctgcaaaaatcctcatctaggaagaaaactggcatgctcaaagagcagaaagaagaccactttgcttaagtagtgtagtgagcaagcaaggggaaacaattgtaaaccaaaaagtatctgagacaggtctcaacaatttagaagtttattttgctgaggttaaggataggacccagaagaaaaaacaagaatcacagacacagtctgtgggtctgcctttctccaaagatgattttgggggcttcaatatttaaagggaaaaaaacaggctggaggagaaaagaaaggtatggtcacattactgaatcctcaagttgcaagagaaaagatgcatgtagggggatagtcaattatgtattcatctcacactcagtaaattgacacttttcaaaagataaggtgaacatgaaagctacctgcggagatatttaaccttttatctgtagctatctgcttatgaataaaaagaaaaggaactctttgaatgacttagctttcagcttaatttttttctttttgacattagattataaattacctcagggaggaataacacacactctctttttctgtctctttaaattttacataataactgctttcgcttctaatctttatgtatctgtccctccacacacctctgtaagcttcttgaagccaggaaacttcatcttttttttttttgaagtattacatcacctaccctagatgaatataaattcagccaagttgaagtttattgagttatgtttagtggaagagtgctgtaaaggtaaagtggtaatgtatattgtagtcgaatccacctcggaacatattattcactgaaaacatttttttaaaggttcagaaaatagagaatccagagaaaatatttttttaatttttctgtttaaaacgtatatttggatatttttgagatttgagtagaatagtgtttttcaattatttggaaaggtttttttaaaaaataatttttaaaaacataattattttttcgtggcattccaaaactggataactgcaaattaagatgagaacttacaaacacaaaaaggaaacaacagacactgaggtctacttgagggcaaagggtgggaggagagagaggagcagaaaagataactattggggactggacttaatacccgtgtgatgtaataatccatacaagtccctgtgacacgagtttacctgtgcaagcttcacatgcacccctggacctaaaagaagagtttttaaaaaaagatttattatgttggcactatttggaagactggcttaactggaagagtagtacaaactatagtaatctatatgtggagcgtggtgagcaatctagtatgagtcccagctttctggccttggcaagtaggtggagaatgatggctttccctaagaaagtaaacagtggggcaaaggttagtttagttttgaacttaatgatcaggagatgtgttttagatttaagaaacatcagcattagaaggcagatgaattgatgaaaacaaatgtttctgcccagtgtaattatgtgacgtgaaggaagaagaggagctcagcggatctaacaaatagcactgatgaggaatggctggacatagcaggataaccaagagaagatggctccccagaaacaaagatagaaggatagaggcctaagtgaatctgctgaatttgatcatttgaagtccagggttaccataagtccaatttagttttatcatggagacaagctttgttgtacccggttgaagactgaaggattcagatatatggattgcagttgtgtgctgtttttcaaggagtttagcttttaacgaagcttaaggaagtaacggaatcagagggagagttttagttggtttgtttcctctttgtttttgtactaaaatagaagggtctatgcttctaacctgcagggaaatagccagtaggaattcgaaagtagaatttttcgttttgaagcagggtcttccctgtcacccaagctgagtgcagtagcatcatcacagctcaatgcagcctcgaccttctggacttaagcagttctcctgcctcagcctcctgggtagctgagaccacaggtgtgcactgccacgcccagctaattttttatttttttgtagagatgaggtctcactgtgttgcccaggctggtcttgaactcttggactcaagtgatcctcctgcctcagcctcccaaattgctgggattataagcattagtcgttgggcctggcctgaaggtagaatttggaagagctttaaggataaccctaaggggactgagggatgaatcttgaacagaatgctcctcttcctctaaccctagaagtaaagacataaggataggtgggagaggtccattctttcataagtttggaaatgagaagttcaggggttcaagaccaaattttctctgtgaagcaaggcagtgaactaagagagaaaaggaggtaaaggttttgagaaaaccaagatgcattgaggtaaattgctttaccctaaagaatattgctggataattggtttgagccaggactagatcttaattttgaaattgacatgaaagtgtcatatcagtaatctgtgaaccaccagtccttggtacctatcagagggtcaaaaatcacgattaaatataaccaaaaaactttatagtgactgattcaaatttgaatactggttttagctaatgtagtagtaatgaactggtttgggggtaagatttttctggtatcttattgctgtagaaatttttctttaacagttacagtgttgtcttccaaatccttcacttctctgtcctggcttgtaaagaaaacatctgaggactgaggggtcatatttgaattgctctttataataccatagactactcattgcttagactttactaagctagaaatcacaagagcataagctactcttaaaatttatattatgagaatgtaaaagatacctgacttcaaatatcttgaacctcactttggctcaagttttctgtttaactttttctttaatactgatattttaatttttacaacagatacatgatttgcaaaaaaaaaaaaaaaaaaaaacatcctgggtattattggtttctttttttctaatgccaccagaactgccatcagattaaaatattatctgcattattattcatattagtggaaaaatatgacagctgtctgggagagagatgaatttgtgaacttttaagtatacagacagcattaacattctttcggttataatttaaaaccaacttgagatatgatatcatcacagcttgaaacttcataaacaattcttcaggtgaatgtagcgtgttatctaaaattagctaaaagggtagacttgtaagtatacatggaaatgagtactatatatctcccaaaggttttaaattttaactaatcactaaaagagaaactaattgtcagcttgcttaatattgtgcattcaatttcatgttcagagcagcaagttttttaacatgaaaattaacccccgtctagagaattagtatttgcatattttgcttgtctgcttataccctaaaagagtaggcaaaacagttttatgattaacttggcagaagttccagatgattttttttctttattatgaatttcattaaatttttatgcttttagttttctccaatatggaggtattaaactgactttggcagactgtggtttttgcatgaagcaaacagaaaagggtgttgtgaaaagagggtagattggtgtagggtagactatcttaaccaacctttctgttgttgtaaaattattaagcaattcttttccgcagcacatatttcaaaaatagatattgcttcactctatttaatggttattattatttttcttcctctaaatggaataataaatatgtacgagcttgctttgaaaatgatttgagttctaatttcaaaacaaatatctaataataacagtaataattaacagttaccccaaactttagaaattatctgctctgttacgttgctgctctcatcactttatggacatttgaatagtctgtaaaaaactatgtcaagaaagatcagaattataaaaatgtttaggaagaacatataattatagattacaggttttttaaaaaaaaattttgttgtaaaagaatgacaagtctttctgtttgaacagaggcatttaagtatcctattttaactttccaggtattttttgtttttaacacaaatttctgaagaagaagactataaatggctattgtgtgtatctatagatatatctatatctatagatatggatatatgtaggtgtgtgtgtgtgcaaagatgtgtgtgtatatagatatatcttcatttctccagcatacacctgtttgtttgcaccagatttttaaatgcattacttgattttaagataaaaattttcaggaagtaaaactgagaaatgattccaaaaagaagtgaattaaatagttaagtgataaatatgttcttttccatttgaaagcacagaactctgaaaaattggctacatcatcatatgacatcataaatacctaattacccttacttctagtgatgttaataataactaatataacaccttatttgtatactactttatggtttgcccttgccaagatattctatttaatctatttcttatttaatgttcattagtgctttatggttaacatatgaatagcactttatgatacccgttcatcattattgctttcctggcacattcgcattgaagtatagatattatttttcttatctccatttaaagatggaaagtgaagctcaaagatatcaaatgagtttgttgttttaggtattgtatcactataactggtcagttttgatctgtatttaatggattttgatagaatttttaaagctgggtgatattttaggactgatgtggtatttgacccccccaactactttggaaaatacttttattttttattgagatgacataatagtttagttactttaaaaccatattaacatatggtcttaattgactttttcactgaatttgctaactctgctctaagagaaaaacctaaactaagatatactgtttattatcactgtttaaaagcaaaaaatagaaaaaaaaatttacaaacatgtaaataatgaatcagataaagggcatgtaacaagagcccagtattgtcttatacagaacatcaaaaggaaaattttaaatgcttgcacagtagaagtcctctgtatggttttcattatttaacaaaaaaatgggaaaggggctgttttaatatagtaatatttatatgccataaattatcattttgtttatttacagattacatttttgaagtgaattaggaatcagactgtcaatttctccaaaatagatcacattttattgtgctttttgaaagtaatgaaaaagattaaatgattgatttgttaataatgaaaaaaagatagattttttttctgaaacgaattctgatttacaagatgaatttgcctataaacatttcaagctttttcagtgaactatttattttcctacaagagctatagttaaaatgttgtgtttattatgcatttcatttctgtgaggctagtgtgcactcagataatcatactaggttttgtatgttatagaacattgtatttacttacagaaattttccttcttattttaatgatatttttaaacagtatcctgagtaaggtgttttgatgcaatggatactatttcacatggcaagctaggttacagctgtgttatctgtgtcaccatgatgtatataaacatgagtagtacaggtgttttctgtgtatctctgaaaaggaagtacttgctatttcactaaaatgctagggaaatgtgaatatgaaacatttttacccttccttaattgaaccagtcaaggagtcatttttatttcttgcattactttgcataacttaagaccactctaagttattaataatgtcaagtccatggtaaacttcagtaaggctgatttattttcatatagctatgttctaattactattatatttttttcttgatgaaaatgattctcttttgtaaagtttacaaactaaccatgtacatcattaccactccttttgacctatcatgtgtcctggtttgtataataagcaaatatttctcatccagtttttgcattagtaatccaggaaattacactgtagtttctgatttgttttcctaatacaggtcaacaaaaatctctcatttacttcaccaccagcagtttcctcacaacagtctaagttaaagcagtcaaacatgctgaccgctcaagagattctacatcagtttggtttcactcagaccggtgagcccctttcttactttgacaattcttttaaatgttcagatgcttgttgtgttgatgaatatcacttatttctttagaaataaagctcataatggtcggtttttacacttgacaaattatattctagcatctcttttgtccttaaaatcaccaaggttatttcaaaagtaagtttggaattggtaacagtagatacactgaacctatgtgctattaacagataataatttaaaactagcaaaacacgtgagttttaaacctgcatgatgttaaatctgattcagtttcccaattagataaagaacccatcatagatggataatcccatgttataattcatttcaaggaaagccaaggtaaaatacattttggcagaaataggatgtaacctgtagtgatatcacatcccattaaagggcaaattaacaaaatatgcaaaaaagcttgttacataactatactgaatcactgaagtgaactatacaattgttttggcaaatattttaaatgagtttcaataaggtttttaaaggatgtcaaaggaaaaacatctaagtgagaaatgtttttgtggtattgaaagatgactttttctgttcattagctatatgtttttgacagtattttttctattactgaattcttttagaaaggtaagaaagctgaaaataacaattatcttttacaaaaattatatgaaaaagaaaatttgcgtatgagaagatcagcataatttacttagaaatttgaggacaatatataccacttttttaccttgaaagtatttggaacttacatatacaagttattttaatattgctgtataggttacatgttatagtgagaaaatgcttggattcacaactcttatgctcaaccctggctgtgccttttataacccttattacctgcaaaccttagactcttcatttgaaaactgaaaatgatatttatattatatattgttgaagtttaaatgagattgcacatatgaaaacactataagcataaggtgctatgtgaatataacatatttatattgtaaacatgatgaatatgtgtaagctaactttgaactactttgaaatctaatttcaagtcactataataattaataacagttatctcaaaccttagaaatgtttaatttctagtgttccagatatctgccagaaactaaagtaatagtgtgggctattgttatttccagtggagctgcgtcatgtactacttctttagattattcttttcgccctaaatagatacttggcttggcttcagaccttgtcattcttataactaggagggagggaacctctctccaccactctatccctaccagctgtctgggaacaaacttttcattccacaattcaggattaagagcttagaaggtaaatatctggttgagttaatatattgtttaaaattcatttaagcagtatcttatgtctgtctgccaacaagatatagataatacatacaaatttttttttcattttttgtaaagggaaagagcagagggaataggtaggaaggcctttgaaatgggaagaaggattaccactgagacaaattaaagggaaagagggatatgataaaggcaagcctttcagacttcacaattatatataggattggctccatttcgcttcagtttccatggccatgtaggccataagagggatatttatatccctgcacatactatctcagaagcatgaccattaagccatttggttactaatatgtctaacctcattttaaggcgtatctttcttagaaatgtcattgagatatcactgaacagaaaaatttcaaaagcataatatgtggtccatctcaaaatggccaaattaatctcttttattaagaagccagtgtttatgaaaaaaaatcctgccttaggaaccaggtgagctagttttcagacctaactctatttctaaacatggaatcttgagcagtttcttcaggccagagttttctcatccctccaaataaatgagggctctggctatggtgagtttctgctttaaaaattctgtgattctattcagtgttcaaatcagtttgtaaagtggataaataattaagtgttgattgtacgaataatctattagaatctgaaatacatgactacaaaaacaaatcatgtaaatagaatgtttaaaaataaaaatctcactgaaaacctatctgaaatatacaagtcacatctgtcgatatttgcctttggacagtataaaagaaagctatttacacagagctagtaagtatgagcccattagcgctcatgctaggagacttaagagtaggggttgattttatatatatgtaagtgggtttacatgctagagtgctagactctgcagtgggtttatgttctgttgtaacttttattgatctttttcaaggtgagttctaggtaacggagactgctagaaaagtaagcatttctctcttctttgatttgtattcctcacaatttctagaatgcttcatttattcattctaaaatcattttaagtgaccaccttgtttaaggccatctatttagcatgtggagtaaatgttacagtctctgccttcaggaacctctagtctggctagggagacaaataagtatgcaccaaattaagtcagaatgtgacaaattctgaaatcacagtgtaaacaaagtgtcaccagaataaagaggaataggagagctaaaatattctcaaactttatgtgttccaatggaactcttgggttttttgccccaaaaacccttccctccacctccacttcccctactaccaagttttcctaatcccagtattccacagcaccattcacccagttgtttagagataactaggagccactcgtgattactccttttctctcgactttcctctttcccacttgcccatgctgtatttggagttcagccaatctttctccccaactgcaaaatcccattgcagtagtccctgtacctactgcagtagccctgaataaagtctttcttactgtgctttaacaagtatcattgaataatttttttttaacaatacttagaagagagcttggtatggctggggagtggtttgagtcttggtttgactggaaaaggtgagatgaatgtgtttaaggcgaactaagtttgcagaggtagattgggtcaaatcataccgcactgaggaattcacattttattccctagatcaggggtcctgacccccgacccacacgcctaggtgcacagcaggaggtgagtggtagagctgggagcattactgtatgaactccgcctcctgtcagatcagtgacatcattagattctactgtgaacggcacacgtagggatctaggttgtgagctccttatgagaatctaatgcctgatctgaggtggaatagtttcatcccaaaaccgttcacctttcctcatcccctgcccccaagtccatggaaaaattgtcttccatgaacctggtccctggtgccaaaaaagttgggtactgctgctctaggtaaaagaattatccaaggaatgaatatgaaagggattctaaaatgtatttttttctttgaatacagctggcatctatgtgagtaataggttacttgtatccagaaaagctggatacagctcctatgagatgcttattttaggaactgttcattaagctattagtctaagttcttaacaaatcagataatcctataaaaattaaaactataacatcttccctgagtaatttttagaagaaaaaaattacaattttaacattttttgtttaattttagggcatagcccatctaaatgccttaccatgtagtaaacatcttatattgtatctcaaaactgtttccatgcttttctagtgtaatgaagaaaatctatgaaacaataacagcaacttgcatttgtatgaaaatttataaagtgctttcatatatatccttatttgatcttcaacaaaactctctgaaaagtagagtaaacatgaaaatcatagggagtgaaatcattttagagcttctgggacctcaaaacttttattactcaatttctgtacagtgaaaccgagaatcagagaggctgacatgttagaattcacatagctagtggcagtcatgtctagctcagtacttcttatcctcaccataccaaactgcctattcctagacgacggtacatgtttagggagatgaagtgggctccctgctcacagccctcagggagactgtctagagccactccttcattcgttgtcctgccacattgctaagtgggccctctggctatgagtattaccttcttttttttactagctttagagttctaagatatattgcaaagtaataatataaacagtataactctttggaaaaggtgtggtttttgagactgaggtgtcaaggaggacatcctatttcctgaggattaatgaacttacatctttctttaacctttaaatataattatgtttgtcaattgttagacttttttaaggcttggtttccagtaattatggtatgtagtctccagtccaaacaacaggctctgtacagagaagttttattctatgttattttatctgaatcaagatcacactcaaccatctcaagagtccctactatagaagaggggtgtccaatcttttggcttcccagggccacattggaagaagacttgtcttgggccgcacataagatacgctaatactaacgattgctcatgagtttaaaaaaaataaaataaaaaaaacacaaaaaaactcataatatttaaagaaaatttatgaatttatgttgagccacattcaaagtcatcatgtggcccatgggttggacaagcttgctgtaaaactaagttttaaaatgtggattattcagtaataaaaatcactgttatgggtaggtaggggagagaaattagcaggaagtgttactactggcaatgtggtagttgtatcatctttgcatgtttatatttgaaggacagcatatttcatttttatggactttgtatatattttcacagcattgctctaaattaaatttaattcatattaaatcgataagtcgagtcaaacaaaagaaaatgaatcattttattaatatgactttattcatgcactcttcatattatctttattaattgtaaacttacagtgtggtgatagggatgacatgattttttaaaactatgaatagcttctgccttctccaaattttatttgtgttctccgttagaccttgtaaaactatgttaaacttgataaccaaccatttaatcgaatgttttgccatatcctattttccttcacagtgaaaatatttgatttaaacaagatcataaaattattcagtgactgtggtattggttaagagatctgtcaagctaactcttgtgcatcgacatgttgaataatatttgaagaactgtattttttttttttttttttttttagacagagtcttgctctgtcacccaggctggtgcagtggcacgatctcggctcactgcaagctctgcctcccgggttcactccattctcctgcctcagcctcccgagtagctgggactacaggtgcccgccaccatgcctggctaattttttgtgttttttagtagagacagggtttcaccatgttagccaggatggtctcgatatcctgacctcgtgatccgcccaccttggcctcccaaagtgctgggattacaggtatgagccactgcacttggccgtattttttgttttttaacacggaacctcactcttgtcacccaggctggagtgcagtggcgcggtctcagctcgctgtaacctccgcctctcagattccagtgatactcgtgcctcagcctcctgagtagctgggattgcaggcgcctgccaccatgcctagctaatttttgtatttttagtagagacggggtttcaccgtgttgaccaggctggtcttgaactcctgacctcaagtgatccgcccatctcagcctcccaaagtgctgggattacaggcatgagccactgcatctggtcgaagaactgcattttttcattcattttgtgtgtctttgaaagtatatacttacattcccttgaccagctcttaaaattgagagtcattgttccagttaaattttttactgtttttaagattttggtatattgaagttttaattttttatagagaaatgtaaaactttttagacaactgaaatgtgaaatgaatcctggatcataatttcaccagagattctgtgatattcttgtataagccattgtagaaggtagattacatctaagctggaagcatgatgattcttgtatttcaaagaaaaaacattttggcaaaaattaataattagaatgactctcaataaacacagctgatggtataagggggtttccattttaaggaaggtaaaatgagcttcaaagactttctcatctcgtcagaattggcagagctttctgttagtattacttcatgaactttaaactgttaattgaaaaagaatgtttgatttaattctggtttcagactttcaaaattccagtgtttcaggtggtacaataggtaaaaggcattaattcactattgtagattaataggtaatctacaaaattaactgatttctataggcagatgcccttaaatgtcttttatggtactaaaaagaatcaaaaatgtttttattatgcagtttttaacgacaagaatttgttttccagacagtcactttgctgaattcaacacatgtatattatggtggaaaaagcactagactcagggtcagccagccagaagaactgagccgacctgggatcccaccacttcctaactgttttgttaggtagttcactttctctcttcggataaatgtctccacatttcctacttcatagaattgtcagaatcaacacaatacatttaatactttgaaactcataaaatattgggagaataaacagtatgaggttatgggaggcttttttgatttttttttttagtttgaaattatacagtttgttttattgccaaaagagtggaagatattttaagatacaacttaataaaatttgttaagtgatgattataggaaaaggaacatgtcaaagagacaaataatggatatagtatttttagaagcatgccaaaaaaggcattaagatgaagtaatttcaagaagaaagttgtcaagcatcttaaacttgagtaatccactagaacacttaactttccaaactttagctttctacacgagtaccacccttaagccgtctttggcatgtaatgagataacattgagattttaagatgattaaaatcaaagtattctctcatctgtgtaatctggccaaaatctacagggcatgggttcggttgggggacaatcctttattccacagacattaaaatagaacaaaagcaacaacagaactccatttgctagcctctgtttctcttagaatttgaccatctctaagaacataatccccagaggtatcaaaaaatcttgagatacttcatataattccattttgcaacctgtagtttttcctctcttaagaaaatgcttttcaacaaggtgctgtgtctcatgcctgtaatcccagcacttttgggaggctgaggtgtaagatcacttgagctcaggagtttgagaccagcttgggcaacatgacgaagctctgtctacagaaaatacaaaatagttagccaggtgtagtggcatgtgcctatagtcccagctgctcaagaggctgaaatggcaggatcacttgagcctggaggtcgagacagagcaagaccctgtctcaaaaagaaaaaagaaaaaaggccaggtggggtggctcatgccttatgatccccttgggaggccgaggtgggccaatcagctgaggtcaggagttcaagaccagcctggccaacatgatgaaaccctgtctctactaaaattacaaaaattagccaggcatggtggtgggcgcctgtaatcccagctactcgggaggcttagacaggtgaatcacttgaacctgggaggcggaagttgcagtgagctgagaccacgccattgcactccagcctggatgacaagagcaaaactccgtctcaaaaaaaacaaaaaaagaaaagaaaaaacacttttctaggccaggcacggtggctcacacctgtaatcccagcactttgggaggccgaggcaggcggatcacaaggtcaggagatcgagaccatcctggctaacacggtgaaaccccgtctctactaaaaatataaaaaattagctgggcacggtggcaggtgcctgtagtcccagctacttgggaggctgaggcaggagaatggtgtgaacccgggaggcggagcttgcagtgagccgagatcatgccactgcactccagcctgggcggaagagcgagactccgtctcaaaaaagaaaaaaaaaaacaaaacacttttctatagtagataacatcaaaatggaagaaaaggtgctttttttttttttaccaaaaatgttttgttacaattgtttattgacagaagcactgatacgtggaggaatgaacttcagattaggaattaacaccaaatttctaattcagcctttatccttcagaaaccacttgatgtattcagcttctgaactgcttatagtaggccagacgatatgttttgtgctagttgttcagattaaaaattatacaccctgccttcaagagtcaacagttttttgttagaagtagacagttactcactacagtgtgatcagtgttctcccattggtaaatgctataacatcataaaaatggtaaaaatgttgtgaatatattaaagcctcagacttatgtgtctggggtaagttaagaaagaatttaaagacactgatttctgccattacaccttcctaaatcaatcaatgtttccttgttttgttttgtttttgtttttgttttgtggcaggctgttaatgctgggcatccttcactttccagggatttcacagcctgtttagcttacgtattgtacaaatgaatcttctgttacttctcctggttttcagtcaggttttcccccatacaaatatgctgattccaaattcacaggtttcatagtcagatagcttctatatctactacagccctccaataatgttttcagacagatgtttctaatcgttttccgtcttctatgaatttgttgaaatctctaatctcttcttttcaagctcaaaagtgaccttttcattgctaattccagtggtcaattctttgttcttatcttgcttaacctatcagcagcatttgacacattggatcacttctaaatacatggtttctgggataccacattctcttgttttgcctcttatctcattaggcactcttcattctcctttgctaatttttcctcttttcttccatgtcttataagatggtttcactgcaatttgaccctgttttattccctatatatgcccactcccttagtgatcccatgactttaactcatatgccagtgattttcagatatttatcttcaacccatacctcttttctgaactctagatgtacacaatccatcatggtagctagaggctggtgtaacataggaactaaatttttaattttatttcattttaattaatttacttttttgggaggtgggggggatggtgtcttgctctgtcgcccaggcaggagtgcagtggcgcgatctcggatcactgcaacctctgtcccccaggttcaagtgattctcctgcctcagcctcccaagtagctggtactacaagtacctgccaccatgcccagctaattttcttattttcagtagaggcgggatttcaccatggtgggcaggctggtgttgaactcctgacctcaggtgatccgcccacctcagcttcccaaagtgctgggattataggtgtgagctaccatgcctgtccaatttacattttaaaaaccacatctagccagcaggtaccatatgggccagtgcaagtttataaaatccacttcattatctgactcccagcaaatcagatgttacaatataaagaatagattaccatttaaaaaactgaatgcaaataacacttttaataataaaacttgcctaatgttgaagattttgtggtggcatttcatcatcatgattttgaagatgttattaataagcaattttgattagcttgaatagggactctagaagtgtcttatttttcctatttaaataaatacatgagattctggtagcacttagccggaggtcagaggcatttgtatttagatccatattctgttgcttaatgctgtgacttgagcaagttattatttcatttcagagacttgtcatttgaaaatagaggacaggaaaatgtttactacaagtgaaaggttttaaataccaaaatttgtttgtcttacagtgcaataggaataatagattgtatctttataactatattcagaactactttaatcattgaatgtttttattttaaatttatctaacttcccactaaattttagaaagggaaagcactatgttcttagaactaaacctagtaaatgtcttatgttaaaatctatatttctgtggtacatatgtattatttctaaatataactttcaggcatactgttgaaaacatttcaataagtggtttttattatataaagtagaagacttgaaaggtttcagctactttatcggaacataatttataccgtggtgaaagtagtaaatgttttgcaactcactgctttgcctctagggtaaaggaaactcagtaatcagtttactcaaaagtgagaattgaaggaagaattacaacaatgccatatggctgcaacaggtgagatgagagggttggttataaagtagctaaattattttgaccaggcataactttatttttttatagtttgacgatatgactacattaatatagtttactatcaaccataaaatgcattttataattttgtaatctcaaatcgaaatggacagttcaatttttaagataattgggcatataaaatgatgttgttataaaatatatttccaaatacttagattttaaaataggtttttctataactttttttttctgataatacacttaatacatgcctttgaagaaaatgagtattccattctggctgagcaagatgactcatacctgtaatcccaacactttgctttgggtatgaaaaatgggttcacaccatctcatattctctataccataccaatgtaatcccgtcaggtgattcacttgagcctaggagttcatgaccaacctgggccacacagtgggaccctgtctctttaaaaaaaatgtttttttaattatccaggagtggtggcacatgcctgtggtcccacctactcagaaggctgaggcagaggggaatcgattgaacccaggaggttgaggctgcagtgaaccatgattgtaccactacattccagcctgggtgacagagcaagaccctgtctcaaaaaaaaaaaaaaaaaaaaagggaggggggaaggaaggaatcaatcaatcataattttaagccatctttagttcttcactattacagtgtatatatttatatatacaaaatgttggacacatttctgataatgaaaaatattttaattcacaaaataaaaggtctttttctccaaattaatcatatatacttgttttcgcatatttcacatcagtgttcatttcagccattatattctgtgattctgtggtaagtgatccaatttttaaaaaattattattattttatatgtatatatatatatatatatatatatatatttttttttttttttttttttttttttttttttactaattttgcttaggatgggcaccgcctggaaccaagcaagcagctcttcatgtttcctcctctgggggaaaaatgaaatagcacttgtatcacaaaaataacagttttttttatttcctttgtaaatccttatgtctcagagtaactttttaaaaaattaaatctgtgacaagaaatttttagtttttaaacattttagtttgtgtctactgaaagctctggaaattcagaaggaggctatctaattaagctctcatttacccttaggtcataatctgctaaaactatactcagaatagccctaaggtttcccttagagaagtgaagtgcatacttttgcattttgtggtttagtcagtttggtctggatagtgaacagtctgtgatataatagaatttactggtaatgttttctggaaatgaatatccatcacttattgaagatgttaactaacaatggaaattaggtttaggaaccagaccttctggtaatgatagagacttagagataatgttgatttgtattttctagaattttaaatgcacatttttaagaagccttttccttgaatgaaaagtgaatgaaaatgtaaagaatcactgtgttgttcttagtcagcaacttgcctaccagtgtgagagcaaagttactgagaaatatggaaagtgacaaatgactatatgcgtgactggtcatttttttttaaacaatgtaagagatttttgtgttataaatggttaataagtaaaaagtggaacattgttcttatttcagacaatttacttttttcctcaactttctctaagaaaacattcaactgtaattcataaggaataaaagttaagaatgatttctaactggtttccatcctttttttgagaagaaccagaaataacacattttaatagaagtactctaatgaaaactgttattcagtttaaaaaataaaaacatttttaatattttcaaaagttaattgaagcatttcatcaagcattgtttatggagagcctactatgtaacagagactctgccaagcactgcgagaaatggaagatgaaagccctcagaggctttccagtctatctggggagtccagcaggcaaagaaatagttataatatgatggtggtaaattcaacagggcatgcgtataaaacactgtggcagcacagaggggagagtaagtccgattacatgtatcatccttataaagtgcacttagttttatggccttgtttagaaatttatcttgcccatgcagtatacaacagtatcatctattttggagttctctaaatgatagcttagaactcagaatctggatttcgttgctggccttttgtaaggctcatgtgtcacaagtcatataatgatcttagtatgctttcttcaaatctgcctcccaaggatcttacggcattctgagaataagtgagtttatgcttagtaggactccagtttatttcatattaatgtctatgtgggtgtgtttgtatttcatattaatgtctatatgggtgtttgtatgtatatgtgttattgtgtatacttgccactttttttaaaaggaatcaagtcttttacatctcattgctgttaaatttgtctgagaaatatagggcatgaacaggtgttttgttttggccaacttagaatcagtgaagcttgttttttgtgggagtccacttttcctttttttttcccttcttcagtagtgacattatgaggcataatgttatctcagtctttttagtctgattttgaagtgaagatttaatgaagagttgaaagtaaaacactttaaaagctaatgtaaaaggcagatataaatgcacatataacaggcaaattaatgtgcttaatgttcactgaactactgcagggaaaaaataacataataagcatatttttaaaaataacttctctttgctttggatatgaaaatctttttctaaatcatcatgcttatgttcaaagtttaaatttaaaagttttccctagaacttaaaatgtctcttttatggaaagacctggaaaaaatgggttcacaccatctcacattctcaataccataccaatgtaatggaccaaaaaatgttttccaccattaaatcccttcttgttttaactttgtactttttttttgggggggggggggttattttacttaaaaagatgtttaatttgtacacatgcaggtactgggaatgcaagagcatttatacattcagtaagtacccagtgcatacttacagtgtcccaggcacttttatacatgctctgaacgtatcagtgaacaaaactggtaaaactccacatctttgtgtagcttaccttctagtggagaatgacattaagcaaatgtagtctggttatccctcagtatctgggtagttggttttacgaccctttgtagatagcaaggtccttggatgctcaagtccccaatataaaatggacagtatttggatattgcctgtgtacatcctcctatatactttaaataatctctagattacttataatacctaatacaatgtaaatgctgtataaatagttgtcccgtattgtatagggaataatgacaagaaaaaagtctatgtgttcattacagatgcatttcttttctgaatagtttcaatccatggttggttgaatgcgtggatgcagaacccatggatgcagagggctgttaaataaaaacattataacgacaaagcagggaagggagttgcacctgaggagtagggttgggttgctgtttaaatggagtggtcaaggaaagcttcacaaagtagctgagaattaagcaaaattcagatgacgacaaagaagaagaaagagagggagggagggaggaaggaaggaaggaaggagggaggaagaggggaaggggagggagggagagggggaaggggagggagggagggagaaggggaaggagggagggagttgggggagggagggaggaaggaaggaaggaaagggaagggagcttggaaaaaaggaagctaggaaggaaggaagctaggaagctgtaagttgtttgggagaatagcatccccatccaagatcctgaaacaggaatgtacttggtatgcattttgaacagcaaagaggtcagtatagctagattggagggaacaaggaggagagtagaaaacagtaagttcagagaggtagcagcaggcccagattgtacagaaccttgtaggaatgaagtgcagaactcagccccatccctagcactgctagtattcactggaaacctatttttaaataggtaggtagatgggattgcatagtttgatatttgctgtaaaaggaatgaacaaagtgtactagagaatgcagatgatatagtaacaaattctgtgttaaagaagacaataaggcctcatagagaagacagtatgtgaactaattgtaagatgagaagaatcataaaaggtgttagggcattacagctaggaaggccagttaaaaggtgatttaataattgaggtaggagaagggggttgaagtaagagagtggagatgttaaatcattaacgtggaggtctagaatgtgagtgaagatagagaagtagaatttgagggtgccagaggcttctaatttaggtgaatgagtggatagcaatccataaatgaaaataggagatacaggaatattgagaggaagataatgaattgtattttagatatattaagtttgaaatgcctacaagatattatggcatttctgaaacacgatatctaatagcttgctcaatcatttgaacctcatttattaaatatcctactatgagtcaagccctgtgctaggaactatacagtgtattttggaatataggcttagagtgtaagtatagatgaaggagtcattggtatatgtgtggtatttgagcccatgggagttaatgagataagctggaagaggctatttagtgaaaagaaactaagaactattaggggtgactatgaggtggataacttggatgtttcttacccagaaagacagtaaggaaaaaaaggaggaaacaagaaaatacaagaagcttcttttgttgttgtatttttttaactctgcattgtaataacaaatcagtaaaaaggaaatactgaaattataaatttacctttcttatccttgttatatttatacttttgattttcagtccataatatattgttaaatctatgttaatctattgttaatctactttcaatctataacattattgttaaaataatgttaaagacagatattaaattatattttaaggattgaacacacagaattgaagtttgttggctttgccagtgtaataaatatgtggcaggctttattaggaacacatcctgctagcctcagatagaatatatagagcatgtcacaaacgatacgatttgaacagacttcaatccatattagagtttactgaggaaatttatcaaatactaaaaattgtaggcaactctttatggttttaggtagaaattagtatagttggtatttgattattggttagcacaattaaattatttgggcattagtttagaagtctattaaatctgctaactttatgtattcattttatcagtgaattttatttttgactaatatttgggaataaataatacagattattaaagactggcatagcccaagaaggtcttcccagagatgtgagttgcaaataactagtccaagatcacatatctaacaattgtcagagccagtcttctaatacatgcagaatggccccagagtcagggcatattatactaataaattatcccttgaagtatgtttttttctaattgtaaaggaacaaatactaatcatggagaattataaataactgatatctctggttgggacagtaattttcccagaaaacattatttttcaataaacatagtaaatttattgaatagagcagtcaacatgtagaatataaatatataatatttattcattcatgcattaattttttagctttctcttatgtttaggaaggtgatctgataaatccagagttgagaaggagtgctctatttg

SEQ ID NO: 695 - DNA, 3254 bp, Homo sapiens
ctgagagtgaagcaaaagtaaaaaccaaagttcgctttgaagaattgcttaagacccacagtgatctaatgcgtgaaaagaaaaaactgaagaaaaaacttgtcaggtctgaagaaaacatctcacccgacactattagaagcaatcttccccatattaaagaaactacaagtgatgatgtaagtgctgctaacactaacaacctgaagaagagcacgagagtcactaaaaacaaattgaggaacacacagttagcaactgaaaatcctaatggtgatgctagtgtagaggaagacaaacaaggaaagccaaataaaaaggtgataaagacggtgccccagttgactacacaagacctgaaaccggaaactcctgagaataaggttgattctacacaccagaaaacacatacaaagccacagccaggcgttgatcatcagaaaagtgagaaggcaaatgagggaagagaagagactgatttagaagaggatgaagaattgatgcaagcatatcagtgccatgtaactgaagaaatggcaaaggagattaagaggaaaataagaaagaaactgaaagaacagttgacttactttccctcagatactttattccatgatgacaaactaagcagtgaaaaaaggaaaaagaaaaaggaagttccagtcttctctaaagctgaaacaagtacattgaccatctctggtgacacagttgaaggtgaacaaaagaaagaatcttcagttagatcagtttcttcagattctcatcaagatgatgaaataagctcaatggaacaaagcacagaagacagcatgcaagatgatacaaaacctaaaccaaaaaaaacaaaaaagaagactaaagcagttgcagataataatgaagatgttgatggtgatggtgttcatgaaataacaagccgagatagcccggtttatcccaaatgtttgcttgatgatgaccttgtcttgggagtttacattcaccgaactgatagacttaagtcagattttatgatttctcacccaatggtaaaaattcatgtggttgatgagcatactggtcaatatgtcaagaaagatgatagtggacggcctgtttcatcttactatgaaaaagagaatgtggattatattcttcctattatgacccagccatatgattttaaacagttaaaatcaagacttccagagtgggaagaacaaattgtatttaatgaaaattttccctatttgcttcgaggctctgatgagagtcctaaagtcatcctgttctttgagattcttgatttcttaagcgtggatgaaattaagaataattctgaggttcaaaaccaagaatgtggctttcggaaaattgcctgggcatttcttaagcttctgggagccaatggaaatgcaaacatcaactcaaaacttcgcttgcagctatattacccacctactaagcctcgatccccattaagtgttgttgaggcatttgaatggtggtcaaaatgtccaagaaatcattacccatcaacactgtacgtaactgtaagaggactgaaagttccagactgtataaagccatcttaccgctctatgatggctcttcaggaggaaaaaggtaaaccagtgcattgtgaacgtcaccatgagtcaagctcagtagacacagaacctggattagaagagtcaaaggaagtaataaagtggaaacgactccctgggcaggcttgccgtatcccaaacaaacacctcttctcactaaatgcaggagaacgaggatgtttttgtcttgatttctcccacaatggaagaatattagcagcagcttgtgccagccgggatggatatccaattattttatatgaaattccttctggacgtttcatgagagaattgtgtggccacctcaatatcatttatgatctttcctggtcaaaagatgatcactacatccttacttcatcatctgatggcactgccaggatatggaaaaatgaaataaacaatacaaatactttcagagttttacctcatccttcttttgtttacacggctaaattccatccagctgtaagagagctagtagttacaggatgctatgattccatgatacggatatggaaagttgagatgagagaagattctgccatattggtccgacagtttgatgttcacaaaagttttatcaactcactttgttttgatactgaaggtcatcatatgtattcaggagattgtacaggggtgattgttgtttggaatacctatgtcaagattaatgatttggaacattcagtgcaccactggactataaataaggaaattaaagaaactgagtttaagggaattccaataagttatttggagattcatcccaatggaaaacgtttgttaatccataccaaagacagtactttgagaattatggatctccggatattagtagcaaggaagtttgtaggagcagcaaattatcgggagaagattcatagtactttgactccatgtgggacttttctgtttgctggaagtgaggatggtatagtgtatgtttggaacccagaaacaggagaacaagtagccatgtattctgacttgccattcaagtcacccattcgagacatttcttatcatccatttgaaaatatggttgcattctgtgcatttgggcaaaatgagccaattcttctgtatatttacgatttccatgttgcccagcaggaggctgaaatgttcaaacgctacaatggaacatttccattacctggaatacaccaaagtcaagatgccctatgtacctgtccaaaactaccccatcaaggctcttttcagattgatgaatttgtccacactgaaagttcttcaacgaagatgcagctagtaaaacagaggcttgaaactgtcacagaggtgatacgttcctgtgctgcaaaagtcaacaaaaatctctcatttacttcaccaccagcagtttcctcacaacagtctaagttaaagcagtcaaacatgctgaccgctcaagagattctacatcagtttggtttcactcagaccgacagtcactttgctgaattcaacacatgtatattatggtggaaaaagcactagactcagggtcagccagccagaagaactgagccgacctgggatcccaccacttcctaactgttttgttaggtagttcactttctctcttcggataaatgtctccacatttcctacttcatagaattgtcagaatcaacacaatacatttaatacttt

SEQ ID NO: 696 - protein, 1009 aa, Homo sapiens
MREKKKLKKKLVRSEENISPDTIRSNLPHIKETTSDDVSAANTNNLKKSTRVTKNKLRNTQLATENPNGDASVEEDKQGKPNKKVIKTVPQLTTQDLKPETPENKVDSTHQKTHTKPQPGVDHQKSEKANEGREETDLEEDEELMQAYQCHVTEEMAKEIKRKIRKKLKEQLTYFPSDTLFHDDKLSSEKRKKKKEVPVFSKAETSTLTISGDTVEGEQKKESSVRSVSSDSHQDDEISSMEQSTEDSMQDDTKPKPKKTKKKTKAVADNNEDVDGDGVHEITSRDSPVYPKCLLDDDLVLGVYIHRTDRLKSDFMISHPMVKIHVVDEHTGQYVKKDDSGRPVSSYYEKENVDYILPIMTQPYDFKQLKSRLPEWEEQIVFNENFPYLLRGSDESPKVILFFEILDFLSVDEIKNNSEVQNQECGFRKIAWAFLKLLGANGNANINSKLRLQLYYPPTKPRSPLSVVEAFEWWSKCPRNHYPSTLYVTVRGLKVPDCIKPSYRSMMALQEEKGKPVHCERHHESSSVDTEPGLEESKEVIKWKRLPGQACRIPNKHLFSLNAGERGCFCLDFSHNGRILAAACASRDGYPIILYEIPSGRFMRELCGHLNIIYDLSWSKDDHYILTSSSDGTARIWKNEINNTNTFRVLPHPSFVYTAKFHPAVRELVVTGCYDSMIRIWKVEMREDSAILVRQFDVHKSFINSLCFDTEGHHMYSGDCTGVIVVWNTYVKINDLEHSVHHWTINKEIKETEFKGIPISYLEIHPNGKRLLIHTKDSTLRIMDLRILVARKFVGAANYREKIHSTLTPCGTFLFAGSEDGIVYVWNPETGEQVAMYSDLPFKSPIRDISYHPFENMVAFCAFGQNEPILLYIYDFHVAQQEAEMFKRYNGTFPLPGIHQSQDALCTCPKLPHQGSFQIDEFVHTESSSTKMQLVKQRLETVTEVIRSCAAKVNKNLSFTSPPAVSSQQSKLKQSNMLTAQEILHQFGFTQTDSHFAEFNTCILWWKKH

SEQ ID NO: 697 - DNA, 34261 bp, Mus musculus
  misc_feature (1)...(34261): n = A,T,C or G
agagagagagagagagagagagagagaaagcgcacacacacacacgaatttttaaagtgtaattttacagctctacatggaacatgcatatactacccctttctcctgaggtccagggatcgctgtggaaggagcgtaagcaccatcagcagggctgctgcacgtgtgaactcacagtagtcgtgaccagaggcagatggagcagtgcacaccagatactgcagctcagtgagactgaggcagaggagtgtgccgtccagggatacataggaaagccgtggctcagtcacccacaggaaagaaaggagagaactcacagctatgactacaaaatagagtaaatcccagcatggagagcagaactgagcacaaagttcaacacccagccaaggagctactgttagttactgggggaggaacgggctgagaggagtgtccgatgtgccacccacactccagtggaagatcannnnnnnnnnnnnnnnnnnnacagtgtgacagtgggccacaggtgctgagctgagggctctcacccactcttcaagccactctgtgacataaggaccagagctctctacagggctcagggggcatcctgttagggatggcagctagactacaggcagatctgcctgtaaacaatgctacttgtgtggaaaactccatgtagaaataaagccaatgacacaccgagatcagagccaggggcttcccatgatgacacgtatctttaattccagcatttgggaggtagaggcaagcagatctctgtgagtatgagactagttagtgctacatagtgagactcctcccaccctttctgcagtgtgtgtgtgtgcgtgcgtgcgtgcgtgcatgtgtgcgtgcgtgtgtgtgcatgtgtgtgcgtgtgtgtgtgcatgtgtgtgtgcgtgcgtgtgtgtgtgcgtgcgtgtgtgtgcatgtgtgtgcgtgtgtgtgtgcatgtgtgtgtgcgtgcgtgtgtgtgtgcgtgcgtgcgtgtgcacgtgtgcacgtgtgcgtgtgcgtgtgcgtgtgtagtcagatgtaatgtcacatgtctgtgggaggcagatgtagcagtgcaaagtgtgtgtgtgtgtgtgtagtcagatgtaatgtcacatgtctgtgggaggcagatgtagcagtgcaaagtgtgtgtgtgtgtgtgtgtgtgtgtgtgtgtgtgtgtgtagtcagatgtaatgtcacatgtctgtgggaggcagatgtagcagtgcacaccagatagtgcagtgctggtgagcctcaggcagaaggattgcggctttacagccgcaataaataggaaagctctggttcaaacacccacaagaaagagaggcgtgggaaggatggggtatgcacatgcctcattagtctatgtgacatctgaaggcaggagatcagaagctcagggttacccttggctacataatgagttcaagaccagtctgagctacaggagaccttacatccaaaacactagaaaaggccgggaggcatgaatcaccggttaagagtgtttattgatctattaggtatagtgagaatttttatttctttaagcacagaaatgttatagggatatgtttttgctttaaccccaggtgtgggatatggggctgcttcaatttgtctacaacagctaattatgatttgcctcgtgctctggcaggggccagctccaactagtttctgtgattgtgtgatgtttggaattctggggactcgtgagagggtctaaaaatgtcagtgcactgagaaaggctgttgtggctgctgctcccctggctgctgctgctcccctggatggtgctgctgctcccctggctgctgctgctcccttggctgctgctgctgcttccctggctgctgctgctgctcccctggctgctgctactgctcccctggatggtgctgctcccctgaatggtgctactgctcccctggctgctgctgctgctcccctggatggtgctgctgctcccctggatggtgctactgctcccctggctgctgctgctcccctggctgctgctgctgctcccctggctgctgctgctcccctggctgctgctgctgctcccctggctgctgctgctgctcccttggctgctgctactgctcccctggatggtgctgctcccctggatggtgctgctgctcccctgactgctgctgctcccctggctgctgctgctgctcccctggatggtgctgctccccctggctgctgctgctgctcccctggctgctgctgctgctcccctggatggtgctgctccccctggctgctgctgctcccctggctgctgctgctgctcccctggctgctgctgctgctcccctggctgctgctactgctcccctggatggtgctgctgctcccctggatggtgctgctgctcccctggatggtgctgctcccctggatggtgctgctcccctggatggtgctgctgctcccctggctgctgctactgctcccctggatggtgctgctcccctggatggtgctgctgctcccctggatggtgctgctcccctggatggtgctgctgctcccctggctgctgtggttcccctggctgctgctgctgctcccctggctgctgtggttcccctggctgctgctgctgctcccctggctgctgctgctcccctagctgctgctgctcccctggctgctgctgtccctgctcttactggttgatgattggagatatcctaacaatgaatatcaaacctgcccaaggaactggaagcctctaaccagcaggaagtcgtctaatgatatcggcactctctttcccctaaccttcttcctcttctacctagcggaggagctggatgggataagggtggagtagggcagtaggaaaagggaacccacaaaatgtagccaaaagtcaagttgcaatctaggaaccatagttccaatcccaataccttcattgagcagatcacaaatgtctgtgactctggctccaaggaattcagcgcccccttctggcctctgtgggcatggcgagagagagagagagagagagagagagagagagagagagagagagagagagagagagagagagagagagaaagcgcacacacacacacgaatttttaaagtgtaattttacagctctacatggaacatgcatatactacccctttctcctgaggtccagggatcgctgtggaaggagcgtaagcaccatcagcagggctgctgcacgtgtgaactcacagtagtcgtgaccagaggcagatggagcagtgcacaccagatactgcagctcagtgagactgaggcagaggagtgtgccgtccagggatacataggaaagccgtggctcagtcacccacaggaaagaaaggagagaactcacagctatgactacaaaatagagtaaatcccagcatggagagcagaactgagcacaaagtccaacacccagccaaggagctactgttagttactgggggaggaacgggctgagaggagtgtccgatgtgccacccacactccagtggaagatcacacatccaagaggatggggtgggggggggagaaattcacaaaattgagtgggaagtgggggtggaactggaaagagggaggggataaatacaatcaaaatatgttacataaaatctcagctgggcatggtggtgcatgctcttaaccccagcactggggaggcagaggcaggtggatctctgtgaatttgaggccagcttggtctacagagtgagttccaggacagccagggagggctatgtagagagagaccttctctcaaaaaaggggggagggggagtttcgaaatgcaccaacagagagccggtgagctccctggagccaagcccaaggacctgagtctgatccacaggactcatatgggagaaggagagatccatgttctgacctctcgggacagctgcccgctgactgccacacacttgctgtggaatgtgtgcgtgcccgtgcacacccccaaatcaaccagccagtaatgtatgttgggcttttttgtttgtttgtttggttggttggtttgttggttggttggttggtttttgtcctggctgtcctggaacttgttttgtagaccaggctgtcctcaaactcagaaattcacctgcctctgcatgggccaccactgcccgacctcagtgtatgtttaaaacaaagaacagtacagattttttttttcttttggaaaactaagggggaaaggaggacagtaaaggaagaagaggaagggaaagaagggacgaggctggacgctgcgacgtaagaataacaaatgcatgtgcccagagactaagaggaagagacaggagtccaaagagaaagggaagcttggacggacgctgggatggctgaaatcttgagcgctctctcccatggcccgaaagtgcctccatggcagggttgtctgttttgtttgttgcaatatctcctgctcttagaacgatatcaggcattcagtagatgcaccatacatgtcgacaagaaacttttgttacaaagccacagagtgcctgcagtttccaaaatgaccaccaggtgggagtcttccaaaccttgacgcctccgtgagccaagccccagagctggcttcacggtgcctttgctgcctgccaccagcctaggcctttcaggatgtcttccgtggagctcacggcttgccaggcccagcacatgccctgggcaacaactgacctttccgcctaagacaccctcttccctacttccctccaacaccagccagttaaacaaccctttgtccttggccccttccggctgggccccgaggctcctgggtttcttccaggcccggagatggggctgggacaaaggtgcggcatatgagaaaccgccaaagatatgtcctggggactttgaatcagctcttccactcttcctggatataactgtgggatctaaccccattctcaccttgaacccagcccccccagccccagggctccaggagccagccctccctcaggtccacaggtccaggtgccagcctcctccctcagacccaggggtccaggccccagtcctcctccttcagacccaggggtccaggccccagtcctcctccttcagacccaggggtacagaccttcccatcttagaccaaggggtccagaccccaatcctcttcccttagacccagagctctaagcaccagcctcctccctcagacccggggcccaaggcaccaatcctcctccttcagacccagaagtgcaggcccagacctccagtcttagagccaggggtctaagtgccagtctcctccctcagacccaaggtccagaccccagccctcctccctcaggctagctctgcaccctgcttttactctgcagtcctcttactccaaagaccccggtctccctcctgcccccttcagtgtttcagtattgaactcaaggctgactcacaggaagttttggggcctgagtcactcccacctctcagttcagcccctcccagagctggaaagagccagaaaatgggactatttcaactgtccgtagctccagtatagattttccatgatcattactcagcggtgccagttggggtatctcccacattcaaacttcccagatatctatttttttttccagtatatttggagacaacatttttgtctaacgtccatgtatggatttcagatttttttcttcacttctgtgtgttttctctatctccttaattttgtactgttttaggtgttttgtgtgctacagataggatccagggccttaggctagtgctctaccactgagccacacccccagctcctcactgggggtttctaagcaaaggctctaccactgagctacacctacagctcctcattgggggattctagtcaggggctctacctctgagccacgccccagtattgcctttattccctcatctttcttgtctttttgtttctctcctccatctctgtggtcatcgtcttctgttgtctctgctctctccagcctagttctcgctgactctgagctcccgttctttctctgtccttctgtcccgatctcaccctgcttcttccctagctctctctctgtcttctgatccccattccttcctcggtctgcatcactggcgtagttgtggacggcaggttacttccatttctatcttagcagcacagaggagctgagaacgatgtacagggacgagagccacacgtgagtccaaagccacgaacagctcaagccactcaactgcacagcttctgggccccagttcagggacttctgagaaatgtacacacagacaaatatcaagggagggaggggccgagggaggaaaagaaagagggagagggggagcgaggggctgagaaatcagagggtccaggagtcaggtgtggtatcaaacatctgtaatttcagaaaactggaggctgagtcatggtaatgatgaggttgagtccaatcaaggatgtggagttacttcctgtctcaaaaaacacaaacaatatacaaaaaaagaaactaaatcacaacacaggttttggagacagaggtgaacaaaaggctggggatgtggctcagtggtagagcccctgcctagaatcccccaggggaggggctgggggcgtggctcagtggatagagcccctgctagaatcccccaatgaggttccccagtgtggtccagtggtgagcacatctctagcacacagactacccgcgttccaatctagcagtgaaacaaaaaaaaaaaaaaaaaaaaaaaacataaagacatagagtgagggagataataatacagagttgtgtgcaaagcccagagatgttcccggggaggaggaagcagagatggctgcaggttccaggcagcaagcaggcagggattcctgggtggcagcatgaggagtccccagctgcagccttttctccaagtagacacacgtgtggtgtccgggtgtgactgggtgtgactccatccttctccagccatgtgtcactgagtgggatcagcatgtgtgccatggggtggggcacccccacggggtgtgtttctgtcactgggcgtgtgtgtgtgtgtgtgtgtgtgtgtgtgtgtgtgtgtgtgtgttccgggcgtgtctgtgtgggtagcattggtgccaggcatgtctgtccacgggtatctcatttctctgtagctggcgggtgcatagtcctcgatgccacaggacacagagtgggaaggagttgtaactgagcgtttctctgagcttggggaccgtgaggtgaaaccctatgttacaagatccctttgtgacctgtcttggtgtccccattgtgtcgtgtgtgttggcatgcttgggagcatttaaggacctggcacatggtgtgtagacccatgtgtctgctttctttgttgtgtgtccctatttgaatctctgtctcacacaacatcctattcccagagtcacgttcaccgtgtgcctttgttttatctcttgtggtgtgtgtgtgtgtgtgtgtgtgtgtgtgtgtgtgtgtgtgtgtgtgtaagagagagagagagtatgtgtgtgtatgtgtgtgtgagtgtgtgtgttagtatgtgtgtatgtgtgtgtgagtatgtgtgtgtatgagtatgtgtgtgtgtatgtgtgtatgtgtgtgagtgtgtgtgtgagtgtgtgtgtgagtgtgtatgtgtgtgagtgtgtgtgtgctgtgtgtgagtgtgagttcatgtgtgtgagtatgtgtgtgtgtgtgtgtgagtgtgtgtgtgtgtgctgtgttggagtagggtgcacagagtgtgcttgtctgtggagatcagaggctgatataagaatagcttcctcaattgctctgcaccttgtgtgtttatgcactgtgtgcatgtgccatggtacacacaagaaagtcagaggacaacctgcaggggtctgttctctccttccaccatacaggctctgggatttgaactcagttagtgcccttaaaccccatgagtcttgtcactagtcctgcacctcattttttggaaacttcgtctttcacaccaacaggaactcactgattcgattagaatggctccacccatctgactacatcatctccccactcagggctggggttgcaggtatgtgcctgtgcacctacggttttttttttttaactacttgttttattttagtcttatttgtgcttgagcatgcattcgtggcgtgtgtgtgtgtgtgtgtgtgtgtgtgtgtgtgtgtgtgtgtaaatgtgcatgtaacacccagtctgactcagtgaaatagctctgttacttatatcaggatatatgcccacgctgagggcctttctcttccctgagtgtggtgtttgtgtggccatgcacatgggagtataacgggtatgtgtattgtgcgtgatgttggattgatggtgtgctaatctggacgttggtgttcttgtgggtccgaatccaaccccatcccctccaaagggttcatatcatcctggactgtgtcctgtgtggctagaatgtcctagaatgtccaacgctgggtaggcgttgcttgcacacttccattgactgttctctgtgctaaggtatgcagagtgtcaagtgcaccagtgtatgtcaggatcaatgtcaggtgtgtgtgtgtgtgtgtgtgtgtgtgagtcccacacacaatgatgtgagctagtgtgcatttcctgttttctgggcgctggatgacagtgtctgccaccacaggtgtttacacatatggggcatctctctgtgtttcacattcacacccccttgtgtgtctgttgacgcatgtgtgttgtgcctggtgattcttacaaattggtgtgctcagacctgctgtgtatttgtgtggctcctggtacatgtcccgtgtggtcgttgatgcttagctctttgtatcgtagaatattatagtgttttacttggttttggttttggaaacagggtctcatgtggcccaggcagaccttgaactcatagttgacaatgattgagacctgctgatcctcctggccccagtttcctagtaccaagagtcaggcatgcaccattgcccactttatgccatgctgggatctacctcagagagtctgtgattcaaaggagcccactaacagctgcactccatccctggtcccacttaaaaattatcatttaagatttatttttttttatgcgcatgcatgtatgtgaatatcagccacatgtgtcaggggctcccaaaaaccaggaaaagggcgtcatctcctggagttgaagttacaggtggtttcaagccacccacccagcaagtaggtgctagaaacggaagttatactcctctggagaggagcgctcactttcactcgctgtgcctgactttccagcccctcccccgccccactttgaatgtgtgactgcgtgagctcaacctttgggtggccccgtgtgcaatgggacgctgctgccctgctaagtgctggcgtgtgtcacaccatgtgtgtgtgtggtgtctgggtgtggctgtgggtttctgaactttcaggagtgtgagtcacttctgtggaggttgtgtggtgtgtgctggtgtgttgggctccgtctccggtctgtcatagggtgctctgtggtgtctgggtgtggtgggggttttaggtgtgtaccacagagtgcaaacggttggagagtcacaacctattgtgtcagtgtgtctttgcccacgtggatggactcttcttccttgcccggggccacaagacacaccccagcccctccttagtcttagaagggaatgggatagccagcctccccctacccagggacctccccgtccctccccgccctgccctgcctgctgcagttaccactccccagagggcacagggctaggctgtgccttccagcaaaagtcccagagtgagcagaacaggccgctggcctggaagccaagctggctgccatttgcgtactgagaggtgggggaccctgggcaggaagctggctgagccccaagacctcaggggccatgggcggggagctggtgactggcctgggggccctgagacggagaaagcgcctgctggagcaggagaagagggtggccggctgggcgttggtgctggcgggaactggcatcggactcatggttctgcacgctgagatgttgtggttcctgggctgcaaggtgagtggggccttccaccgagcagggaagggacggggagcctggtgtgagggaggagggctggggtctgcacccctgggtctgagggaggagggctggggtctgcacccctgggtctgagggaagagagctggggtctgcacccctgggtgtgagggaggagggctggggtctgcacccctgggtctgagggaagagggctggggtctgcacccctgggtctgagggaagagagctggggtctgctcccctgggtctgagggaggagggctggggtctgcacccctgggtgtgagggaggagggctggggtctggacccctgggtctgagggaggagggctggagtctgcacccctgagtgtgagggaaggggactggggtcttacacccctgagtgttagagagcaaagctaggagatcttatactcctgggcatgagggaggaaggctggcatcttccaccccggggtgtgaagaagagaggagagctggggtgtgagggagaaaggttggggtctgcacccctgggtgtgggagaagagagctggtctggactcctgggtctaagggaggagaactgaggtcttacacttcttaaggtctaagagaagaaggctgggtctggacccctggatgtgatggaggtagatggggggtctgtacccctgaaacctgagctagtgtgatatcgtcctccccccagctccccccaacctacacacacacacacacacacacacacacacacacacacacgcacacacacgtacgcacacatgggagacagttctcagtgttagcctttgggtaagtgttatcagacagaccactgggggtctgggccttgttgaggcccatacaaggctgatccttgatagcctagctctggtgaagggagggctggcaagggagaaagacgttgtcattaggcgtctccttgctccttatctagccactgccatttacccagtgccaccaggcagtgctctgaagtaactgacagaggagactgtggggagtggagccttcaccccacccttaccatacagaagtgccattacccccagaaggcaccactcaccagatagtggtctactgtggtttgaaatccttcatccctgtggaagaggagacttggggttcaggctcaagagtctgcaggaagagcctcaaaaaatctcaccaggcaatggatccaagcactagagaagtcaggggagggaggctggggggggggcggcaggcaagagaatcagaaggttaagcccagcctaagctacatactgagttggaggctagcctgggctacacagaccttatctcaaaaactgaaataaatccaaacaaggtgggggacggagagaacacacacaagagagctatcaatcgacctctggaagaccagggagtacaggcaggtcttaacaagccctggggatattcccaccctggtcagacttgtggcagaagagagatggagggcaaggttgggtgtgtggtttgagggggcagcacacttgcttgttcaacagaaaagttgggacaggagatgtgtgtgtgtgtgtgtgtgtgtgtgtgtgtgtgtgtggtgtgtgtgtgtgtgtgtgtgtgtgtgtgtgtgtgtgtgtgtgtttgcgtgcccgcaggtgggacattctttgggagaacttctcggccccggtgctcagccgctgtggagtaacagactggcaggcacatggagggtcagggcaggccagcttccttcagccaagtggccaaggagagggcagctactgcgagggggtggggccgtccagagccatgccaacaggaaacatggctggggcctgcccggcgctcccacgctcctgcaccacgcccagtaggagaggtgtggacctgggagcccaggcagaagggaaggagccagggggtctttctcatccttcatttctccttcttcactacctgcccaggccctttcctctgactgtgattcttgaaggaatggatgaggctctctgagcctcagtttcccgatctgttcaaacgtagccattagcacccttgcagctcttgtttgagacaagctctctggtagcccaggctggccttgaactggctaggtagctgagggtgacctgcctccacttccccatgtatcacaacactcagtttacaaaaggacaaggctcaaacccaaggctctgctaggcaagcactcttccaagtgagccacatccccaccctaagcccccgtccaatggctgccttggagacctccatgccccctccttccccaactccatctcaatctaacaaacttgtttttcaccaaaggaaggcacctgctcctcaggaggaagggcgggtgccaaggctataggaaggaagagacggctttggatgaggtgaagcagagaagatggggcggacagagacttgggggaagggaaagtcagtctacagagggaggggggagggagggagagagagagagagagagagagagagagagagagagagagagagagagagagagagagagcatatgacagaaacgcgcctccagagccactgagaaaccctagctggagagatgcacacagagagagagaaaggccgtgcatgcatggactgcccccacacaccccaacacacaacacacacacacacacacacacacacacacacacacaccagagctgggcagtagctcaattggtagagtacttgcttagcatgtgcaaagcccctgggtttgatctcccagcactgggctctgatgatgcatgcctgtgatcctagcacttgggaggcctagaagcagactcgcagagagaaggaagtaagagaccccagtctgggtggtagaataggaaaaggggacccacacacacacacctcgccatgggagacgtgaactgcattgtgggaaagtggctggtatctgagcaataggggctgagacaaactgaaaaactgaacggggaactgggtaagggtgaaggatgacgggggaggggaaggctgaggacagcagagccattgttcagacagaggtggggggaggccccccagggggcaggaaactggcctttttcccctgctcagaggcggggtgctggcgcgggcccagccagggaagctggcagagggccgcggaggaacaggtgcacggttcaaagagggaacccagacaagccctgccctgggacagcatctccccgtgggcatcggcccatcttaaggaactcagcagttctcactaacccccccccaaactctcttaatccttcctccctaaattctagatgatccctccaaggcattgccacacaaagagaggaagaaaaaaaaaaaaaaaaaaaaaaaaacttctggtgctttatgtaggccctgaacttcctcccgggtgccccgggcatccagccaggggaagtggtaggagaggggaagaaggggctcacaaagcagggcctggggctgggggtgtcttgaggttcgttcctccgattagagaagggcagaatgctgctctgagacctgagtgacagtctctcgtctttgctggaactggggttcggggaggctctgcttgctggagatggaaggggcaccctctggaagctgtatgtccttttctagacttcacgcatacacaaatgagaactacttttcatagggaaagaatgtgagtttcaaggctccccatggtaggagagtggagggtagtgaggaactgagacacggcttagacgatgtcctcctgtctcagcctactgaggactgggatcatacgggtgacctacacactaaacttgagaatggttctgagatgtgtcaggagggcctggttcgggagccaggttgttgggaatgtagagaccgcctttctaaaggaaaggaatgggggtgggcagactggaagcaccggcagctcactgtcttctgttcccccacagtgggtgctgtacctgctcctggttaagtgtttgatcaccctgtccactgccttcctcctttgtcttattgtggtcttccatgccaaggaggtccaggtaagctgggccccgcccctcagctttgctctctatgtatccttgttctccttccctgagatacctgagtctacacctctgcccgctgggatagaatgagccacagacagacaggcagattctgctgccgtagctgatccatcccccaatgtagcccccaagggcttccttgcccacttagagatggaggctatgcctaccctcccagctcccaggtccagagaccacttacgtttttaaaattaattttggtcctgaggattgaagtcaggaccttacaccaagccacgcccccagcccctcattgggggattctaggcaggggctctaccactgaaccacacctccagcccctcactgggggattctaggcaggggctctaccactgaaccacacccccagcccctcactgggggattctaggcaggggctctaccactgaaccacacccccagcctctcactgggggattctaggcaggggctctaccactgaaccacacccccagcccctcactgggggattctaggcaggggctctaccactgagccacatccccagcccctcactggaggattctaggcaggggctctaccactgagccacacccccagcccctcactggaggattctaggcaggggctctaccactgagccacgcccccagcccctcactggaggattctaggcaggggctctaccactgagccacgcccccagcccctcactgggggattctaggcaggggctctaccactgagccatgcccccagcccctcactgggggattctaggcaggggctctaccactgagttacatgcctagtttctttacaactgttattaatgacaataagagtgtgtacttaaattttttaacatttatttatttttatgggggggggaacacttggaagtcagaaaacaaattatgcaagccagttttccccttctaccatgtggggttcttaggaatcaaaatcacatcatagggtttggaggtaaaggccttggctcactgagccatcctacaggcccgaagcatgtgtattttaactgagtgcctctcaggtgccaaacacctcctagggtgttactgtacatggctgagaatcactgtcttgtatgggagtcgggagaagtgaaaatgggaacggcattgtgtctctgtgagaccagagttcaaagatggctaagaagagttgttgagtctggaggaggaaaataaacctcccattaggggtcggcactattgtgggatgttaagtgttaggtgacttgtgatttcaataggtagggaaatagtaattatagagtagagatctggaggtgtagcgcagaggtagagcccctgcctagaatcccccagtgaggggttgggggcccggctcagtggtagagcccctgcctagaatcccccagtgatttgctgggggcgtggctcagtggtagagcccctgcctagaatcccccagtgaggggctgggggtgtggctcagtggtagagcccctgcctagaatcccccagtgagaggctgggggtatggctcagtggtagagcccctgcctagaatcccccagtgaggggctgggggcgtggctcagtggtagagcccctgcctagaatcccccagtgaggggctgggggcgtggctcagtggtagagtgttttctttgcatactaaagagtggtttttaccttcacattgaaacaaacaaacctcacagagagcagttcatgctccgggccctgttcagttgtgagacccaggcctcaatttccagatttgtaagttgggagcgcttgtacatgaatctctgtgtatgagcatttattgagtcacatgtacaggggacagagcagtccccaaggcgtccaaatgctgcttagatggagctagatgtggcggcacctacctgtagtttcagcacttgggagtctaaggcaggtagatcgctcatttgagcccagcctaggttataaattacctggcgccacagtgtgcgcgtggaagtcagttctcctacaacgtggatgctagggatggtactcagggagtcagacttggtggcaaatgcctttattcactaagccatcccataggccctgacgattatttttgccagccgtagtatcccagggccataagtgggcagagccctcagggatgggcacacaaacactagaaggtcgatggttctgtctcagtagctacaaatcatagcttatagaacttgtcagtgcacacaagaggcactcagttcgtgtaggaggagtattccttccggaagtgggccagaactagccattagagttggagaaagtggagaaggtggagagaagacttgccggttcccgcctgcttccttccccagccccacgccccgtacagctatctctgtcctactttccaggcccagggcgtcctccgcatcttatctcggggcgcaggccgggtgtgccactgcctgccccgcacctgacctctctctgtgtctgcctcctccctgcagctgttcatgactgacaacgggctccgggactggcgcgtggcgctgacccggcggcaggtggcgcagatcctgctggagctgttggtgtgcggggtgcacccggtgcccctacggagcccgcactgcgccctggcgggggaggccaccgacgcgcagccctggccgggtttcctgggcgaaggcgaggcgttgctgtccctggccatgctcctgcgtctctacctggtgccccgcgcggtgctgctgcgcagcggggtcctgctcaacgcgtcctaccgcagcatcggggcgctcaaccaagtccgcttccgccactggttcgtggccaagctgtacatgaacacgcacccgggtcgcctgctgctgggcctcacgctgggtctctggctcaccacagcttgggtgctgtctgtggctgagaggtgaggggcctggaacacagggaggagacaccagaggctactggatatgatggggcaggctgcaaggctgggggccagccaacatcagggcaggctcacactttccatccttcttggctgagaaatctcaagtccttgaagtgattcccaacttctgagccacccagaacacacacacagagggaagagagagagagagagagagagagagagagagagagagagagagagagagagagagagagagagagagaacgcgcacgcaagcgagcccaggcaaatccacccttccggcccatagtaagtccagattcagactctggtaatagggctaatcctaataactaccttgttgaaaggaacagcttttccaaattagcgggtacagtaagtgcttgctgagtctggaaagcagacatttggaacatttttgctgggggaattccctgctggacctagctggtgcttagcaactgtaaacagatgggggcggggtggggggtggtagctactcgattcttacagatcctcagggtcccactaacagagaaatccagtctgtggcctgagagctggcaacagggccttggggcaacaaagccaaacctctggagctcaggctgcctccaacaccccagtacctcagcctcctgaatgcttgggttaccgatgagtgtcactgttcccggctctctacaagcttttttttttttttttttttttttttttaagagatgttaatcatttttatcttgatctcacttgaaggccatgtagtctctttgtgggtgttagatacaggtgtagcttcctctggatggttcctgcttcaggctgggtctcagccccatcttagccctcatccgcatcttagccctcatccgcacactcttgagtctagcagccctggttgcctcgctgagctcaaacaggctctagcgcaacggttctcatcctccataatgctgcgatctttttagtacagtcccttatgctgtggtgacccctcccaaccagaaatgtatatttcttcctacttcgtaactgtaattttgctactgttgtgaattgtgacataaatacctgatgtgcaaggtatctgatatgtagcccctgtgaacgggttatttgaacgccaaggggtcacgccccacaggttgagaaccactcctccaggcttgaccagacctaaacttgtacttttataacccagaatggttaagcatctgaaagaggccaccagaatttctggctttctatccagatgtttcttggtgttaagagtgtggctggaagaggaacagtatgggggggtgaaccccaccaacacccccaggctggggtttcagaactaagttctctttgcccataggcaggctgtcaatgccacggggcacctcacagacacactgtggctgattccgatcacattcctgaccattggctatggggacgtggtacctggcaccatgtggggcaagattgtctgcctgtgcaccggagtcatggtgagtactgcccccaagactctctcccggcccactgctgatactcatggctcaggaaaccatgggccaacctaggccctccctgacatccctgacaattgtgggtatctgggcactgccccactccccagcctcattctttactcaagacccagatctgccgggcacttgggaggcagaggcaggtggatttctgagtttgaggccagcctggtctacagagtgagttccaggatagccagggctacacagagaaaccttgtcttgaaaagaaaaaaaaaagaagaagaaaaagaaaaaagatatccagcccatttctttctcctcttcagcttcttccttcttcctctctcctcctcttcctcctttaagttaggagtttgctatgtactccaggctagccttgaaccctcaatcgtcctgcttcagctttgaagcatgctggctggatactacaaatgacctgttttgagactgttgtcccttagtcctagaacccaaggtccatatcctcagatccaggccccaacttcccagtcccgtttcttcctgagacaagggatagtctcccatcctcccctggggagaactgggtggaaagtcgccatctggagtatgttttggggaccaggcttcatagattcaagccccactttgtcccttgccagctatggagctcaggcaaaccacatgttgttcctgggccttggtagccccatttgtaaagtgggtgcagtcccagcatcctccttgtggggttgttgaaagggcaaatgaagaacttcatgttaagggttcaaacaggaagcacaggcactgctcagtaaaagcagcgggggctgggagcgaggtaatgaatcccacacatctgttctgaccccagcccctgagctctcagggaggaagtgggggttggggaacagttgttgtaatggatcccacgcgtttctgtagttcactgttcctacccttgctcctgagccctccaggcggaggcagaggctcctacctccaggctctgtccctcacctacagtcactctccttcctactacaaactccccatccagtttcttccacccagctcctttgccctctccgaggcccagccccaagtgccttggcctagcccatcccacaggggacctaagccaccagctcccagctctgatgctgccccaggacatgttggccatgagtccatgggtgagcaatggtgtagcaggcaagctggacacacacacacagagaaggaaaagctagaaaaaaatattcctgagccccttagggctcctcagggcccctcagggctgtgtcatttgacagaaagagaaatcgaaagtatgaactatgttatatagacacacacacacacacacacaccatgcctggctcagagccttcattaacacaatgagataatagcatctttttaatacttttaaattatatttaattatttatttaggggggtgttgcacatcaggaccctcgtgtggaggtccaagggctacttttagagagtgggttctctcctccactgtgagggtttgggtggggaatgcaacgtagaccaccaggcctggtggcaagtgcctcttaccctcagagtcatctcaacattgtttctatgttgtttgtttctgggcaggaggggatgacaaagggctcaggtagcccaggctggctccaagcctgccatagaacagaggctgatgatcctcctgcctcagtactgtcccctcctcccctggcactgggtctataggtgtgtgtcacagaccctgactctggagcagactggtcctctgtgccagtctctgctctgacattttccagtggcaactggtggcatttttacagatactgggaggacatgtctgtccccctagaaaggttgtcctctcgtcttctaatcagtcatttaagaaaagaggcatttgagctgcagggggagggggggtgtgacggatggagcatgcctgtgaatccagaactgggggattgatgcaggtttgggggtagcctgggctacatagaaagactttgtttattccacaagacaaacagggctaggaatttggcttgtccagcattcatgaagacctgggttagaccctgggtttggtactaactgggcatcatgataagtgcttgtaatgccagcactttggaggtagagacagcagatcagaagtttgagattgcccttggtcacatggtgaactcagtctagcctgacagatagttctgttgatggtggaatggcagtggctgaacctggcctctgtggcttcgagaagactgacactgtcacaaccaagtcccacagaatcacgttccttgcttggtgtgcccacagggggtctgctgcacagctctcctggtggctgtggtggctcggaagctggagttcaacaaggcggagaaacacgtgcacaacttcatgatggacatccattatgccaaagaggtgaggcttggctggggctgtacctcaatggttagacccttgcctagctcacattgagttcaactccaagcaccttgtaaaccgggcacggtggtatagacttgtaatctcagcattcagaagacggaggcaggaggatcaggagttcaagatagtcctcagctatgtagtgagttcaaggccaactgggctgcaggagaccacccggtattaaataaataaataaagccagttccccttaaagcgtgatggttcagtactcagaaggattagacaataagatggcagggaatttgaggccaacctgggctacaggaaaaatccagtcccccgacttctaagccaagtcttccagactcctgggcacccctctcccctgacactgtgtcttcccgtcagatgaaggagtcagcggcgcggctgctgcaggaagcctggatgtactacaagcacactcgaaggaaggactcccgggctgcccgcagacatcagcgcaagatgctggccgccatccacacgtgagggcctccctgggtccctgtgtgatccgcccgattctgactgtgactcaatgctagtggccctggattcccagggtccctcttactctgaggcagactgctccttcctgtcctggctctcctcccctcacccctaccctctgacttacccagggaccaagcctagaactgagttcacctccccacaggttccgccaggtacggctgaaacaccggaagctccgggaacaagtgaattccatggtggacatctccaaggtaccagggccctcgggaggaggtctcggggaaaggggcaaggtgggactgaggatggaaggcagggagatggacctgtgaaggatggactctcagacctagatatggtagttcaagaccagcctgggctacctgagacccatctcaaaaaaagcaggtggtagtggcacctgcttttaatcccagcacttgggaggcagaggcaggcggatttctgagttcgaggccagcctggtctacaaaatgagttccaggacagctagggcgacacagagaaaccttgtctcgagaaaaccaaaaaccaaaaaaaaaaaaaaaaaaaaaaaaggaaacagaaaggggagtcacctggagtggggggactgaaacacacaggtgtgcagtaaaggttacaggactgagaaaaaaagcctcccattcttacagaagatactggggccccttttagacttaagaaaaacaaaaagctaaaaaaaaaaaaaaaaccaccaaagaacgccaatgtttggtttcgaatcatctttattacttacatgtggacggatacaaatttccttccaggtgcgactcttatgcaaataaaaccgggcaaacttacaaagcagctcaaataccatcaacaaacccaacttaaaaaaataaattaagggacaccgtgacaggtgatgatattgtttcagcaaaagccagttcctgacactgttgtgaatcgggtgcccaagggcagagaggtccccttgctgcgaaggctcagagccttcgcctccaccatcgatggtgacgtcatgctcctttggcctgcctcaggcgagcccttctttatgtgtggccttttcttgttagcccagcacaattcaaacagccacccttggcactaaggccacggtaaacacagtcacagacacaggtccccagattacatgacacgtctccgaaaacagggtggttcgagtcagccagaataggtgggccactatggatgaaagttataggacctgagcacagaaatcgaaggttccccacaccaagctcacagacaagggtggggatacgtacttgcctggtgtgcatgaagccgccggttcaatccccagccctgcaaaaaccaggcatggcagtacatgcctgtaaacccagcatttgggaggcagaggcaagaagatcaggaattcaagctaattagggataaagagatgactcagcagttaagaccacctcctgctcttgccaatgaatgacccaggttgggttcccagctcccaaacagcagctttcatctgcctgtacctccagtaacacagtaaattcagttccagcttgggctacaagagactttgctccactccccaccccctaaaaaagaacagtcctccaggaccagagagggctcggcagtgctctgctatcccactctgtagagcagacagggctcttctaggccctcactcatgttcccctcccacccagatgcacatgatcctgtgcgacctgcagctgggtctcagctcctcgcaccgtgccctggagaagagaatcgacggtctggcaggaaagctggatgccctgacagagctgctcggcactgctctgcagcaacagcagctaccagaacccagtcaggaggccacatagctccacatggtgagtgggcagggacagggacaggaaaaatcccgaggaagagacaggccagtgcctgatgtggctgttgcctatagataaggccaccttttctcttaagctgtcccccacctcttagaactctgagtttagggctggactggaaaaaaaggggagtgattcctttttcacttgtcagcctcatttctcactcttttgtgcgaaggggcgtggccaaaggactggagatggaatctagggtcttgtgtattgtaagcaggggctctcttactgagccatgccccaagcgcctcactgggggattctaagcaggggctttactcttgagtcatattccctaacttgtggcttctggcttcccagccctctcctgcttttgattggtctctgtccccgtgcacacctgtactctcctctcctgggctttgacacccttctctctttccacctctagacattctctggcttctgccaacctccacctctggcatccctgctcctgtgttttctagccatttaccaatctaccatcttctcagaactcacagaagaaccaggctaagtacccaaggaccgagctcaaggacatgctccctgccaattccgaccaagccccacgataaatcacctcaagatgccaggacccaagtggatccacgttgaggtgcatggactctggtggtggcagccatgagtggacactgaattggacctcccacgtcaatgggaacatggccaccactacacatatgccctcatcagaagccctttctgctgtgctgctgttcaggaccccttaatctctgttggaggaggaggtgcctggggtctaggatgctaggaagcttcagttaaccgcgggcgggtctcgctgaaggaaccaggtccgagcgacgggaggtgctgccccctggtggacacctgggaagatgccgtttcctcctgattgcagagactgtgccagaagagggtacagggtgctgctcaccaatccaccctcacactttgtaataaatggtaaacgaagacagcagctgccatttctttccaaacacttcaaattttgctgcgggaggcacctgccctgtccccagtctccgtttccccaactgtagaggggtctggtggcatatgcttccccgtatagtctcacaactcaggaggctggtggactcaggaagcagatggactcgggaggtggaggcaggaggatctctgtgagttcaagaccagtataatctagtctacatagtgagctccaggacagctagggatatatactaaaacctggtctcaaaacaaccaaacaaaaacaaaattagtggaagaaggcaggaagaaattgagtttgggaatagcctcagctaaattgggggggggggtgctagcctcacctattttcccaacacttataaggtagaagcaggattaggagttcaaggccagcctcagccacatgagatcttgactcaaaaataacaaaatgggttggtgcaacggctcagtaggtacaggaacttgcagccaagcctgacaacctgagttcgatccccaggaccagcagggtaggtagaggagagacatgactcccacaagctatcatcctctgatatgtgtataatgccatgtcccacccgccacccaccaataaatacatgttaaaaagaaagaaagaaagaaagaaagaaagaaaaaagccaagtcccctgaagtacctgcccgcagctttctaacaccggagtggttgaaatcaacaccctgatagttctgaagccagagcaaagggtttgaattcaggcagacaggcatcaagatccttattctgccctctacttgctgtgtgacctggaaaagtggctgcccttctctgaacattttacttcacctgtgagatgtcgtgtctccatggaactgctgtgatggtgtaaggaaacagtgccacggggcagggggcggagggggggtcgtgtcagggttagtattgtcccgagcgtgagggatcatttggtccagtgttaatcatttccacactcggtgtgtggccaccccgtccttcttgacttctccctagtcattcacacctaccctggtcctagcctccaagtcacacaccgagagatgagcaagcacccacagggcggcacacagcaatgtcataaccgctcagtggagctggctgggtcctgggatggcagagcacctaccgtgtgcccatatttttgagccccacttttctttttgtagtgttttggttttgttttgttgatgtgtctctgcgtatgttctggagtacctatgcacgtggaggcacgggtcaagcttgggcttgatcctcagactctagtccacctttttttttttttttttttttttttaatctgtttctgaggtctcaccatggagccctggctttcctggaactcattatgtaaaccaggccaggcactagatccacctgcctctgcctcccaagtgctggggttaaaggtactcatcgctaggtccagcccccacctttcttttctctttcttttgagccaagacgtgtcactggaatggaacacaccacacgattcatggtcagagagcagcaggcattagcctgggcctgccttctcgggcacccgcagcctggctgttctcacatgggttcagggacccatgcctcgtgcttgatcccatgcactgtgccagctgagggagctccctagccctgctgttgtacttgagacagggtctcattatgtcaccctggctaccctggtactttgtagtccaggccaaccttgaactcaatccttgtgcctcagcctcctgagtactgggattactgtcatgtatgacctctggctaagtattttttaatacatcatgtgtgtgtgtgtgtgtgtgtgtgtttcacgtgcacgtgtgcatgcgtgcacccaggtgcatcatgggcacacatggagatctgagggcagcttgccatagtcagttctttccttctactatgtaaggcttggtgacaagcgccttggctcatgaggtctcttgtcagtccagccaccttgctctttgtaaaccctcagccgccgccaccaggcctcaacttccccatttcacagatctagaaattgagtttgcagggcatgcaggcctggtccaaggttctagccaggaagccacacatccggctgcagagcccaacttcccagccgtcctgtcccctggctggtctgcctgcctgccctgccccaagtgagtcagagaccagtggccttgggtctggggcccgggcctgcattcctgctccccaggctgactcatcctggcttggaaggggatgcccaggcttcgagtcattctggctgagctatctttggatttccctccaagtcctctgtcagtctcgtccctgtgctaaattggactgtctaccacccactgcctccgctgtcccttcctctgattgccggctcacctggaggccaagcagtggttccagaaagagactggaggggttccaaagttgtctgtcccctgagagaagccctcaggcctaggccatgtcttgtcgactcctttggaagcactgttcccctccagattgccttcagctggctactcctcctttagggacttagatgtcctctcctccaggaagcccgctctggtatcctgtcctgtcataataatattgattgggccaaacaccatgttaaactctttatgtggctctcaaacagagggaaagaggacacgttagggtgtgagtttgtcacatgagctaactgactcacagacagattaataaatccgcacaggccagagttgtagctcagtggaagagtgcttgcttagtgtgtgccaaacccagggttcaaattctgacactagacaaaaatttttggaagtcaaaaaaaacctgtcgaagccatagcaaagagagaggggaagatggaggtacatgcctgtaaccccagaagttagagggctggaggaggaggaggaggaggaggatcacaagctgagggccagcctgtgctacagaatgagattttatctcttaataaggaaacaaggggttatggggatcggggatgtggtcctgcaccccattgctttgccaagcagttgctctgtcagctagtagattatattttagtgttgttcattctctgtgctctgcttctggactctttaactcgggagatgggaacaagtgcctcctcacccccatcccaggatgccaatgataaaccacagtatgagcctgccaaggtccaactggggaacccgtgagtttgctgggtttattacagggcctgaatgggggcttaatgtaggggtgtgggtaacccaaaagcagccatgccacttgggggggggagtctagtcccagctcaaaggatggcttcctcacaactccacagatggggtatcctttcagccagccttccccagtctgtactcctgaggccataaggtcctgtaccattagggcagaagtacagatggccagaggtacagcacggggaggctgggatttggggtgagggtccagtgcgtggctccaagcctccttctatggggcgacagacagtgggaccagtctccagggccttcagcaagtgttcagagctgctctgctcaagaaagggccattatgcttggagtctagctggctttctacaacatttcccagcatatcagggccctcagtaaatgtcccccccccaaaaaaaaacccacattttatatatctgggtagccaggagcatgctgccttcagagaaatcagatgaggaggtgggatggggaaacagctcagtggtacagtgcctgcctagtgtgtgccaactcctggattccatccacagcagcatacccccatgtatacacatacacacacctggatccctccacatcaacacacccccatgtacacacacacatacacacacacacacacacacacacacctggatccatccacagcaacacaccctcatgtacacacacacacctggatccatccacagcaacacaccctcatgtacacacacacacacctggatccatccacagcaacacaccctcatgtacacacacacacacacacgtgcatttgtaaactggcacacgcacacgtatacactcatgtaagcatacccatgtacatgcatgtgtgcacacgccacacatgcacacactcatgtgcacatcttttttagtggttttgacagaaacatgggggcttttgatgaacaacaagagttcccacaagagatcccaaatcccgctgtatcttggatctgtccctgtcaacctgtccctgatctcagtggggctcagacctgacacccagtagcattccccttccctgtcatcaaatcaatgcttccgaaaagcccagcgccaggcaagagctgagctgggacggacggacgttgattcagaggctgctgacctccaagactctgcctggctacttgagttacttccctctctcatttcacttctgcctgcactcccacaaggatgtgggggcgcgtggaggggaacagggctcagagaggagtaagggggagcgagggccagtctccctccctaatgtatgccacactgagtccctgaggactttcctaacatccagcccgattgcacccctccctgctcaaaatgcaccgtggcttgtggcttccacagccttttctgtcaaggcttagcacaaagctcttcctctgtttcctagttactgtgtggtactggaggccgaactgaagacatacgccctagacggcaggctactgttacactctatctccaccctcactattagatgcaattctaggcaacattctaggacttgaaccacacccccagcccctcattgggggattctagacaggggctctaccactgatacatagtgtcagctctgagtgtgtgtgtgtgtgtgtgtgtgtgtgtgtgctggtttgtgcagaattcggaggtcaacctcaaggtcaaccttcagggacaacctaccttcgtttttgttttgttttagccagggtctctcactggcctggagcttgctagtgagattatgtcagctggatagtgagtccctgcctctggctccccagtgacaggattacaagactcgtatctggcttctgtacgtgggctctggtgaccagactaagttcctctggctcacacagtaagctctttaccaactgagctagctctgtagatgtcttatttggattttaaagacaaatcttactacgtaaacccaggctggcctggaattcactatgtagccaggcaaggcgtaaaccactctcaataatcctcctgaattctggaattacaatcatgagccattgcacacagatgtttttttctaaataactgagaattattttcatacagatgaacaaatattaatctccatcttaacgcacccttgatgatgtttttgtgtgtgcgtgtgcacacatgtgggcacgtgtatggcagctgcaggacaacttgagggacctggcttgatcgtcctgtcatgtgagacccagggttcaggctcagaccgaatgtcatcactgtggcaagccctcctgcttgctaagctgtctcacggggccctcaggcaaattttgacagatacattcacgtggctgctcaccactcaacccaaatgagaagtcaccacctccccaagctccctcagcctctgtactcctccacccccacccacccccacccccccccccacccccggcacagcagtcctggtttccaacccattcctgggatcgcctggtatccaagggcttcaccagtcgacctgcggaggaccagtttcttcaggtctgggaagtgaggggggattgtcagcagctggtatgtccctagggctgtggtgttccgggggtgtcacagtgtccccaggagcctccacttggagtttcttcaatgcctggccctttccctgccccctgttctgcattctcttggcccgcccctattctcccctccctccggctccctccccttagaacagatgtctccagtattggtgctgtgatttattaccactgtaaacatccaggctcagctggctgtgcagagacctgcttggaacctttgtgctggggactctgccaacatcccacagccaggcagtgctttttatggggcaaagatagtgcagaacggcaaaaccttcccactcttatcaagataagatggcacttcattccttgtgtaccctctctggcttcctcatgaacagacagactcgagcactatgatgctcagtaagcggaggcagagggatccggcattcaaggttatcagcagccagagcccagaatatgtgagactcccatcttttaaaaaaaaaaaaagacaaagggagagaagcaaggaaggaaagggggaaggaaggggagaaggagggagggaagagaaggaaggagagaaggagggaaggaaggaagggagggaggaagggagagaaggagggagggagggaaggaagaaaggaaggagggagaattagcctgacaagtcacaggactgggaaagttactccacactattgtaagaatgccatctgccttgtgtccttcatatttactgagacagggcctcactatggaggctgctggtgactctcctgccacagccttcagagggctgtgataagaggcatgtgacaccacacttttttttcaataggagacaggatttctctaactgtcctcgacttgatttgtaaaccaggctggcctcaaactcacagagatcctcctgcctctgcctctgcctcctgagcacagattaaaggcatgcacaatcatacccggctagacaccacactctatgcactttctcaacagtttaatttctcccaagaaggacagacaagtactgacaaacctctccacagaatatgtactttaattttgagaaatcttcatagtagagttagactatgagccttgccttggctggtgacacaggcctgtgatcacaattccttgggacgcctcaaaagttgaaggactgttggagcaacaaatacaaagtgaactctaggctagcctgggttacttagtgagacactgtttcaaaatgaaaacattaaaagaggggctgggggcgtggctcagtgggagagcccctgtctagaatcccccagtgaggggctggaggcgtggctcagtggtagagcccctgcctagaatcccccagagaggggctgggggcgtggctcagtgggagagcccctgtctagaatccccccccagtgaggggctggaggcgtggctcagtggtagagcccctgcctagaatcccccagtgaggggctggaggcgtggctcagtggtagagcccctgcctagaatcccccagtgaggggctgggggcgtggctcagtggtagagtatttgcctagcttatccgagaccctggactcagttcctagcatcatatacagaccaagaagtctttgtctttctcccggtggactccaggttcacccactacactagctcatcaccttctccttgaagccctttgttcccatggctccaagtcatggcctccataatgaccttgctctttggcctcttcccagcactcagctcctttccttatcccaagttcaaaagactcagtctcacctgtcttctccagccactcagactagatgaccacagcaggtttcaggatttgaaatatcagctacatgtaaatttagcatacctgtataattattggtaagagaccaaatacctgtcatgtgtgtaagacaaacaaaatccagaaggaaaatacattagttggcttctctgctgctctgatactagaaagttggctcagtggttaagagcactggctgggtttggctcccagcacacaactgtgtaactccagttctaactcctctctgacctcagtgggtactgcacatatatggagcacagccacacttgctggcaaaacatccatgtgtgcataataattaataagtctcaaaaacaactctgaccagaagcgactggggtgggagttgcactccattatgggtcagtactcagtgacggatgtcagggcaggagctgaagcagaggccatggaggaactccgcttactgccttattcctcaaggcttgcaggatgacctgcttagggcaggcaccgcccacagtgggaagggccctcctccatcagtcagcaattaagacaatgcttcacagacatgaccgcagaccaatgtgatagagccaactgcttacctgaggttccctcctcccatagtgttaaactggcaaccaagcttagccatcacagaatacacgcatagctggggcgagggtggaaatagcatggtgagatgcctccatactgggcagtggacatgtgggagacctttatgccataataccctttgtatgcttcagatttatttaatgaaaaggaaaaaaagtgatcttcaaaccccaatttctctcccagcatgatcttgctatgtagctcaggctagccatgcattcaggattctcctgcatgaacctccccggggttagagttacagatgtgcaccatcgtgcctggcttttctgtcaacctcaaggtttgtccagctctgtccttccccctgggccagttaagagcgagcatcattcatccacttaaacacaccccaaatccacagaacgaactgtctgtcaacccagcagctggtggagagtggtcacgagtttgagccagcctgggctacaaagcgagtgcaaggccacccagggttaggagactgtcttcaaagactgccgtgcatcaaaactttctttaaagaaaaatacatttcttagccgggtggtgatggcgcacgcctgtaatcccagcacttgggaggcagagacatgcagatttctgagtttgaggccagcctggtctacaaagtgagtttcaggacagccagggctacagagaaaccctgtctcgaaaaaccaaaaaaaaaaaaaaaaaaaaaaagaaaagaaagaaagaaagaaagaaaggaaaagaaaagaatacatttcattaaaaaaaaaaagaaagaaagaaaaataaaaatacatttctttatgtttttgagtacatatgtgtgcctgagtttatgtgcatcacgtgcatgcagctctgtgtggccagaggacatcagatctcccagagctggatttgcaggaggttctcagctgtctgatatgggtgcttgaaactgaaccaggctctctaaagagcagctggacttgaaccgctaagccatctctccagcccccttcccaaaagaacttttaaacatcatgcctggtaatagaatagcatccacatacacggtagaaaggcttacttgtgcccatatgcactaccttggcacctacattcttgtgtcgtgagaacctctgaagtttctctcagcaaactccacacatttcctgcgcagttatcatctgtagccatcacgttgctcggtggatccctaagataactgtctgtcacccctgagtcatgcttccgtttgccctccatacctctgctcaactttgcagctgtgttccagctcttcagacctctcaatcagcatcgctatcttcccgagtcatccaggggagtcctgcctaggcaggcccaggagcttccccatgccctgctt

SEQ ID NO: 698 - DNA, 1469 bp, Mus musculus
ctgggcaggaagctggctgagccccaagacctcaggggccatgggcggggagctggtgactggcctgggggccctgagacggagaaagcgcctgctggagcaggagaagagggtggccggctgggcgttggtgctggcgggaactggcatcggactcatggttctgcacgctgagatgttgtggttcctgggctgcaagtgggtgctgtacctgctcctggttaagtgtttgatcaccctgtccactgccttcctcctttgtcttattgtggtcttccatgccaaggaggtccagctgttcatgactgacaacgggctccgggactggcgcgtggcgctgacccggcggcaggtggcgcagatcctgctggagctgttggtgtgcggggtgcacccggtgcccctacggagcccgcactgcgccctggcgggggaggccaccgacgcgcagccctggccgggtttcctgggcgaaggcgaggcgttgctgtccctggccatgctcctgcgtctctacctggtgccccgcgcggtgctgctgcgcagcggggtcctgctcaacgcgtcctaccgcagcatcggggcgctcaaccaagtccgcttccgccactggttcgtggccaagctgtacatgaacacgcacccgggtcgcctgctgctgggcctcacgctgggtctctggctcaccacagcttgggtgctgtctgtggctgagaggcaggctgtcaatgccacggggcacctcacagacacactgtggctgattccgatcacattcctgaccattggctatggggacgtggtacctggcaccatgtggggcaagattgtctgcctgtgcaccggagtcatgggggtctgctgcacagctctcctggtggctgtggtggctcggaagctggagttcaacaaggcggagaaacacgtgcacaacttcatgatggacatccattatgccaaagagatgaaggagtcagcggcgcggctgctgcaggaagcctggatgtactacaagcacactcgaaggaaggactcccgggctgcccgcagacatcagcgcaagatgctggccgccatccacacgttccgccaggtacggctgaaacaccggaagctccgggaacaagtgaattccatggtggacatctccaagatgcacatgatcctgtgcgacctgcagctgggtctcagctcctcgcaccgtgccctggagaagagaatcgacggtctggcaggaaagctggatgccctgacagagctgctcggcactgctctgcagcaacagcagctaccagaacccagtcaggaggccacatagctccacatgaactcacagaagaaccaggctaagtacccaaggaccgagctcaaggacatgctccctgccaattccgaccaagccccacgataaatcacctcaagatgccaggacccaagtggatccacgttgaggtgcatggactctggtg

SEQ ID NO: 699 - protein, 434 aa, Mus musculus
WAGSWLSPKTSGAMGGELVTGLGALRRRKRLLEQEKRVAGWALVLAGTGIGLMVLHAEMLWFLGCKWVLYLLLVKCLITLSTAFLLCLIVVFHAKEVQLFMTDNGLRDWRVTRRQVAQILLELLVCGVHPVPLRSPHCAGEATDAQPWPGFLGEGEALLSLAMLLRLYLVPRAVLLRSGVLLNASYRSIGALNQVRFRHWFVAKLYMNTHPGRLLLGLTLGLWLTTAWVLSVAERQAVNATGHLTDTLWLIPITFLTIGYGDVVPGTMWGKIVCLCTGVMGVCCTALLVAVVARKLEFNKAEKHVHNFMMDIHYAKEMKESAARLLQEAWMYYKHTRRKDSRAARRHQRKMLAAIHTFRQVRLKHRKLREQVNSMVDISKMHMILCDLQLGLSSSHRALEKRIDGLAGKLDALTELLGTALQQQQLPEPSQEAT

SEQ ID NO: 700 - DNA, 34722 bp, Homo sapiens
  misc_feature (1)...(34722): n = A,T,C or G
cagtgagctatgatcgctccattgcactccagcctgggcaacagagtaagacactgtctctatttttttttaagtgaagaagatgtgaatgaagatgtggcagtgcccctgaagggcttacaatgtcaaatagggataacattttctgaactttctcctacagccaatggggatacatggactgatatagagaaggggcgaggcatggtcaaagccaggtgatatgaggctctccctgtggccatgcaggagacaggcccgagggagtgagattggaggcagggagaccagggaggtggatggtgagagggcctctcatgctgcctggtttccagagtcaagggcaatttaggattaaaaggctggaggcagaaggaggaactgagaaaccagagtgtgagtgttatggtctacgaggagttaaagtcccttctaagtgagggtagtggtttcctctggaggttgggggttcccgatcataaaggagcacataaggagattccagggaatgcaaatactttctcttggtgtgcctttgattttatggaggttcacaatacatcatttgtccaaaatgtaccactatgttttatgcacttttggcatataaggtatattttatttatttatttgtttttgttgtttttattttttgagacagagtctcgctctgtcgcccaggctggagtgcagtggcacaatcttggctcactgcaagctccgcctcctgggtttacgccattctcctgcctcagcctcccgagtagctgggactataggcgcccaccaccatgcccggctaattttttttttgtatttttagtagagacggggtttcaccgtgttagccagggtgttctcgatctcctgacctcatgatctacctgcctcggcctcccaaagtgctaggattacaggcttgagccaccgcgccagacctatttttttttaatgtcaaaagcaaagacatggctagagctcaggnnnnnnnnnnnnnnnnnnnnnnnnnnnnnnnnnnnnnnnnnnnnnnnnnnnnnnnnnnnnnnnnnnnnnnnnnnnnnnnnncatccatattagagctttttaatctttggtgatagggattcagaatactggttatctctggtgtatcagttgggagggttacaagagagcctcttgtggtgatggagatagcttgatagagatggtggtcacacatgtctgtacacaggtttaactgaattaatccatacacttaagatctgcggacttgcaatgtgtaagccatacctgaacaaaaagaaaacaatcttaggtcagtcctggtggctcacgcctgtaatcccagcactttgggaggtcgaggtaggaaaattgcttgaagccaggagttcaggaccagcctggccaacatagagagaccctgtctttactaaaaattttaaaagtaactaggtgcagtggtgtgcgcctgtagtcccagctacctggaaggctgatgcaggaggatctcttgggggcaggaggtcgaggctgcagtgagctatgattgggccgctgcactcagcctgggtgacagagtgagaccctgcctctaaaaagaaaaagaaaacaattttaaatgccacatatgattaaatggtattacctctaggttttacactgaaataacataggaagtgaggaagtaaatggaagcacagatgaaatgcaattgaccacgaattggtatttgttaaatagatacatggagatttattatactcttctgttcacttctatatgtttgaagttctcgataataaatatatatgtacacatatatgaatatgtatgtatatatgaaaaggtagataatagatagaactaatacctatttaactcacagtgacccatacacccacttgggaacccagacatctctcttcttctggtaatgcagataatgattatttaatgtctggattttacatacaaccttgccccttcccaagattcccccaccctcccaagcttaagcggaagtggaagtccaggtcagcaccaaggacagatccacagtattgggtctcagaaccacagacagcaactcaactaacggaggacaaaagacagggaaatgaagaaataccatcttgaacagtgtggaacaggacaagaggctagagtcaaaaaacgcctatcagtatcattgaacaagagcattccttcaacaaatattcattgagcatctgctatgtgccaggcactgttctgaacacaggatggccaggttcctgtccttaaacaatgagacagataaaatgagatcattttatatagtcataagttctatgataaaatataaagcagtgaaataagatgtaggatgattgagggagatggaagagaccgtttttgaagaggtggttaaggcagagattatatttgagcagagtggctggatactgtggctcatgcctgtaatctcagtacttcaggaggctgaggaaggaggattatttcagtccaggagttcaagaccagcctgggaaacataggaagactccttttctagcaatttttttttaatttgctaggcatggtggcttgtacctgtagtcccagctacttaggaggctgatgcaggataatcacttgagcctgggaggttgaggctgcagtgagctatgattgtgccactctactccagcctgggtgacagagcaagaccttgtctcaaaaaaatttaataaaataggaaacaaaaattatatataaatatatatgaatatataaataatataaatttatataaatttataaatataaataacataaacataaatataaatataaatataatgatatatatttataatataaatatatattttataatataaataatatgaatataattatatgtttataataatagaaatataaataaatatttataataatagaaatataaagaaatatttataatattataaatataaatatttataataatataaatataatatttatataatataaatatatatatattatataaattataatatttattatatatatatataaattatatatatattatataaattataattatttattagatattatatataaattatatataatatataaatataatatataatatatttataatattatatgattatatatttatatattattgatatatgtattatttttattatatgttatatgatattatatattgtatactattataatatatataataatttatatatatatttgagcagagaactgaatgaagtgagggaatgccccatgaagagagtggaggtgcaagcattcaggaagagggaacagaaaatgctaagacccagaggcagaaaaaagcttggtatgtttgagaatcagcaacaaggccaatgtgataaagcaaagtaaatgcaaaggaaagtgatgggaggagtttcgccaagataggaatagacacacagaaagaaagcaatagagaaagacagacaagaaaattgagacccaagctgagactgaccaagaaaggctcataggcaaaaaaattaggagcaaaatgatgctagctgcagtgtatggagtgcaatttgcattatacattttattattttattatctattcacatatacatacatatgcatatacttttttttttttagttgaagtctcactctgtcacccaggctggagtgcaatggcacgatcttggctcattgcaacttctgcctcccaggttcaagtgattctcatgcctcagcctcctgagtagctgggattacaggtgcccaccaccacgcctggctaattttttttgtatttttagtagagatgaggttttgccatgctggccaggctggacttgaactcctggccttaagtgatctgcctgcctcagcctcccaaagtgctggaattacaggcgtgagccaccatgcctggcccatatatatatattttttattatggaaaacttcaaacatgcagatatgaacataagggtataataatctactttttattgtgtaacaacccgctccaaaagttagtgtcttaaaataaacaatctcatgattgaggcttgactgggcatttctgctggtctctcctgaagtcattcacatggttgcattctgttaggacaggactggggctttagccaagatagcttcattctccctgcatggcctctccatgtgactagcttgggcttccttacagcatggtggtcttctagttctaagggtacaaaagcagaagcttctagtttccttaacatctggacctggaactggttcagtgtcatatttgccacattctattagtcaaagcaagtcatgagccagatagactgaaggagaaggaacatactgttccttttcgtgggagaagccacctgccagtgcagggaagggaggagtcactggcaggcaacttgggagacaatgtatcacaagactttaacatagaccaggcctgctgttagggctccagacattctctctcacctaagcctcaagcagccctgtcacataggaaacataatccctcttttacaagtttcacagagcacacaactatggatggcaactaggtttgaactcaggtttgtctctaaaccaggctgtacgtataacatattccatacaaaaataaagttaggccgggggtggtgtctcatccctctaatctcagccctttgggaggctgaggcaggtggatcatctgaggtcagaagttcaagatcagcctggctagcatggtgaaaccccgtctctactaaaaataccaaaattagcctggtgtggtggtgcatgcctgtagtaccagctacttgggagtctgaggcaggagaatcgcttgcatccaggaggtggaggttgcagtgagccaagatcgtgccactgcactccagcctgggtgacagagcgagactctgtcttgaatgaatgaatgaatgaatgaataaagtcagtggtcacatcgaggcttaaaccgaggtctctagacttccatattgtgagatatagatatctgtatatcatatacatctgtatacactatacatctgtatactatgccatatactatactacatatctgcatatactatatatagagtgtgggtgtatgtctctgtgtaataacataatatacatacatttttaactggcggggaacacagagatacaaagaagaaaataaaagcagaaatgaagaaaaaaggagaaaggagaaaagcatgcacttggagactaagaccaggagatagaaacagagaagcaagacaaggcgcagtggctcacacttgtaattccagcaccttaggaggacgaggcaggaggatggcttgagaccaggagttcgcgaccagcctggcaacatagtgggaactgtttttatgaccaaaaaaatgttttttaattaaaaagagagagagagaagaaagaaagaaagaaaagaaaaaagaaagagagagagaaagaagaaagaaagaaaaagagaaagaaagaaaaaacaaggacaatgatatacagagagaaaaatgaagactgagagcaaagaagagactgagattgatggaaccacgaggtctccctcctttagcctggaaactccacaagagcaagaattttgtccatttttgttcattacatatcgccaactccttgagcagtgcctggcactcagtaggtgttttgctctatgttggcaagaaaccaggctggacagggagagtgtctgcagttgcctaagtgaacactaggtgacagtatttataagccctggagcttccaggctccaaggtcccagagatggcggtggaggatttgccgccactgacctctgactttcaggatctcttcctcggggctcagccctgcctttccctgcacaagccttgggcgatgaatgacctttccgcctgagacaccctcttcactctccttcaccagcctgcccagttaaacaactctttgtccctggccccttcctgctgggccccgaggcacctgggttctttccaggcccggagatggggctgcgacagaggtggtgcagctgggacaaggccaaggaaaaatcctggagactctggaatcagttcttccagtgtatgagacccagcccctcctccctcagacccaggggtccagaccccagcacctcctccctcagaccagcagtccaggccccagccctcctccctcagactcaggagtccagaccccagatcctcctccttcagacccaggagtccaggcctcagcccctcctccctcagacctaggagtccagatccagcccctcctctctcagaccagcagtctagaccccagcccccctcctccctcagaaccaggagtccagaccccctgcccctcctctctcagaccagcagtccagaccccatcccctccttcctcagacccaggagtccagaccccagcccctcctccctcagaccccctcctccctcagaaccaggagtccagacccccagcttcttcctcctggacccttcctcttaggcattttgaggtcctctactattccctctccctctcttttacacaaacccctctctccctccactccccattctaggattgagaccaagggtgagtcacaagaagccctgaggccctgagtcacctcgccctccccccttggcccctccctgggctggaggcagctggctgaggagtgaagcagtttcctaggactgacccctgcatcccaggactgcagtttgaaggcaggtgcccttcccactgtaaccccatcactgccacccaggcatgtccatgcccatcctttgctgtttttctctttcagtcatggcctatttggagacaaaatttctctgtgctctaacttccgtgtcttgattgtgttttccggtttctctgcacctgtgggtctctttgattttttttaatacatgcccccaccatccctggctgaatgcctcgaggtctctctgattatctctctctccctctgtgtcagtctctgtctccgtttttcacaagtgcctgaactggggcacagatgccatggcatggccgcagctggagcgctatttagtggcttctgacccttgggtggccacagtctctggatcactggccctcaacccctgagtgggactggggtagaaccggaaggaaccaggctgtccgtagatgtgccagtgaacagcagagagaaactgaggcagagacaagcatagagaggcccggagagagagagagagacccaagaggagaccaggaggcagggagagagtgaaacagagacggagagaaacaccgattcagcaagagacagacaaaaacagagggccctagagacggagagatggagacagagtgagacacgatgacagagacacaggcaatgatgaacacagagagagacatgacagagagacagtgacggggaaagaaggaaacagaggagcagagagggacacgaagatggagaaagggacagagcgatgagagagacacagagaggctaagagaggcagagacagagagacagagtgaagagagacagagagagacaaaggtaccaggagagaagaacagagacagagataaagacaaacctggccaggcacggtggcttacgcctgtaatcccagaactttgggaggccgaggcgggtggatcacctgaggtcagaagttcacaaccagcctggccaacatggtgaaacctcgtctctactaaaaatacgaaaattagctgggtgtggtggtgcacacctgtaatatcagctactcgggaggttgaggtaggagaattgcttgaacctgggaggtggaggttgcagtgagccgagatcgtgccactgcactccagccatgggagacagagcaagactctatctcaaaaaaaaaaaaaaagacaaacgcagaggtttccagatcaggagagactgagacaggaagcaagtcccaaagaaccagagaaagagccggagagggaggagagagacgcagcgagccgggcggccagtgggcaggggtgcccaggctgcaggctcaggagtgcccggcggctgcactttccccaagtggacgcatgtgtggtgtctgggcgcgcccgggtgtgtctccagccctctcccgccaagtctcgccgagtgggtaatcatgtgtgtgccgaggggcggagcccccgcaagggttgtgtttttgccactgggcgtgtccatgtgtatggtttggtgtctctgggtgtgtttgtgtgggctgccttggtgtgcagtcagacatgtctgtgcgtgtctcgcttccctggggctggtgggtccagggtcccacacgacctaggacacaaggagggggagggttgtgtccgcaggttccttgcagaggggtgtgcatgaggccaagggcagtgtcatcagttcagtgcatgatgctgggaggtgatgtgcgtcaccaggtcagtgcatgcctgtgtgtctccacaggagggtttgatctgtgtcggagcgtatggtgtacagatccatgagtggctcgtgctgcgacacatggagatgtcctatgttgtgtgttgctctgagagtcaccgtgcacattccacactggcatttgctgtatctcacgtcagggtccatatccctgttgggggcctcttccttctcagcccccagcacccaccctgagtgccaaccaccccaagtgtcttgtgtttgtgtagctgtgtgttatgttgtgtcggaggatacacccccctcccccgatgctggtgttgtgtgggtggcggtagacctcagtgtcagtagtatcagtgagtggtgacatctggtgttttatgggacatgtggtcgtttgtggaaggttgggtgtgttggaaaacattgtgtctatgtgttttgcgttactgtgtgctggtgtattactccgtgtatgttgttgtgtggccacgcatgttggaatataacgtgttgggttgtgtggaggtattgtatgtcatgtttgggtgtggctcatggctcagaggtgatggtgtatgttgcgtttgtttttttgtttttgcttgttttagagataggatcttgctatgttgcccaggctggtctcaaacccctgggctccagcaatcctcccacctcaacctcccaaactgctgggattacaggcatgagccactgcacccagccgtatgttgcatttgggcactggggtctatgaaggtccaaccccatccccttcccccagggcatcatcctggatgttgtcctgtgtggccagaatataccagaatcatcttgcttcaggcatgtgcttcttgggtttctccgtgtgtcgctgtaccttgtaggtctctgcatgcatccactcagcttgtcctctgaccatacatttgaatcgcaccacacatcagagcatgctgaatcagtgcgtgttttgaatcatcactgcgagcacttgtgttcgagtcaacaggcgccacaatgtatgtgcaattctctagctctgggtgattgggggctactataggtatgtccctaaatgttgtgtgtctacacgtattgggtttcgttccaagggtgtgtagtgtttaggaaactgggactgcacagtgtttgtgtcggtgtgtggtgtgtggcatcagggcgtcactactttaatatatattgtgtgtttgtgtaacacctggtgtatgttgtgtttgtgtggccacagttgtgcatcgtcctatttgtggtgtttgggtgtggctctttgtgtcagagaaagttgtgacaactttgagtgtaatatttgtgcctgtgtgtggacggtgtttgggtggctgtgtgtgccacgggatactgcctgcttgctaagtgctggtgtgtgtcacaccatgtgtgtggtgtctgggtgtggctgtgggtttcagagcttgctgggagttgtgagtcactctgtgtaggttgtgttgtgtgccctggtgtgttagtctccgtcttgggctgtggagtgtccttcggtgtctgggtgtggtgagtagaggtgtgtgtcacaaagtacagaccattgtgtgtgacaaagcccatcgtgtgtctgtgtgtgtctttatccacgtggatggacgtctctttcttgctctgccccaagacacaccctagcccctccttattctcaaaagggggagctggggagcctccccctaccctggggcctcccctgcccctccccgccctgcctggccgtcaccactccccagagggcacagggctctgctgtgcctcagagcaaaagtcccagagccagcagagcaggctgacgacctgcaagccacagtggctgccctgtgcgtgctgcgaggtgggggaccctgggcaggaagctggctgagccccaagaccccgggggccatgggcggggatctggtgcttggcctgggggccttgagacgccgaaagcgcttgctggagcaggagaagtctctggccggctgggcactggtgctggcaggaactggcattggactcatggtgctgcatgcagagatgctgtggttcggggggtgctcggtgagtggggcatggtggctgggagctgggactcctaggtctgagggaggaggggctgggggtcaggactcttgggtctgagggagggggggctgggggtcaggactcctgggtctgagggaggaggggctgagggtcaggactcctgggtctgagggaggagggactggggacttggactcctgggtctgagggaggagggactgagggcctggactcctgggtctgagggaggaggggctgggggtcaggactcctgggtctgagggaggaggggctggggtctggactcctgggtctgagggaggaggggctgggggtcaggactcctggatctgagggaggagaggttgggggcctagactcttgggtctgagggaggaggggctttggctgggactcctgggtgctcccaggagacagttgctggggtccttctctgcaaaaggaagggaatatttgtttcagtgtttcagtctttgaagatgttgccattagacggccagaggtccaggacccctggaggccagagggtggctgatcagacactcaagccccccaagagccaataaggggagaggtagccccaggtttggtgaagggagagtggaggaaagacaaagttcttccagtaggcggcagctctttggtccttgtctaacctctaatgtttacccagtgccttagatgcaaaggacagaaaaaactgccttgggggtggggatgggaaatgggaaacaaacctctcccccgacctgcctccccacaccaaccccaacccagtctccactgttaacaagctcaatttctccccaaatctgcatgctgattagtcagggaaatagtggagaggtaggcttacagtggcctggactcctaggtaccaggagaggagggggctgggtcctggattcctgagtcttaaggagaagggggttttgattgcttttggggaagaggggctgactccgaagatgagtggtgagtagggaagaaaggggaaagtggggtcagggcaggtctcagcaggctcccgtcacattccagccctggtcaggccagtgatggggcagatcaaggacaagggttggaataagtggcttgaggggagaacagacttgctcaacaggaaaggaggggctggagacctctctggcagaagggttgtggaactgggctggtagggccagatgcggacactgatatgaagattgggtagattcctgagggtctgatgttccgacttggatctggagggggtggtgggcagctctgaagtgaccaggagccacatggagggtcaggcatgcagcttcctctggcaggcggcgggcactgagggggtggggccgccgaagtccatgccaacaggaagcatggccggggcctgcccgccgctcccacgccgaagcaccgcacccagaagccgaggtgggaacacagtgaccctggcagatgggaagagacggggtccatcctaccccacttcacccctctgctttctcacccctcatttcttccttccctccaccatggccaggccactgcctctatcagtgggaccttggggaagctgttacaaccctctgaacctcagtttccccatctgtaaattggggtgagggttaaaatacatgaccctaagggtcaccctccaccctttttattttatgtagagatgggaccttgctttgttgcctaggctggtcttgaactcctggactcaggcaatcctcctgcctcaaagtgctgggattacaggcctgagccacagctcctcagtccccttttgaggactctcttaataacatccaccgcccctcaccacctccatctcaatctaatgagctcatttctgcaaaggacccagacacctgctccccagggggaggggctggcagagaggcaggtgcaaaaccctagggagtccaagggaactggatagagatatccaaaagcaccaggtggggtggaggaggagggatggggagaggtaccgagagagacagagacacagagatacatggagagaaaaagagagatggagacaaaaatgcagaaagatagagaagtacagctaaagagaaagacaaatagggctatcaagctactgagaaatccaccagtgagagatacacacacagcgttagaaaagacaatagagggccgggcgcggtggctcacgcctgtaatcccagcactttgggaggccgaggtgggcggatcacaaggtcaggacatcgagaccatcctggctaacacggtgaaaccccatctctactaaaaacacaaaaaattagccaggcatggcggcgtgtgcctgtagtcccagctactcaggaggctgaggcaggagaatggtgtgaacccaggaggcggagcttgcaatgagccaagatcgtgccactgcactccagcctgggtgacagagcaagactccgtctcaaaaaaaaaagagacaatagaaacaaagaccctcaaaacacatagaaagacagcaacaaccatccctagagacagggaaattcagagaacagagtacaggcccaagtgcagacaggtccgggatttgggggaagaggaaatggaaaagtagagaggaccaccagagaagcaaattgcagtgtgaggagggagcttgttgtctagtggtgtgggcagttaagacagactgaagaaagaggcagggaaccagggagccatagaaggtgggggagggctggtgacaacagcactattgttctgatagggggttggggagcaggcccctggggcaggaaactggccctcttcccctgctcagaggcgggatgctggcccagccaggggagctggcagccctcttaggagaaacaggtgcaatgctttgtaaggacgcccaggtggtcccctccccctgcaaatacccgccaggcagggaccaacccctcttaggaaatccaacagtcccagtcccctctaaatccctctctccagaattctagattcctccaaggttgtgccacacaaagagaggaaaaaaaaaaaaaggaacaatttctccgtggtttctggaggccctgtgcttccggccagatctgccctgggcttagagccagaagagaggggtggcagtggggagctgcaggggggcagaaccgagggggctgtctcagagctgaggctgggtctcagggactcagccctccggatgagagcagagaagggtgtgactcagtctttgaggattgaatggtagtttctacattcttccagatctggggttggggttgattgaagttggtttctagggcaacaccaggtgggtaggaagggaaggggagggggcactctctagaggctagatgtctttttctagacaccacacacacacacacacacacacacacacacacacacacacctgaagaactatttttgatgtgaaatgggacaggaataagaaggaatgtgagtttcaaggtcccccttcatgggtatgggtcttgggagaagagctgaggaagagggtagacaccagcatctggacagggttgtcctgttggggagaaagagagcattcctggggaccagatgatggtgtttttttgtttgtttgtttgcttgcttgcttgtttcgagacggagactcgctctgttgcccaggctggagtgcagtggcgcgatctctcagctcactgcaacttccacctcctgggttcaagattctggttcctcagcctcccaagtagctgggattacacacccagctaattttttgtttttttagtagagactgggtttcaccatgttggccagggggtctcaaactcccgaccttcggtgatccacctgcctcagcctcccagagtgttgggattacaggtgtgagccaccgcactgggcccagatgatggttttgagacttctccagaaccgacacatcaagagggactgatttgcaggggaaggaggctaggaaaattgggaatcaaaaaaaaaaaatggtggttttgaaggaaaggtggagggccaggtggagggagacctgggatctcacaccgctttttccgtcccccctgacagtgggcgctctacctgttcctggttaaatgcacgatcagcatttccaccttcttactcctctgcctcatcgtggcctttcatgccaaagaggtccaggtagggcaggccccgcccctaagccttgctccctccaaccccctcagcgccctgtcagctcacactttccaccctcctcctcctcctgatctgagtaatgaagttcttctgccctaggtgctgcgtccacaccctcacctacccagatgggatgaaccatgagcagacaggcagagcctcccccaccagctccgccttcccctgtagtccccagcccccccttgcacactcacggatgctgagagtgcccttgcagccctgcttccgcccccaggcctctgtccactctgctcccaggcactcagcttcccagatctctgtgctccgacatggcatccccaatccagtcctcaagcaacctaaggtcctagggctgcccactcctttttttttttttttttttttttttttttgagacaaggtcttgctctgttgcccaggctagagtggagtggcacgatctctgctcactgcaacctccacctcctgggttcaaacaattctcatgcctcagcctcccaagtagctgtgactacaggcagatgccaccacgcccagctaatttttttgtattttagtagaaacggggtttcactatgttgtccaggctggtctccaactactgagctcaagcagtctgcccaccttgtcctcccaaagtgctaggattacgggcttgagccactgcacctggtccggtcccaggggtgcccactcctaatcaccctatctctgtgccaataacctccctcttgccccagacccaggagctctccccatccataccccaccttgggtctcacccagacacatcccatcccctattgtcccattgccccagatcctgttgctccattccctttcccctcttccccctctcctatcataactttgcatgtaaaatggggattattggccatgtgtggcaattctatgagcagtgcctggcacataagaggtgctcagtaaacagtgcacattatcatcttatcatagagtagctaagtagcctgtagcccagtgcgccattgcccatggaagggacctgggcctcagcttccacatctataaaatgggggcaataataatatcaatctcactgggttgtgggcatttactaagtcacaatatgtaaacgggatagagcagtacctggcgtatccacggtgcccagtacatgctgattttgttattgttattgttttgtttattttgagatggagtctcgctctgtcacccaggctagagtgcagtggcatgacctcagctcactgcaacctctgcctcctgggttcaagtgattctcctacctcagactccccagaagctgggactataggtgtgcgccaccatgcccggcttatttttgtatttttcagtagagatggagtttcaccatgttggccaggcttgtctcaaactcttgacctcaagtgatccacccaccgcagcctcccaaagtgctgggattacaggcgtaagccatcgcgcccggcccatggctttgttattgctgatattattattacagttattacgcgtgtcaaccgaaaggggagtaggagcgagctccaggcatgtggaatgcaagctctagggaggcaggggggtctgttgggttcactgtgtatccttagcacatagaacaatgtcaggcacacagtcggcgctcagtcagtgttcaaaggctggaagtgggctgaaactagtggggtgggtggtggggaaggaggaaaaagtggaaagatgtcttcctcaagtcctgtcccgctccctccctatccctctcccgccctgcactccctccctcctggccaggcggcacaccccacttatctcagggcgcaggcaggcgcgggccgccgcctgacctgcgcctgacctgctcctgacccctcccttcttggccccctaccggcagctgttcatgaccgacaacgggctgcgggactggcgcgtggcgctgaccgggcggcaggcggcgcagatcgtgctggagctggtggtgtgtgggctgcacccggcgcccgtgcggggcccgccgtgcgtgcaggatttaggggcgccgctgacctccccgcagccctggccgggattcctgggccaaggggaagcgctgctgtccctggccatgctgctgcgtctctacctggtgccccgcgccgtgctcctgcgcagcggcgtcctgctcaacgcttcctaccgcagcatcggcgctctcaatcaagtccgcttccgccactggttcgtggccaagctttacatgaacacgcaccctggccgcctgctgctcggcctcacgcttggcctctggctgaccaccgcctgggtgctgtccgtggccgagaggtgagggtgatggaggcataaatgcgcaggggggaaccccggacagccacggcggccgtcctgtgccgcggtgcaggttgaggccccctaggaccaagcagtggagaaagttcacactttgaccccttctcctcttgctggctgaaatttgcccacactcccatcaactggggtgagaggaaccaacagacaagcccccagccaatcctccacctgcagccttcagtctccccaaacgcacacacagaccctagaaagcccctcccttccggctgcctgacctctgcctcaggtttacaggccatctgttcggtctccgaacctatctctgggacctgcctaaagggttgcctctgccttggaggaaggagacatattttcccaattagcacggaatgcactgtaggtaggtgctttttgtgatcctaggaaggggatgatttggaactgctctggaaaataattccaagcagggaattggaactagatcctggttgccagctagatactgtgtaacccgatgccgcgcctcaatttctatccctttcagagaaaaacgaggttgggagtgatctcagccagtggtcctcaaagtgtgatttcaagaccagcagcatcacctgggaacttgcaaatgaaaactctcaggtcccttccagacctactgaatcctggagggtagggccagcaatccactttagcaagccttccaggtgattctatggcccaaccaaggttgagaacctctggtctagtgtatgtggcaaagatccttcagggcaggaggagaatgagaagatctggctttagatctctcctctctgagcctcagtttcctcatctgaaaaatgcatgtcacgttccaccatctgtagtctccctggcagttcttgttttttgatctggagtctcaattatccaggctagcgtgcagtggcacaatctctgctccctgcaacctctgcctcccggcttcaagcaattctcatgcctcagcctccctagtggctgggattacggatgtgcaccaccatgcctgactagtttttgtatttttagtagagaccacgttaccgtgttgcccaggctggttttgaactcttgatttcaagtgatcctcctgcctaagcctcccaaagtgctgggattaccatgcccgccctctgtcatgagtttaaactccttcaccttccaggatcttagttttcacaattgggaaattggtcagaatcaggattaatgaatgatccccccaccatgtttctcaattgaatgatgggagaatggggaggaagtcaaagttccacattccaaggcagaagtcctgaaactagaatgtacttcggaatgagggggtggggtttgtgaacagtacagattccatcttcgctcctagaaactccaacccggtgggtctggggtgtcaggggccctcatgaatgaagctttccctgctggtcctgcggcaaggggcctgtggacaaagttagacaaatctcaatgtttcaaccccttccatggctggacttaaatgtctcctctgtgaagtgagaggaaaggaaggccgagtcccaccaagcctttttagagtcctttttggtcctgatagggccacttctggaccacacagcatctttgtggaaattagaaaaatataccccttcctctgggtggatgtagccaccagtcagggtctgactgggttttggccccctctagactctccaccctcaaccacacgctctgaatgctacagtagcccgggtagcctagctgagaccataccggcattgggattggccagacccagtctcaaatcccagagtggcttagcaacttgcccaggtcacacagcagagaggaggccatgcaggctttccaaagctcagaacttaatggctttttgtccaggtgattcttaggactatgggtgtatactgggaggggaagggagggaaccagagggaaggggacgggagggtatagagggaaggggagtgaatatcatggaaacctctatggtggggttttagaactaacctacccttccccataggcaggctgttaatgccactgggcacctttcagacacactttggctgatccccatcacattcctgaccatcggctatggtgacgtggtgccgggcaccatgtggggcaagatcgtctgcctgtgcactggagtcatggtgagtacagctgccttggggacatgatccctatcccaaactggtcatcctctggccccaggaagccatgattaaatgggttcaacacaggctctcagggacagctcctgagaaacttgagtgtctggggcccccagagccccattctctcttcaagaacaagatactcacctgtaatcccaatattttgggaggccaaggtgggaggatcacttgagcccaagagtttgagggtacagtgagctatgatcatactgctgcactccagcctgggtggcagagtgagaccctgtctcttaaaaaataaaataaaaaatcagacctaggaatccagcccctaagtccttgctctctctagaacctagggccccagcccttatcctcctcagggacccaggctcctgacttcgcagccccattttcttccagaactgggaaatcgtctcccagcctccatcaagggtgtagagtccagttatcaagtgcatacctgtggggccaggctacctgggtccgaatcctgcggctgccacttcctggctggggagctcaggcgagccacgtgatctctcggggcctcactttcctcatctataaaatggggatgctgatgctcctcatgggcttgctgagatgattaaatgggtccaactacgtaaagtgcttccaacagtgcccagcccacaggaggtgctcagtaaacaggtctaggggtggccaggcatccagccaccccacaccagctcctgttgccctcaaggatgaggcagaggctctgtagcctgagtcagcctcttcctgaaccctgacatccacctccttccctccatagacccagtcactcaggtcctcccacccagccctggccccctctagagactagcacctaatgccttggccttcacctccctacaagatcgggttcccctcaccctcggggacctaagccaccagcacctagcccagatgtgggcctaggaaggacatattcatcccccaatccctaggtgcacaggtgaaggatgtggtgacctccactcccccagtggtgagtctttggagcaagggaagaggggcagagactcagttagggacctgcagcaccgctcaggacctcctccctcatttgacaaaaggagaaacagaaacctagagagatagggtgatgtgcacttgagctcacagcctgctcctggaagaaaggctccatggcatggttgggccataaaagcttacttttccggagcacatactctgtgccagtctctgccctacacacttgccaggggtaattcatgaaatccacctagtaaccctgtgaggccatttcacagatgagacactgaaatactgagagattaaataacttgctcagagctgggcttggaacccaggcagtcccctggagccagcgtttgtgactggaagttgttctgagtgatcaagagctgaaactatagggttggggatgcttcctaggaagattccttctaacttggggacaggtgagcagatgccacaagcagctaggaattgccaaggccttgaagggccaggagcattgggagaaggaagggaggagaatgagtgttcggaggaaggtgctcagggagggcaggcagcatggagccagggctgagttgtccaggtgggaggcatagaccttggaaggccttgggagccaggctgagacgttcaggccagtggaagcctgggagattagaggggaccaagggggttaggggaggatgagtgggaggctggagacggtccaggagagagaagacagggctggagctaggaagaagttgtgggagtgggagaaggatggtcgccctccacagtgcaatggctgaccacatgagcactgaggacccagaggcctgcccctggctcagaacccagccttcctctcactcctccaatcctatccttcattcaagaggccaccctgagggtgtgaatgctatgcatcaaatttgggctcggacgtatgcgatttatgattctagctccaccactctgagctgggaccttggctctcctctctgagcctctttgcttgtctgctaactggggatggtcgtgcctaccgtctgtggctgttgggcgggttcaaggagggagtcggtggcacagcctcatgccacggtgcctgctgtgcccacagggtgtctgctgcacagccctgctggtggccgtggtggcccggaagctggagtttaacaaggcagagaagcacgtgcacaacttcatgatggatatccagtataccaaagaggtgagatgggcatatggcacccatgggacacccctcttccaagaagcaggagtccaggcgcccctgcttcccctaggacccaagagtcccagccctagccctgccttcccagaaccgtaagggtctatctccacggacactgtgccacccacccccagatgaaggagtccgctgcccgagtgctacaagaagcctggatgttctacaaacatactcgcaggaaggagtctcatgctgcccgcaggcatcagcgcaagctgctggccgccatcaacgcgtgagggccgctttgtatgcacacgtgtccatgtgcacccatgtccaagtcacctctctgcacggctgtgtgtgtgcatgtccatgcctgtccaggtcaggacacccaggtgtggtctcactcaacatccaggtctcacctggatctgaccgtgcatgactctatgtgtctgtgctggtttgtctccgcatatctcggtgtgtctgcggacctgggtacctgggtttctactggggatgggggctcgtggggaggcagggtgcatcccctcccactctttcagctcttcgacaactttgtttctttgttttgtttcttcatgtgcctctcctcccttcattcctcccctgagctacagctacattcagggaccaggcttgtaaaactgactccccacttcttcccacaggttccgccaggtgcggctgaaacaccggaagctccgggaacaagtgaactccatggtggacatctccaaggtactaggatcccgtgggaggaggtcttgaagaagggggaggttggggccacagggagggaaatctggccctagaacagggaaccttggcaggggcctggcacacacagcctgtcagtaaaggtctgtggttgaatgaaggaaggaaggaatgaatgatgcaacacagagcttcttacattcatgaaaggcacagatcccttacaaactgaaaaaaaaaaaattgcacaaagaaccccagtgtttggtttcaaattatctttattgttaagttacttacatgtggacggatataaaattccttccaactacagctcatacaataaaaccaaagcaaatttacaaaccaagcccatagacggcaaaaccaatacaattaaaatgaacaacactgacaaggacacaggtgacattgtttccgtaaaactcaatctctgctgctcttgtggaggggtactcagggcaacagggacgtccatgcaagtttgcctggccaaggcgtgactcagctacccgcccccttcttctgctgagaccatttgatttcgccagtgcttagggacaatgatgtcacaacacccccttggcctggctcacagcatcttctgcttatctggtggcctttgctttttctcgttagcccacgacagttcaaacagtggcccctggcagcaatgccatggtaagcacggtcacagatgcaggccccaaaaccgcatggcaggtctcagtgacgaggcagtggcccagatctgcaggaattggcaggtggtaatttctgaaggttatcaagccaaaaacacagaattcaagaatttccatagaaaatccacaaaccctcagggatcaactagtgaatcctagccagagaatgcagtaaaagactatgtggatttggaagtcaggcatcatccatgctagaaatatttaatgagcacctgctatgttctaggtcttatttcaggagctgctttgggcatgtcatttaactgttccatgcctgtttcctcagctgtaagacaggaacaggattcccactccctgtggcttttgggaggattttaaaccatatagggaaacacctgggcaggtagctgggaagtggtaggtggtcaatacatggtaacagttattgtcgagggtaatcctcagaggaccataaggatgtggtcaatattggttccattgccttacgctatggagtaggtgggggtcgaccccagccccgacacctctgatcctctcctcccacccagatgcacatgatcctgtatgacctgcagcagaatctgagcagctcacaccgggccctggagaaacagattgacacgctggcggggaagctggatgccctgactgagctgcttagcactgccctggggccgaggcagcttccagaacccagccagcagtccaagtagctggtgagggggctgggacttgggcaggaaggcatcctggaggaagggttcctgtggccagcaccctatgtggctaagggggcgggggatggctgggagacaaggccgccttttctcatcagctctggcactgtctggaggaaaggactcagttcggggctggactggcagtgaaggaagatggtgtaccctctccccttcactgacccttgatggccttctccctctttgcttggtctctctctctctctctgcctgtcctgggcacattgtctggctgtccatccaatgtctctgtctaaatgccctcctgccccctggcctcggggcccggaaacacctgccccctgtctcccacttctgcccaccggtttctgtctgcacctcggtgtgtcccactctcactctccctcttcctggcctgcctctccatcagtctctctgtctctccaggacccacgaggaggaaccaggctactttccccagtactgaggtggtggacatcgtctctgccactcctgacccagccctgaacaaagcacctcaagtgcaaggaccaaagggggccctggcttggagtgggttggcttgctgatggctgctggaggggacgctggctaaagtgggtaggccttggcccacctgaggccccaggtgggaacatggtcacccccactctgcataccctcatcaaaaacactctcactatgctgctatggacgacctccagctctcagttacaagtgcaggcgactggaggcaggactcctgggtccctgggaaagagggtactaggggcccggatccaggattctgggaggcttcagttaccgctggccgagctgaagaactgggtatgaggctggggcggggctggaggtggcgccccctggtgggacaacaaagaggacaccatttttccagagctgcagagagcacctggtggggaggaagaagtgtaactcaccagcctctgctcttatctttgtaataaatgttaaagccagaagttgccatttctctctaaacatatctacactcctaactggcagaccgtccagtggaagactgttgccttgtctgaacctgtctcagaggccttctcctgtaagtgccctcccaactctgtaggctgggcagtcctcagcaacagtcccctgcccagatctgaggcaaagagcaacagctttgaactcagacagatcagggtccaaatcctggttctaccatccactggtggtgtgatcttgggtaagtggcttcacctctgaacagtttacctcacctgtgaaatgggactgcctccccatggaactgctgtgaagattaaaacatggagtagcccagaggcatttagtaggaaccaaatatgtgagagagaatcttttttttttttttttgagatggagtcttgctctgtcacccaggctggagtacagtggcgcgatttcggctcactgcaacctccgcctccagagttcaagcgattctcctgccttagtccccaagtagctgggattacaggcacctgccaccacgcctggctaatttttgtatttttagtagagatggggtttcactatgttgcagatgctggtcttgaactcctgggctcaagcaatctgcccgcctcagcctcccaaagtgctgggattacaagcgtgagccactgtccctggccaagaatcatttttattattgtttttgattttcacacacaatgcgtggctgccctttttctgattttttgttgcttttctccctctattcatgccttaccagaatctagatgacaactcactcatcaagagactaacagaggccccaaacctccccaaaccacccacatacccgtttcacatccgctcaagagaggatgtgaaagggaagggggcaaaggaggggggctggcacttccagaggccctactgtgtgcccagctctgtttataagtcaccataaccactctcctgaccctcgttaccccactgcacagatgtagaaaccgaggtttcaagaggagccaggcctcccctcaggcccccagccggaagctaggaatccgggctggagagcccagattcacacccatcccgccccactgcaaggtgagtcagaggcagagtggccttgggccacaaaccgaggactgacttcccgccgcaacttcattccagcttgagaggctgattcattcttgcttccctcctcttgaggggaagatcaggctgcgagtcatccttttctgttgagctatctttggatttcccttaaagtccacagccagcctcgccccttcatccctgagagctaaattggagcctccgccacccactgccacgaactgcccttcctctggaggccagcccacctggggagtaaaggcggggactcaagaaaggaactggatgagacctccagatattgctgacacccttcccctgcaagaagctctcctggcagtgttgccaaagcccctgccaaactcattcttctgggacctctctttccttgcctccactcccttttagctggcaaacactccttcctacgcctcctgtaggcctcggctaatatgtcccctcctccaggaggccctgtctgatactcctatagcctcataaacctatccctatcacgataataatattgggtctggccaggcatggtggctcacgcctgtaattccagcactttgggaggccgaggcaggcagatcacctgaggccaggagttcgagaccagcctggccaaaatggtgaaaccctgtctatactgaaaatacaaaaattagccaggcgtggtggtgtgtgcctgtaatcccagctactcgggagtctgaggcaggagatcacttgaacccaggaggcggagtttgccgtgagccgagatcgtgccactgcactccagcctgggtgacagagcaagactccatctcaaacaacaacaacaacgacaacgacaacaaattagccaggtgtgggggcacacacctgtggtcccagctacttgggagggtaaggtgggaggaacacttgaagaggctgggaagtcgaggctgcagtgagctgtggtcgtgccactgcactccagcctgggtgacaaagtgagaccctgtctcaagtagtagtagtagtagtaataataataataataataataataataataataataataatgggtcaagcaccacgctaagcccttttaataagtgacctcacaaaaggaggcaaggtaggcaatgttggtcccattttacagatgaggtaactgcccgaagccatagcaaagcagtttggagccaggatgtgacccaggcagcctgaccccagagccccagcacttagccacctggcgcattcagacactcaggagaccatcacattgtattttcatttttgttcatgattgcgtcttcaacaccaagggcctgacatagacagggcctcagtgaatgtcattaaacgaaccctctgaatgcctgggatggcctgaagccaccccatgttggtttcagctgagccatcccatgttgatttcagctgaggcaaggtcagaaccagtgaaaaggggcttttgactaagaacctaggagaacatacaagagatcctgtgttctgaattatcttggatctgccctggcccgcctgccctcattctccactgtggggctcaagcctggatgcccccacttctggcaggttttgcacccccctcaccaaatcaacacttcctgaaggccctgagccaggagctgggctgcagacatgaatcagagggctctgtcctccaggagctgagtctcatggtgattttggctccttccttctcctatttctgttctgcctgcactctcatgaggactgggtgggggaaaggcggtccagagagggcaggggcttcccagggtcatacagccagtcacgggcctttccccttcataaatcccccaactgcccttgaggacctttctaacacccacacacttcccattcctcccactgccctcctgtcaaagtctagctctgagtccagctcttttttttttagagacagagtcttgctctgtcacccaggctggagtacagtggtacaatcgtagctcactgcagcctcgaattcctgcactcaagtgatcctcctgcctcagcctcccaagcagctgggactacagctgtgtgccaccatgcctgccccctttttttctttaactgacatatattttaacatacaataaagtacacaaattttaaatgtaatctcaatatatttcttcaaatacattcacctgagtagccatcactcagatcaagctagaagtgtctagccccctaaagctctcatttccctcccagccaacagcccccttcatcccaggaaccaccatcctgacctgtcttgattccttttgttcaactttgaactttggaaggaaccctgctgcacgccctggtgtgtatctgtgtcttgggctctgcagggtggtggtgagattcagccatgctgctcatccttttcattacacagtagtattccattgtgtcagtatgcccacaagcctcacccgggggactctgcaagctcagtctctccccgtcttctggcctccccttctcctccctgtcctggctgctcaggccactaggctcctcttccttcccaaactgcctgctgctctcccctccttcttgccccatccactcagaataaaaataaacatcactaacatttattcagttctttgttgtagagacgggggtctcactatgttgcccaggctggtctcaaactcctgggctcaagagatcctcccaccttggcctcccaaagtgctgggattacaggcaggagccaccatgcccagcccagctatttattatggtccataaaggaagctgtatcatcatcatcaacaccagactggcagtccaaaggcatgctttaagcttttatgttgtgtggaatagctgctaacatatacaaaccaggagagtgctttttataatttggagggggtgtcaaatgataaaactttcctttctttttccaggatgagctggcccttcttcaagtcaagtctagccccctcaccctgtccacacctcctcaaaaaacagctccaaagtctcctggtctcttttccctctatcattcccatctgcacacaaacatgctataatttctcccatcttataaacatcccactggaactttcagaagcattttagattctccattttccttaaagttcactattcaccaaactgcaaaatatctgtcgctctgtcacctaggctggagtgcagtggcgtgatctcggctcactgcaacctctgcctctcagcttcaagcaattctcgtgcctcggcctcccgagtgtagctgggattacaggtatgcacctccaccacgcccagctaattttttgtatttttagtagagatggggtttcattatgttggccaggctggtctcgaactcctagcctcacgtgttctgcctgcctctgcctccgcctcccaaagtgctgggattacagatgtgagccaccaagcccggccataaagttggttctaaactcctgctacatagaatgacataaaagactttgccagacataaagagctaaagatgccagacacacggaagacatgctgtaagatttcattcgcatgaagttcaaaaacagacacaacgaatctctgtgcctgtttttgaaaggcattagatgggtggttgcttctggagcaggggaattgacagggaaagagcacaaggaagacgtctgggtgctggaaatgttctctgattagcggttacatggatgcataaatttgtgaaaattcattacctggtacacttaagatctgtgccctttatatactttaccacacttaagttatatgtcacccaaaaagaaaataaataaaaataaagaaaaataagtacttatacatttttcctgatagatactgagaaggttccataacacagttagatgggggatcaaaagtcatgtcttttccatggtggaccccacatctgcctccagctgctgccccgtgtctctgctccttagtccattatcttctctttggaaccctttgatcccatggcgccaggtcatcccctctcctgacactcctggctccatctcagcccctctccaggatcctggcttctacatgcgggatgctcaggcctagtccctgctctcttcaacctctcagcctagatgatctcagcaaatcatagctttaaatatcatctataaataggcagctccaaaatttagcatacttgtatagttattaacaaaatgacaggttatctgtgattttcttaaaacaaacaaaactccagggggtggcgggaagtatgcttatatgtgggagggaaaaatagaagacataagacaagaaaaatgcagatgtctgtcaatattgggcgatgggtacgtgggagtctcttcataccataacatctttgtgtgtatttttaaaactctgtagtgactgtaatcccagcctttgggaggctgatggggtggattgcttgaacccaggggttcgagaccagcctaggcagcatagtgaaccctcatctctaaaaaattagccgggtgtgctagagcatatgtggtcccagctacttgggaggctgaggcaggaggattgcttgagctcgggaggtggaggttgcagggagccaagatcgtgccattgcattccagcctgggtgacagtgcaagactttgtctcaaaataaattaattaattaaactaaattctgtgacgcaaagtcagaaagtctttatctacaaaccccggctttttcccctaactccaaccacttatttgatgaccaacgtgcatctcaaagttaagaatttcaaagcttgttgatttcccatcaaaagtacttttcctcatcccggtaaaaagcctcagtcttaggccgggcgtggtggctcacgcctgtaatctcagcactttgggaggctgaggcgggtggatcacgaggtcaggagatcgagaccatcctggctaacatggtgaaaccccgactctactaaaaatacaaaaaaattagccgggcgtggtggtgggcacctgtagtcccagctactcgggaggctgaggcaggagaatggcatgaacccaggaagcggagcttgcagtgagccgagatcacgccactgtactccagcctgggcgacagagcaagactccatctcaaaaaaaaaaaaaaaaaaaaaaaaaaaaaagtctcagtcttcaggcagttggccaggaccaaaacctctcgaactttttttttttaattattattatactttaagttttagggtacatgtgcacaatgtgcaggtttgttacatatgtatacatgtgccatgctggtgtgctgcacccattaactcgtcatttagcattaggtatatctcctaatgctatccctcccccctccccgctagaactttttttaatgctgcaaataacatgatgttttaatatatgtacacattgtggaatggctaaatcaagctaattaacatatgcattatttcacatacttatttttttgtggtgtgagaaaacttaaaatctattattttagtaagtttcaagcatataacacattgttatgaatgagagtcaccctgttgtacaacagatctctaggatgactttcaagtcacccctgattcatgcttcctctcacaccccatgtttaatttcttggcgctaccttcaaaaaagatcccagttcctgacccttctcaactcatctattagcaccaccctcttccagaaccactatcctttcttgcccaggcaaggacaccagctttctcatctcctgcttccgcccctgcaggccattctcctcacagcaaccagcactgttttcactgaacatttttgcgcatagctaataattacgtggtttaaaaaaacaacaacgctttttaagttcccatagccctgacccacatctgtctataaccctcatccctataggcaatcactgttaatttttgttgttcactggagaagtctttgtaaacattaattggaacaagccggtgcttgtttgtagccctgcaatggctttgttacatttggaagtaaattccaaatgcttaccatggcctgtaagactttatgtaaactggccctgtctacagctccgtctctaaataatcctgcccttctttccctcccttgctctgtttcagccactctggccaccttgaccatccttggacagccaggcccactcccactttggggtcttttactggccgttcttcagcatctttagatggctcatttcctgaccttccttaactgcattcaggcctctgatcaaatgtcatcccctcaaagcggccttccctggccacctgtcactctctgtgacctctatcactgtcaattcctgtaacctgacttttttttttttttttgagacagagtctcgctctgttgcccaggctggagtgcagtggtgcgatcttggctcactgcaagctccgcctcccaggttcatgtcattctcctgcctcagcctccggagtagctgggactacaggcgcccgccaccacgcttggctaattttttgtatttttagtagagacggggtttcaccatgttagccaggatggtctcgatctcctgaccttatgatctgcccgcctcggcctcccaaagtgctgggattacaggcgtgagccactgcgcccggcacctgactttatttttaattgaaaaataaaaattgtatatatttatggtgtacaacatgttttgtatatttatacattgtacaatggctaaatcaagctaattaacatatgcattatttcacatatttatcatttttgtggtgaggacactgaaaatttatcctcttagcaattttcaagtatacattgttactaactatagttaccatgttgtggactggatctcttgaatttattcctcctgtctaaatgaaattttgtatcctttgcaatgtcttcccaatcctcacccccgattttcttttcttccaagcatcctttatctgatgtcatctgccccactagaatatctgctcccaaagggcaggtgcttttcctattcattacaggatctccagcctacagctgtgcctggcagatgactagagttccataattcattcaacatataaatgaaagaaatgaacaaaaagtgaaaaagagatgaacagggccaggcgcagtggctcacacctgtagtcccagcactttgggaagctgaggtggaaggattgattgaggccagcctcggcaacatggtgaaactctgtctctacaagaaatacaaaaattagccgggtgtggtggcacatgcctgtagtctcagctactcgggaggctgagacaggagaattgcttgaacctgggaagctgaggctgcagtgagctatgatcatgccactgtactccagcctgggtgacagagggagaccctgtctcaaaaacaaaaaataaagacatgaacagatcatttggcaatggctctcaaaattcccaatgtgcataccctttgacccagcaattctacttgcacttcaaatgagatagtctactgacaatactaacatatacatgcagccacgtgtaccaggatattaactgtagcataatctcagcactttgggaggctgaggcaggaggactgcttgagccaggagtttgagacagcctgggcaacatagtgaaaccccgtctctacaaaaaatagaaaattagctgggtgtggtagcacatgcctgtggtcccagctactcctcaggctgaggtgggaggattgcttaagcccaggaggttgaggctgcagtgagccacaactgtattacatgactccagcctgggcgagacagcaagaacatgtctgaaaaagaaaaaattagaaaacagaaacatacacacaaacccctgcagtaaatgtttgtaagagcagaagttcagcaacagtctaaatgctcatcaacagagaaagtgttaaagtatgatatatctccagaacagcataccatgccactaatacaaaaggcagctcactgggtgcctgactgtactgctgactcatcaccaggctggctccccggtgccagggaaaaagtgtaggcttgctctggagtgagacaggcttgggtttgaatccaggcccgggtttgaatccaggccctgctgcttcctgcctatggggacttcggtaaggcccttctctcttccaggctcatttgtctacatctgtttttttttttttttttttttttttttgagacagagccttactctgtcacccaggctggagtgcagtggtgcgatatcagctcactgcaacctccacctcctgggttcaagtgattctcgtgcctcggcctcccgagcagctggcattacaggcgcatgccaccacacccggctaatttttgtacttttagtagagatggggtttcgctatgttggccaggctggtcttgaactcctgacctcaggtgatctgcctgcctcggcctcccaaagtgctgagattacaagcgtgagtcactgcgcggaccaacatctgttaaacaaattaggggagaagattatagtgatgtatataaagcagagagcacacagcctggtacacagtgggtccaaggtcaatgccaggcctcctctttccctcttttaagaaaattctacctctgagggttgccctgacgtgaaactggcaatcgtgagtgatctggggttgagaaattcagatatggcctgagctgaagaagtaaaattggacactgatagacataatacagagatggcctgtcatgtgtatctttatcaaacacccagaatctttccccagaatccatcaacagtggactcaagtcattctgggtgactggtgtttctacctgtggcagcctggagaggtggctccacctggtactggtactgggacaatgacagtagg

SEQ ID NO: 701 - DNA, 2238 bp, Homo sapiens
gtccttcggtgtctgggtgtggtgagtagaggtgtgtgtcacaaagtacagaccattgtgtgtgacaaagcccatcgtgtgtctgtgtgtgtctttatccacgtggatggacgtctctttcttgctctgccccaagacacaccctagcccctccttattctcaaaagggggagctggggagcctccccctaccctggggcctcccctgcccctccccgccctgcctggccgtcaccactccccagagggcacagggctctgctgtgcctcagagcaaaagtcccagagccagcagagcaggctgacgacctgcaagccacagtggctgccctgtgcgtgctgcgaggtgggggaccctgggcaggaagctggctgagccccaagaccccgggggccatgggcggggatctggtgcttggcctgggggccttgagacgccgaaagcgcttgctggagcaggagaagtctctggccggctgggcactggtgctggcaggaactggcattggactcatggtgctgcatgcagagatgctgtggttcggggggtgctcgtgggcgctctacctgttcctggttaaatgcacgatcagcatttccaccttcttactcctctgcctcatcgtggcctttcatgccaaagaggtccagctgttcatgaccgacaacgggctgcgggactggcgcgtggcgctgaccgggcggcaggcggcgcagatcgtgctggagctggtggtgtgtgggctgcacccggcgcccgtgcggggcccgccgtgcgtgcaggatttaggggcgccgctgacctccccgcagccctggccgggattcctgggccaaggggaagcgctgctgtccctggccatgctgctgcgtctctacctggtgccccgcgccgtgctcctgcgcagcggcgtcctgctcaacgcttcctaccgcagcatcggcgctctcaatcaagtccgcttccgccactggttcgtggccaagctttacatgaacacgcaccctggccgcctgctgctcggcctcacgcttggcctctggctgaccaccgcctgggtgctgtccgtggccgagaggcaggctgttaatgccactgggcacctttcagacacactttggctgatccccatcacattcctgaccatcggctatggtgacgtggtgccgggcaccatgtggggcaagatcgtctgcctgtgcactggagtcatgggtgtctgctgcacagccctgctggtggccgtggtggcccggaagctggagtttaacaaggcagagaagcacgtgcacaacttcatgatggatatccagtataccaaagagatgaaggagtccgctgcccgagtgctacaagaagcctggatgttctacaaacatactcgcaggaaggagtctcatgctgcccgcaggcatcagcgcaagctgctggccgccatcaacgcgttccgccaggtgcggctgaaacaccggaagctccgggaacaagtgaactccatggtggacatctccaagatgcacatgatcctgtatgacctgcagcagaatctgagcagctcacaccgggccctggagaaacagattgacacgctggcggggaagctggatgccctgactgagctgcttagcactgccctggggccgaggcagcttccagaacccagccagcagtccaagtagctggacccacgaggaggaaccaggctactttccccagtactgaggtggtggacatcgtctctgccactcctgacccagccctgaacaaagcacctcaagtgcaaggaccaaagggggccctggcttggagtgggttggcttgctgatggctgctggaggggacgctggctaaagtgggtaggccttggcccacctgaggccccaggtgggaacatggtcacccccactctgcataccctcatcaaaaacactctcactatgctgctatggacgacctccagctctcagttacaagtgcaggcgactggaggcaggactcctgggtccctgggaaagagggtactaggggcccggatccaggattctgggaggcttcagttaccgctggccgagctgaagaactgggtatgaggctggggcggggctggaggtggcgccccctggtgggacaacaaagaggacaccatttttccagagctgcagagagcacctggtggggaggaagaagtgtaactcaccagcctctgctcttatctttgtaataaatgttaaagccag

SEQ ID NO: 702 - protein, 425 aa, Homo sapiens
MGGDLVLGLGALRRRKRLLEQEKSLAGWALVLAGTGIGLMVLHAEMLWFGGCSWALYLFLVKCTISISTFLLLCLIVAFHAKEVQLFMTDNGLRDWRVTGRQAAQIVLELVVCGLHPAPVRGPPCVQDLGAPLTSPQPWPGFLGQGEALLSLAMLLRLYLVPRAVLLRSGVLLNASYRSIGALNQVRFRHWFVAKLYMNTHPGRLLLGLTLGLWLTTAWVLSVAERQAVNATGHLSDTLWLIPITFLTIGYGDVVPGTMWGKIVCLCTGVMGVCCTALLVAVVARKLEFNKAEKHVHNFMMDIQYTKEMKESAARVLQEAWMFYKHTRRKESHAARRHQRKLLAAINAFRQVRLKHRKLREQVNSMVDISKMHMILYDLQQNLSSSHRALEKQIDTLAGKLDALTELLSTALGPRQLPEPSQQSK

SEQ ID NO: 703 - DNA, 88493 bp, Mus musculus
  misc_feature (1)...(88493): n = A,T,C or G
ggaggcagctatgggatggagtccgcgaaatatgcttcaaaactttgcttgccaactggaaccacctgagagagattctcatacaatcgctatagagggccacctcagcactgggatgtttttaggttaggtttcctcaagacattcctacacagctcttgagcgctgctgtaagaactttttaattttggttaacacgatttggagaactgtgtgctcaaagacattttaaaacgtgtttcccgtggtccatggagtttagggctctccagggatacttgcacagcgttcttatcagaatcagaggagtgggtgggaaaccgtcatggtaatgagcacccagcagctctgctgtgttccagacagtggctttcagagagctgcagggctataaaacctgctgcagtggcctgctttgtcacccttccattgacagaagtgcacctgtccttatctacagggaactaaactgtcaaaagacccaataaacgccggtctccgagctgctctaaaccacccggaagggaaatcttcccttaccagactacagaatgcctgtagtctggagcctagaatgggccctcagcacacggcgtcactattaactaaagaaataaacgcttaaataactcggagatggtggaacctggaagctggttgtctccctcaagtccttactttttaatttcctccttgtgtgtgtgcacatgtgtgtgtgtgtgtgtctgtgtgtgtgtgtgtgtgtgtgtgtgtgtgtgtgtgtgtgtgtgtgtgtgtgtgcatgtgtcacggtgggcacgtggagttggttccaggatccaactcagcttgtcaggtttggtgtcatgtgccttcacccagtgagcatctcacagacccctgcaaatccttatttttgactcagacttacaaatattcagctaatgcaatattctttgcttcaaggaacttaacatggcaatcagataattttggaagtggttattcactctataaaaagagacattgatttatgaaaatgactgattagagcagtgtggtttttggaccaggagcagcacctagaatctgttcaaaatttgacctgtggagttgtatccgaaactctgggagtgagacccagaaatactgtgtgtgtgtgtgttgctatatagcccaggctggcctcagagtttagatctgcctcagctttccaagagttaagatcactggtgtgagtcaccgagcccagtggcaatctcacatgtgatttcatgctaagattgaaaactgcagcggagttgtttaagtcaaagttcccatctgataataagatcaatgtttaagaatacacatagagggtatcatctaccacttatggtagtgtatccccgtacatctttagaaagctactagattatactgaaaggtatattttacatgttaatatgcataatttgtttatattggtgtaagcaactatataaagccagatgttatagtgcacactggaaatcccagcactcaggaggccaaggaggatcactgtgagaagaacctggtatacacagcttaaggccatgctggggttacatagtgagaccttggctcaaaaaagtccataatttaaaaacagattgaaaatatcacattgcattgcacatggtgaaggcgtttcatttcgtgacatttctttagtaatatacagggccacaatctaaaatacatctcatttgaaagcaaaaaactacagttcttgggaggcagaagcaggcaaatctcagtgagtttgagaccagcttgatctaaatagtgagttccagggctatgcagagagactgtctcaaaacacaaagtatttcgtgtgtatgggtgctctccctacatgtatatctgtgtaccacatgcatgtctgatacccttggaggccagaagagggtatcaggtttcctgggactagagttatagatgcttgtgagcccccacagattttggaaatcaaactagggtcctctgcatgagcagccagctcttaccttctgagccatctctcctgcctaagattttaatacttttatttaatgtggatgctgcctgcgtgtatgctgcattgtagagagaatggagatgagggaggtgaagagaagactcagatcataagagcattggctaccctttcgagaaccccagaagagcagcctgtgctcttaaccactgagctatcatcgctctggccccaagtatgttcttgatgtgaatcgtagtcaacaaaatgtttgaaaagtgcatctgtccagggcttggtaattgtttctcattcatgtgaacagggaatgtcccacaagctgataggcagaaggttatattctgaaacagctttttatttctgtagtcctgtacagacaagtgattgtcttgtttgctcggagtttaatgagagatgtagatacttgtaccatttaggctagactccaaatcttcgctagattgtaaatatgtgtgtatatgagagttcgagagagttacctaatggaagtaaataatttagcatctacctcccatcaataaatgatcactacccagactgaaacaaaccaatgctatgaattcgaggtctactgtggcaggagagtcgcttgtgtttgaccgagactcatagtcaggctggaaggtaagagacacttagcataaagagaggccttcagagacttagcagaaagggaggccttgggtatcctctgaatgttgtttagggtatggagaagctagagacaggcagactagaagctgggcattctgtttgctttggggagtgtgtttgcctaattgatcccgatttggaagtgaagcaaaaaccatgtgaagctaatagccactcaccaagtcttgaagttcaaggccaactgtagcagagggtgaagcttgccttcttggactggttgctggaagagttgttcgttgcagttctgttcttatggagtctggccattgtctcactgtttggcaaagcaatgacctaacctgcagggcaagtttactcattcaagacttctgagctcttgccagcttgtccagtgaatcagatattaaagtgagggctgggtttagtcagtctgtaggtcatagttccttcccactgctgaattagggatggcagtgatggctcagaataatatgttttggtgggcaaggaagttttgcctatgctgcctggagtcaaccatgactctacagttgctatagcctcctttttaaagaaaaaatatttatttattttatgtatatgagtactctgttttcatgcacaccagaagagggaatcaggttccactacagatggttgtgagcaaccatgtagttgctgggaattgaactcacaacctctggtagaacagccaatctcttaactactgagccacctatccccctatcatctcttcttgaatgagggatattctaacttgctgtatagttgtccctatatgtggttacttctaagaatattcattctaccccagggtcagactcacatatcatccagcctggctttcagtctgtgtcaaacacaagtgactctttctgatctgttcctgtctggatggtgaacatttattgatgggagatagatgctaaagtaaattacttttagtagttaactcgcatatacagatatttataatctatagatgcctaagtggcactaggtcctacatctctcctcaccaaaggaccatgaagggataatgattcacactgtggacagatcataggaggaactgtattggcaatggaaaagcattgtttggaatctatggagccggaaactactgtcagattcagaaattgtaagcagaaagtgtgataccctttgtttggccttgaaaaaaagtactcaacatgttggttatatacaataataaatgtctggaattttcttttctaggctgaggtgtatttcagtggtagaacacttatttgtctggtatacacaaagctctaggttcaactccttagctccaacttggatggaaatcttgcaaaatagaactgaccagaactaaggctaggaatccagttcagtggcagaatactttcttagtgtgtgcgacaccccagattttgggattggcattgaaaatgaaaagtttaccaaaacctgtctgtttatacaaaaaattttttgtataagtttttttcttttattgactattttctttgtttatatttaaaatgttatcccctttccaggtcttccctctggaaaccctctatcccctctccctgcctctatgagggtgcttccttgcccacccacctactcctgccttcctgccctggcattcccctacagtgggacattgagccttcacaggatcaagggccactcttcacagtgatgttccacaaggccagcttctgccacatatgcagctggagccctgggttcctccatgtatattctttggttggtggtccagtttcctggagctccacagggttaggccagctgacactgttgctccccccatgagactacaacccccctcagttccttcagtcccttcttcaactcctccatcagggaccccatgctcaatccaatggttggctgcaagcatccacctctgtacttgtcaggctctggcagagcctctcagaaaacagctatatcaggcttctatcagcaagcacttcctggcatccacaataacatctgggtttggtgactgtatatgggatggatctccaggtgggacagtctctggatggcctttccttcagcttccacactttgtctctatatttcctcctgtaagtattttgttcccccttctaagaagtactgaagcatccacactttggtcttccttcttcttgagcttcatatggtccttccttatctttttttgataacttttggttgaaagttgattctatttgatattagaatggctactccagcttgtttcttgggaccatttgcttgaaaaattgttttccagccctttactttgaagtagtttctgtctttgatttgacactgaggtgggtttcctgtatgcagcaaaatgctgggtcctatttaagtattattgctgttatttttgttattaaaagtggaattatgtttgtgtggatatcttcttttgggtttcttaaaagattactttcttgccttttttagggtgtagtttccctccttgtgttatcctctgtagagctggatttgtggaaagatattgcataaatttagttttgtcatggaatatcttggtttctccatctacggtaattgagagttttgctgggtataatagcctgggctggcatttgtgttttcttagggtctgtatgacgtcttcccaggatcttgtagctttcatagtctctggtgagaagtctagtgtaattctaataggtctgcctttgtatgttacttgaccttttccccttactgcttttaatttctttcttttgtgcatttggtgttttgacttttatacgatggaagggatttcttttctggtccaatctattttgagttctgtaggcttcttgtatgttcatgggcatctctttctttaggtttgggaagttttcttctataattttgttgaagatgtttactggccctttaagtcgggaatcttcactttcttctatacttactatctttaggtttggtcttctcattgtgtcctggattttctggatgttttgggtttggagctttttgcattttgcattttctttgactgtcatgtcaatgttttctatgatatcttctgcccctgagattttctcttctatctcttgtattctgttgttgatgcttgcatctatgactcctaatctctttcctagattttctatctccagggttgtctcccttcatgatttctttattgtttctatttccatttttagatcctggatggttttgttcaattctgtcacctgcttgattttattttcctgtaattctttaagggatttttatgtttcctctttaagggcttttagctgtttacctgggttctcctgtatttttaaaagggagttatttatgtccttcttaaagtcctctatcatcatcattagatgtgattttaaatcagtgtcttgcttttgaagaaagaaaaagaaaattgttctaggtttgctcttatatttctaacttcaacattcctggccaccatgtataagcacaagatataactgagatggagaaaccgcagcatttgtgcatgtgtaggaaaaacccagagagtatctatagggtttccaagcatcagctggaaggtttggagcacatcatgatgaagggactactctattgggatgtgggtgtgggtgtggatgtgtgtgtgtgtgtgtgtgtgtgtgtgtgtgtgtgtgtgtgtgtgatagaactaactgtacatacctacttaataatttggtttcttctagtctctgcagttaacttcaccacacagaaatctgaataatgtcattacagccacacaaacactttggcatgcataaatgaaagtcaattccagtaatacaacatcgacttaccaataaatgaaagagtcactctaaggaaaaagcaaattattaacagaagcccaaaaataagctttctgtacctctgtacctgagagaaaataaactaccaagaggttaaaatgaaagtgattcaattttgctcttgcagacatattcacaaatgatattaaaatacattttaacatatgctgaaattaaggacaataagtgtttgtggctcattttctttcatattcatttactattattaacaatttcactaaaatgatctcttaaaagaaatagttttgtaagttaatatcatcagtagaaggacctgcagtcccagtgcttatgaggtagaaaaaggagaggcaggaattcatggtcagtctctctctctctctctctctctctctctctctctctctctctgagacagggtcttaccatgtagctctggctgtcctggaacttgcttttagatcagactgtcctgaaactcagagatctactagcctccacctctggagtgttgggcttaaaggagtgtgctggagttaaaggcacatgccaccataactggcaggagttataatcgctaatttattttgccataagtttatgaaacagatctattatctttgcagaaatgctgagttaaacataaatggagttataaaaaaatccagttcaatatcctgaaaacatgcaaggacttgacaagagagcctacccaaggcaaaggctacctgctgcagaggagccaagtctgtgagtggtgcatgttttcagtaaggctgtgtgtcagcaaataatgggagcagagctctccagtggcagccctcttccccagcagcgtcaggaggtcccctagagtttagggaccaccactcaggctcaattaggactcatgggtttgtttttcaaaaagaattctggaactaaactaaagaaagtggagggttggtgttttttttcttctcttttcttttctgtcaattctactggaactgagacttaagcgtgaggtcaggagaaagagtgtttggaactgcagctggacagagagcaagggcttggggccactcaaagacagccatggctgactgtttgatacaatagtcatacgagattttgatggagtttgaagttactatgtttccacaggatggttcctgggcacattttgtggcattacagtcagtaggaaaagtctggtccccagagatgttggatagatttactgtaaatagtattgtttgtgatttttctggcaatgtctgggcaaaggaatgagagcctgcctgggtcatatatgttcaggccgtaagtttgggttgttgctactttaacatgaaatatctatgtctgaaatgaatgtcaactctaggtcagcatcctagacaaaaatgttgagttcttgattctcacctgctgacaggctttttttttttttttttttttttgggatagtttcattgtatagccctggctggcctcaaatgcacagagatctgcctgcctttgctacctgagtgctggcattaaatactctgggatgaggtccccttttctgacttcaatctcccaaattnnnnnnnnnnnnnnnnnnnnnnnnnnnnnnnnnnnnnnnnnnnnnnnnnnnnnnnnnnnnnnnnnnnnnnnnnnnnnnnnnnnnnnnnnnnnnnnnnnnnnnnnnnnnnnnnnnnnnnnnnnnnnnnnnggggggatcaaggcagaaaaatgtagcaaaagtggctttcagaaatgtgctgttaaattggaatttgaaaggggagacagaatacttgtgaacataatctagtataaggggaagcatgactcattatgataaatactggttttgagacattcaatgaaagagcttgtgtaaccagatttcctctcagacaatggaaggcatattgaaaagccatgtagttaactgactagtcttgaaacaatccttaaacgctggtgctggtgtacagctttattcccagcactcaggaggtagaggcaggctgatctctgtgagttcgaggccaaccctggctaaagagtgagttccgggacagccagggctacacaaagaaaccctggctcaaaaagaaaaaaaaaaaaacaccccccccaacaaaaagcaaagtaaacaaaacaacaacaaaacgggcagttaagagcactgaatgctcttctgaaggtcctgagttcaaatcccagcaaccacatgatggctacagtgtactcatatacataaaaataaaaaatgaatcttaaaaaaaaatacagcagaatgtttgtacttgcgcggtagcttctctttttaaagatattgcacagtttcctttactattcacagcggtcctgtgtaaagtgccctgtgtcctcttgatccacagagggcagtgcagacactgggacccaccctgctaaggccaccactggactctggtgggatctttgcaaggttagaggactatcctgcagttcagctgactccagcttgagattcggtggccaggagcagagagtgactgcctcttcagattgcccacaggttgcaggggagtgccagcggctctttggggcgtcagagcgatctgggtttggatcctcaagccctgagcaaacccaaaccattgagcgttacctctggaaaatgttttgagtctgaattttctcatcaatagagcatatatgacattggttctcaatatgtgggtcctgaccctgttaagggggagttatcaaaagaccgttttagagggagtatatatatcatgcacatcatatatttacattacaattcgtaacagtagtaaaattacagttatgaactagaaatgaaaataattttacggttcggggtcacgacaacatgagggactgtattaaagtgtggcagcattaggaaggttgagagccaccgatctatattttgctttatttcatgttttactgacaaattgaagacatgatcgcttgggtcacagaaagcattagtgaactggcagctccaaataccaaggctttggaactctgaggagttccttgctccctattcttttcatttatttatttttccttgctccctattttaatggcacttgtttccatgaggttcacgtggaggaaaagtgagagggataggagagagtggagaggtttggcaacctcgcttaggttgcaaaagctcaggtcccaatcgcacctaggacgctcgcctctgctcactgcttgggggaccctggcaagaaagctcctggaatccgggaagggtgctgggaaggaaagcctggtaagcagggggcgggacccgggggcgggcttatggaaaacagagggcgtggtccgtggctcaggggcggggccgcgggcggggtccaacagagtttctttgctgcgcgcgccacgtctccctcagtgagcgtgtggaggagacggccggggagggaacagccgcgtggggcgggaactagctcctctcgcgagagttggcgacggccgcggcggcggcggcggcgtgtccgtgagagcggcgtgggggcggggaggagagcggcggcggcggcggcggcggcggcggtagcggcgtccgagctacgccacacggggccggggcgctgggagccgggagccggagcgcagcgcggggtcgtggcgacggcggtgaggggagcgcggcggaggaggcggagccatggcgggccagcagttccagtacgatgacagcgggaacaccttcttctacttcctcacctccttcgtggggctcatcgtgatccccgccacctactacctctggccgcgagaccagaacgcgggtgagtcccgtcggcggcnnnnnnnnnnnnnnnnnnnnnnnnnnnnnnnnnnnnnnnnnnnnnnnnnnnnnnnnnnnnnnnnnnnnnnnnnnnnnnnnnnnnnnnnnnnnnnnnnnnnnnnnnnnnnnnnnnccgctgtccacggggccggagctcggcggcgatttccggggctgtccgcccgcctgcgtggtccgcgggagtttggcggggatccgatccgcattgttctggacgcccctcgcctgccgcctctttgtctccccagcctcggctttgttgggtgttctttctggagggagcgggctgggctgggacggggggcgagagaagagttggccgagggggaataagagcgtgtgggcacaactccgcatccttcgctcccgtcaccctttctccctcttgtcccggtgtccccgctgcagctgttggtacagatgtttgggggcacccctaagctgggtgtcatgtttgggacttccaagtgagctcaccagcagcccaccccgtcacttcctccggttgcttttttcatttgttcaatcacatcgtgggggttggagagcgctgccgttattccttttataaaagcacaaataggattttctccgtttcctttcctctggagtttcctgtttacaacggaaaagtgcaggcatgaaggattaagcgggattcgttgatggaaggaggtagttggtggggtcgcaagctcctttgcttttagttctcgagtctttccacattaaaggtcgcgtcagaacgcaacccagtgcagtttccggggatgttaggtttaagattgtaatgttggattctgtgttgcactttactaagacatatggcaccggttattcttaaagctgatggcacttacagcaagcgcctaatgggttatttctggtggtggtaaccataattagtaggtttcgagtataacagcggctctgggggagagcgttctgtgtctgctaagttgcttttaggttgggtgtggtgatgatctaagttgtctaggttgtgcactgcagcttgggaagaattgttagcagtgaagctcaggacttgttacactttgaagagagagttcaatgtcctataaaattatctagtttcataatagaactcaagtaaatttaagataaagagcaagcaacacttgcatctcttttgtacatttcacaataagcggagtagcaacaatttacccaaagttactagcctccgtcgtttctcattctgggttgctttatgaaattttcacttcggactcttgagttctgtgtttccaagtttgtttagatatatatatatatatatatttaaatcagtggctgtatgtactttttggtgtcataatacagaaaatgttttttttttttccttgactgcttgcccacttaagccaattttttcagtattttaagttaaatgcccagtgtgatggctcacaaatattattccaggcctttgagaggtggaggcaggatgattaataagagttcaaggccactgacataggctgcatagtgagttcaaagtcagtctggcaacctgagagatgtcctctcagaaataggccggcaagatggcccagcaggtaaagggccctggcgcttacctggcaacttgattcagctccttggaactacaggttgaaaggaaaaactgactcttaagtagtcctctgacgacctcagaggactacatccactcccatacttagtgattaaataaaaagaaaaaaagaaacaaaagcaacaaggagggagggcccacttttcagtagtcatttgttcactgcttttagaagataaaggggtgttgggatggtgggttgaatataaggtcttctttaaaaggtggtgaggaacttggtatgggacggcacatttctttaatctcagtacttgggagacacaggcaggcaaaactgagtttagagtctttgccatatttgatatggcaactgaacttattttgtgaacattattagtggaatctttttgtcttggttttaatgttttgagtggggctaagtatacttaattcatactccttttaatagcaaaaggtcctctgggctctttgcatattggctgataaactggatctatagaatgacatgaagggtatagatttccttataagagtgattctcaggagaggctacacggtaaaggaactcaggaactcagggagctcgtatgtatatacggtactttccgtactttgtaacaaaaggtctaaattgtaactaaacttgagagggctgccctgagaactttcttggaattggcttttgctggagttagttgggtagtacatttgttttggtgtgagctttttgctaaaaaacaaaacaaacaaccccccccaaccaaactacccctcccaaaccaaaaccaacagaaaaccagaaattaggaccagagagttggcttagtgggttaaaagcatttcccctataaacctgaccatctgagtttgatcctggacccttttgggagaaccaaaactagaaacttgtcctctaacctcacacatagatactggtctacatggatattaccatcatagaataaaaacaagaattaatgccctaacctttttgatttccatagcttaaagaatcacttatagagcagtgcttaaagctctggtagttgaaagtaatactttgtgtcaagacaactcagattttgattttgatttatgtgtatgagtgttttgcctacttgtctgtaggtgtaccatgtgagtgcctggtgcctgaggagacagaagatggtatcagatcctcaggaagtcaagatagagttatgtatggttgtgagccactctgtgggtgctggaaacagagtcccaggtcctctgtgggagcagaaagtgctccctaatttataaaccatctctccattcccaaagacaagtttaaatgcagtttataagcagtatattgtagttatccattcatagattccaaagtagttactgtgatctgagtctttagtattttagacattcttaaaattctgaaatagttgcagttccctcagccacttcctacacatatacagttcccaccaatactgtactgtgactttgtatgtgcattgccattttattctttctgtaagcctacatttctggtttgatttagtttggcctcccaaatgctgtgatcaaaggcatgtgccaccacctatgcacagcctatttatttataccttaaaaaataacgtttgaatggtgtgtgtgtgtgggggagtgtgtgtggtgggggaagggtagtacgaatatgtgagggtgcgttcctgtggagtccagtacaaggtttcagattcccctacagcaggaattatctaccaggtagtggtgacctgtctggtatgggtgataggaaccaaacagagattttctggaaaagtgagcacaaatgctcttttttgttttgtttttgtttgtttgtttgtttgttttgaggtaggatttctttgtgtagtccttgctgtcctagaacttaatttataggccaggctacaaactttgcagaaatctgcctactagtctaatgagcactggggttaaaggtgtgtgccaccaccacccagcctgggtgcaaatactcttaatctgtgtgtgccatctttcagatgtctgtttagtttcagattccctgacctttttcaaaactgcctgattttgaaacctggcctggcaggttactgtgtggattttgtatttcagcatggtcctctgtaaattagggatagagaagtctctttttatagagttagaatggagattaaactgggctttatggtaagtgttgagaacagtgtttgacgtgcagtgatactgttatcacacagttttgatttattacttaggtactcaagtttttttattgtttgaaaggttagtgaaatgttttaaaatgttacttgttttctcaactagcatataagtcaatcaccttttatttgaggatgtgagtagttccatttatatcctttagtactataataggaaaatcccagtttaaaaaggtttcagatctagcctagtctctattttagttaactctgaacttcaagcttcctctcctaggggttaaaataatagcttgccataaggaatcaagaactgggtgctggggacatgggtaagagcactgactgctcttccgaagttcctgagttcaaatcccagcaaccacatggtggctcacagccatccgtaatgagatcatcctcttctggtgagtctgaagacagctacggtgtacttatgtataataataaataaatctttgggctggatcgagcagggactgagcgagcagagttgaccagagcaagtagaggtcctaaaaattcaattcccaacagccacatgaagactcacaaccatctgtacagctacagtgtactcatatacataaaataaaataaataaatcttaaaaaaaaaaagaccctcttaaaaaaggaatcaggaactggttatgaggctggcttgtggtgcacacctgtaaagccagcatttgggatggaggctgaggtaaaaggattgtgagattgcaggtcattctgggctattaaatgagacgttatctcaaaaacagaaaacctcgaaccaaccaggtctcccaaggtgtttagaggagggggaaaaaaagggtatgtgtaaatatgcctgcaaaactacaatagaagttcttccatttggcaaataatgttttcagtttttttttttgttttgttttttttgttttttttttttcttcgagacagggtttctctgtgtagccctggctgtcttggaactcactcaccttgtagaccaggctggcctcgaactcagaaatccacctgcctctgcctctcaagtgctgtgattaaaggcgtgtgccaccacgcccaacatgttttcagtttttgtagatgctgctgctaggtgatagatagattgtttccagtcttagtgtttttttcttaagctgtaaatacccagtgcagaaaaacacaaaggggctagagacatctctactagtacaagctgctaagcttgatagcttagattccatatttggagcccacgtggtagaaagagagaactgactcctgcaggttatccacaaaagctgcatattcaccatggttcctacacacacacacaccattttttttttttttttttttagggatggatgttcagcagttcttgcagaggaccacagttcagttcccagagagggtccaacacattcttctggcctcactgtgtacctgtatgagtgaacaaataaatgaatgaagacatgatgctagagagtttaggatagggagcagggtatgctagccagggtggttctgaaacaggtactggtgatactgagagaggctggtggacagcatcagcttggctgtattcacctcagcaatttgtcctctgagtttgaggtatgatgccacatatgtgccccttcaaaaaatgaaatacacctttaaaaactaaaaagcatgaaggaatgaacagaacaaaagctgatcttttttctcttatagccatgatcttattgtatttaaactatgaatccttccactgaatattcctgctgtgcccccaaaatttttggtatgtgctgttttctttttttcttttttcttttcttttttttttttttggtttttcgagacagggtttctctgtgtagccctggctgtcctcgaactcactctgtagaccaggctggcctcgaactcagaaatctgcctgcctctgcctcccaagtgctgggattaaaggcgtgcgccaccacgccgcccggctgttttattttcattcatctttaaagctttccaagttctctgatgtgttagattcttgattatagttctattaaattttacttttgttgtcattttacttgtcactttttaaaaatgtcatcacatgtagtcacatgaaagataatttgtggcctaacatacaggccagtcccagaaaatactatgtatggggtaactgaatgtttctgctgttggtttgtgcatgactggagagaacttgttttgttttgttgttttttaaatattgggtctctatttgttgttagcagcaagctactccagaaacacctgaagagtgacttgctccatggacttggagtagtgtccaaggccaaaattggcaagtttatcacagtttaatttgaagtcctccttcaaaagatgtaagccttcaaaacagttcatgagatagatcctgccagtgtagtcgtatagctgagggagacagatcctaccagtgtagtcgtattgcgagggagacagcttctgccagtgtagttgtacagctgagggagacagattcttctgttgcgtctccatcttcctgaattctctgtgaggatcattttagaaatagtcttacttgggctgtccccacttgcccctccaaggaagagttatagaactacagcccttttcacctcatctgtttattagtcttaaggtgaggtgtgcttaatgctctttgaatagcacttgaggaaatgtgctacctatattagaaaactgagacctcagggaggtgagaggtattcaacttgcctcaagccattagctgtaagattggatgttggacccaaattagtcttattccaaagcttctcttttagttgctactttgtactcctttctgtaattaagtaaacattgcatgttataataatatcaatacagcaagtggaaagtgctgaaggagaacggaatttctgttttggggcttgggcaaatgcttcatgcaaaggtgatttaagatggatcttgaaaagaaggacattcttaactaggggaaacactgcaaaagcatgggtgctctgtacataagtgatgaggacttgaaatgtaacgggcactttggatcaagtgagcagtttggagttgattctttgtcctattattgacttgaacagtagagcaatgacacctggctggtgtgggttttgtgaatctagtggagaatggtttggaagttgggggaccctaagtataactgagagtccatctcagcttatttcattgagatgttaggatttagaagtataactagatttaaaaaattctgagatagtttggactgtttatttcttatatatttatttccccttaactgatttctgttccctttaaagttatttggtgattgcagttatagtttgggaactgagtgtagtgaaaaagattgggatgaacattaaaaaaaagaaaagaaaagaagtcaggggctggagagagatggctcagcgagtaagagcactgactgctcttctgaaggtcctgagttcaattcccagcaaccacatggtggctcacaaccatctataaagagatctgactccctcttctggagtgtctgaagacagctacactgtactcacatataataaataaataaatctttaaaaaaaaaagaaagttttacacacacacacacacatacacggtgtggggagggcggacaaggacgctctgcctcctcctccttccgtgctcagcctttagatgccactttaaaaatttcctggatttagctaggctgtggtggcagagatctcattggttcaaaactgaaacacatggcttaaagtcacaaagagcatggtggtggtagtgtgtgcctttaatccctgcacttgggaggcagaagtaggtgggtctccgagttcaagatcagcccagtttactgagggagttacaggacagggttgcatagagaaactcttgaaaacaatattttctgggtctagtgagatggctcaacaagttttatgattggaatttgaattctggaacccatatgctagaaggtgagagctgagttctgcaggtttatcccaacttcacatgcatattcctgtgccacccccttccgtaaatacaaatgtaaaaaccaaaccgaaacagaccaaaaaaccaaaaaccaaaccaaaacaaaacaagaagcaaaacaccatttcccatcattacccagaccctttcttttggcttttttgagacagggtttctctgtatagccccgactgtcctggggttcactctgtagaccaggctggcctcgaactcagaaatcacctgcctctgcctcccaagtgctgaaattaaaggcatgtgccaccactgctgggtcagactctatcaatgagaagtgttataccatgcctgccaaggccacactgtttccttgaaagttcatgttcatactcttgaaaaaaaatactccttactgtttgtaattgtgttttgtcatggatgaaggaattttgtcatatagattccaaaattttttcagctttggacttttgatcatgtagttcaatctaatagttgttgattagtagtattcactggttgacattcgcaggtacagaaaacaataaaatgttgaatacagtaaacatggtcttgtttgggtaacttgcatgaggtatagttttagatgcctgaattaactctatccagagtactctaaagagagggtaagaggaatgaaaacaaatgctgtggaggttagctggatagagtattagcatctagttgaggtaatagtggcaaactaaaggttagaaaagttttgtcttgttttgttttgtttgtttgtttggttttggttttctttctctgtgtagccctggctgtcctggaactcactttgtagaccaggctggccttgaactcagaaatctgccttcctctgcctcccaagtgctgtgattaaaggtgtgcgcgaccaccgcctggtggttaggaaagtttaaaatatttgtatttgtttttctgatctatttttgtgtatatgtatattgcctgcatgtatgtatatacactgtgtatgtgcatgcagttagaagagagcattgtatttataggcaagtgtgtgccatgtgggtcttggtaatcaaacctgggtcaactgggagagcagtcagtatgctaactgctgcccccagagaaggttttatgaagttggtggattttgtggggcaggatttgatacaggttttcactatgtatcccaggctggtcttgaacttggcagtccttctgccttagaattaagactggagagataatccagtgataaagaacactgtttgttcttccagaggacccatgtttgatctcagcacccacaaggcaacttataaccaaccataactccagttccagaggatctgatattcacttctagcctctgcaggtatcaggatgcaagtggtatacagacagacatgcaggcttgaataatagtgataaaaaaatagtatgaacaaatgtgggatgtgttcaaaaggtacatcagatccattgggacctggcttcatgaagtgaaaaaaatgtgaaaaacacaactgaagtcataaagccccttgtatcaagcccagctgaagagtttatgtcacttttgcaccgtgtgccagtcagtagactcttccataatgagagcaaacagaatctaagaagctgatctaaacagctgtgccagacatgctgctttgaagtacaacctctcctggcatatatgtctcttacaatcctaggtgatttcctccccccccccccccccccctccggggtcagggtttctctgtgtagccctggctgtcctggaactcactctgtagaccaggctggcctggaactcagaaatctgcctgtctctgcctcctgagtgctgggattaaaggcatgcgctaccaacgcccggccctaggtgatttttatatctgacttgtttcacttgagctttaagcttttacattcctgttattaaaactaagttgtttttatgacagaataatattttaccagaatattctatatgttgtacatctgttgaagagtacatgaaactgtccactcttaggttactgcaaatagtgcagtgagcagtggtatgtatcagggtgtttggacgtgtttttttttcccctaacataatatttttattgattatttgggaatttcacatcctacactctgatcacactcactttgcagtcctcccaggtgtccctgtatgtctccactctacaaaaagtccaatttgtgttgcttatatacttactcagtggagctgccccttacagcaaaatgagtccttccctctctccactccccacctctcccaagccatcatttggattcttatgagcactttcgagaaggtttttaggagtggaattgctggtcaaaccccgtgtttaccttttggaggaactgtcagacttgtccacaatggctgcatcgctttagattcttgccagcagtttttacatagctgcactaatgaatgcctcttccctcctcccttttgtaatcgtggctatcttcatggatttgaagtgatatagttttccctaattcttaataatactgagagggtttgtttgtttgtttgtttgttttgtttgcttttgttttgagtttttgttgttgttgcttttttgtacactctagccatttgtatgtctattcagatcctatgcccattttttgtttgttttttatttttgtgttaatttgtaagaattatttatgtattcttgttagataaataattgcaagtattttgtctcattttctttgtactttctttcttggtaatgacctttaatgaaccttaaacccaaaagctttaattttgttaagtccaatttattttatttgtttatattattggaataacactgccaatttcaaggttatacaaatttaatcatttttttctaagaaatgtaatggctttaattcttgaaacttttgaatatttggaattaatttttggttcaaaatcagatgaaaaatgagttcaaggttttctgttacaactgacctgcattgtgcccctgagcttccctggagccctggttctgaacacagttttggtatatactgcctgaaacactgcagctcattcaaaactcctgtaaatgctgtgttgttatagtacatattttctgtttttagaggcccataatgatttagttttggaaaaaagagttaatatttctgttattccttggcatgttaagtacaagattagcatatgtttgtattgtattgttagaatatttttaaagaatttactatttttatgtggtatatataagtgcttatatgcatgtgtgtttgtgcctgtggagttcagaagagcattggatctggagttctggatagttgtgagccaccatgtggttgttggaaactgaatttgtgttctctggaagagtgctcttccctgctaaaccatttatctagcccagaatgtttgatttaaaatttatttatttatttatttattttttaaaagatttatttatttatcatatgtaagtacactgtagctgtcttcagacactccagaagagggcatcagatttcgttacggatggttgtgagccaccatgtggttgctgggatttgaactccggaccttcggaagagcagtcggcgctcttaaccactgagccatctcgccagccccctaaaatttattctattttatttagatgtatgtgtgtgtatatgtttctacagaggccagaagagagtgtctgaacctctggagctagagttaggtgtaattgtgagcagtttgaaatgagtggtaggaattgaactcaggtctgctagaagagcaggcagtgctcttaactcctgagccatctctcctgatcctggaatgtttggcttttacagttgctgtgtggtgagttgacttgagtttcaatcgaaaaaataaaaccattaaatgaattttggtttgggattaggacaaatttccaataatttctgaaatggccttaagtacttagtaaatgtgtagtatgtatgcaaagtatagttatcagccttgagggttataaaactcaaggtttcaagtaacattgaaaatgctctatattctgtagtattaaatattcaaccaagactaaaaataaacaagcaaatctatcttattagtatgcaaatgttaaaaacaatatgtatgccaagaagtatttttaattttataatttatcaataaatacttgaccagtgtatgtacttattttatacacatatgtccagggttgtgtaaaaatttatctggaaaggggtcatgagccttccctgtgtttatgaatccttcctttctcagtagaatcttcactaacttctctgtgaagaccactcttccctcacgtcccttgcatgttactgtttgctttgcctgcagtgcttttcctctggtaccacctcctctatccctattttctttgctcaaatgtcatcttcacagcagtatcttctttgagctccctttgtcaaatttagatgctctgcctaccctcaatttcctctgctgtgtttacttgtttgttgttatttctttaatcctctagactatatagtgtgtagagttttgagtctcatcccaggagaacccccagctcttctaactaatggaggatgaccataaacttgtcattctaactcgatctcccattgatcttcctgtatatgtctcagaaatgctgttacagacaagtgccatcatgcctggtttattatactgtactaagtttggaacttatggcctcacatgctgggcaaacatcctaccagctgaactatatgtctggaccaagaatgtttttgttgtatcttttgtgtcctaaagggtcctggtacatagtagatgttctctctaagcactattttaaaagagtttatcattttttacatatttatatagtacttaatatactccaggcagacagaagagacatttataattaatgggtaagataaattttcagccttcaacagccttgagtatagaagagttaaaattggctttaatattggctgcttaagagtggtggttccgggctggtgagatggctcagtgggtaagagcacctgactgctcttccgaaggtccggagttcaaatcccagcaaccacatggtggctcacaaccatctgtaacgagatctgactccttcttttggagtgtctgaagacagctacagtgtacttacatataataaataaataaatcttaaaaaaaaagaaaaaagagtggtggttcctgccagtctgtggtggtacacgcttttaatcctagcacttgggaagcagagacaggtggatcttagggaggccagcttggacaacatacagtttcagggcatctagggtgctggtgaaaccctatctgcaaataaacagatcagctaattatataaaatgaaaatagttgtggagtggtggttctgggagttggagatgattttacagctaagtatgcttactgcttttgttcaagtttggttcctagcaccacatccagcaagtagctcacagccacctatatccagctgatgccctttcctggcttctttgggttcatgtacatacctacacataaacacaaaaataaagtcctttaaaaaaatagtggttcatgcatgttttgttgttattcctttattatttgtcatacagtataacacaattttcctttgtgtgtttgtttgtctttttatgtcagggtctcatataacccgggctaagtgttttggaggctgaaaaccaaacagcatagtgctgactgataagagctctatggtagttctctgagtgttcgtagaggaaggatcacatcttggaactagaagccagagtgatacaggtgccaccatctcttcctaagccatgcccctagtggtttaaggatctctcagcaggctctcctcttagatctcatatcacttcccagtattgatgctcagaagatcaagttttgatactcttgccaaacttaatttagtattttgccttttcactcttcagcacaaaaccggtttactattttattctagtacttttttttttttttgtaaactttgtttcacctgacttttttttagagatagcatataatcagctgttttaaattcctttttgttcctgaattttatttatgaattcatacaaaatactatagactaatgcatcttaattctcttcctccccttagtcttggttaatcggaaagtcacatatctaatagctctttttgttattggcaacaatatgaaactagtcttaagttcttttttctagttttttttttttttgttttttttttttggtgcatactttttggacaaagttatctcagaagtgacagtaatcttgctctgtttgatggtcacaaaccctccatcgagatttctagcttttctgtccatcttgatgctttcctggaggaatgaactaactgttcaaaattggcaacatccacagcatttacaacagaatgtacttacatgcttaatgctatagacttcattgaaagtctaaatgaaaattatatacttaacaaatactaaataccaaactgttagtagaatagaggagtgaacaatacagacatccttgtactgatggttacttcctgggagttttgagggagtaattggcattttacatataaaccattaaattgccctataacaagtgttgtgtattagtgttctctgaaggccatcctgaagcattctcaatggttgagaaattgaatgtcaaagaggagcctaatcatttactgttctatgttggcttgagaaaatcctattttaggctgagggaacaattgtgtatgaaagcttttgagacagaaaagtgtttgacatgttctaagaaaaaagattaaagtggcagagctgtggcagatgaggaaaatagtctgggattaagagtcagagagctgctctcgttcacagatgtgtctataagaagcttggatttcatcttaagagcaatagggagctattgaagagttttaggaagtgaagccataggaggtcagatttgcaatttctttttattaaacacaaggattttttaaaaagttatttactcaacttttatgtgtctgtgttagtgtatatcacatatgtgtgggtgcctttggaggtcagaggttggctttggttcccctccagatggagttataggtggttatgagctgcttaccttcaagggctagaaacaaacttgggtcctcttggaagagcagtaagtacactgctttgtctagccctgattttctgtttcttaataagatgggaaaaaaagttctgataagcttgattgcccttttatggataaagtcgtattttcataaaatgtttaatttataaacttgtctatttaaaaccatacactataaagtatattacattaaaatacatttttgttcctttacattttaagaaacagttaccagttttagatttatttcgtgagtgtttttgctttatgcatgcatgtctggtgctaatggagacccaaaagagggtgttggatcctctggagttagagttgggtattgagaactgaacccaggtcctctgcaggagcagtaagagctctttaactactgagccatctttttggcctctcaagaagtaattatttccaagttccctgtatattcaatgttactgtcagcaaaggtattttttgtttgtatatgggtgttttgcctgcatgtatgcactgcgtgtgcactacatgcatgtgtagtactggaagagaccagaaaagaagatccgatattttggaactggtattacatacagatggttgcttgctgccatattgatgttagacattgaacctgggtcttctagaagagcaggcagtgctctcaattgagccatctctctgaccctagtctttttttttttttaatccaagtctaggttggcctcaaactcctaggtttaagtgatcattgtgtctgagtctcctgcttagttggggttctaggcaaatagcccagtgcctgtctcattaaagctattttgagtcacctaacagtttttttttagaaaactcttttattcagacatgttggcacataactatagctcactttatagaccagactgacctggaactcacagagatctgcctgcctctgcctccagagtactgagattaaaggcatgtgctaccatgcctggctcaaatgatttcatttgtattagggatgtagtgcttttgggtttgaatgtgatcttagaaattttcctataagtgctaaatacaacatattacattaagtatatgtactaaaaccacacactgcattttttaaagatttttattttatgtgtagcttatgtgttatgtgtgtgcacatgtatgtgcacatgtgtttgggggcctccaggaaaaggtattaggtctcctggagctggaatgacaggtccttgtgaacactctgttgtaggtactgggaactgatctcaggtctgcggtaagagcagcagatgctcttaactgatgagtcgtctctcctgctccagccatggtatttttaaagtggtttttaaacaaaatttgcttacagtggcaaccaatacttccagttgagaatatacccctagggataattatgtcttttattgatttgcctttagatgacatgcaaaaaatggcagacaaacattaactaagatcattctgagttttttcacaggtcttttgttgttgatgtttggctttttaaatgttttaaaataaaattctcattgtatctaaaggatacttttagatgattgttgtagaaaaacttgcttgtttgttatattgatcacttctattgctgaaatgaaacactgtgctcaagataatttatagaaggaagggtttatttggcgtatggttccagaggaataagagtctgtttgttggggaagcatgggaacaagcagcaggctagagcaaaaggctgagcctttacctcttcaactccaagttcaagaagcgagagtaaactccacaatggtgtgagagtctttagattttcatagcctacttccagtgacatacctcctccaacaaggccacaccttctaaacctctccaaatagtgccatcacttggggaccaagtatcaagacatcacccattttactttttaatcgatttaaaaaactgtagacaatgaacaggtattgtccaagtgagttgaaacactgtcagcgagatgccgagaggcgtcaggtaactagaaaactaacattctcgaacttctcagaatgttgaatataatctttaattcttattactgttttctggacactagaagatttagggaatgcttaaggacttactactttagaaaaaagtggcacatttttgatcttttaattgtaattaaataaattgcatctatcattatcttattaaggttagtaacttgagtacaggtatgttctaagaattatttctctgtttttatggtctttaaactatcaaattatgtactgatatacctgtttaactgaaaacttaaatcagatctctttgagagtcttatttattaggtgatggcttttgctagttaggttataacctatatgattccttatatttaattttagaaactatattataaaaaacccttgtaaatgaataaaaaatatatatcaaaattaaccagaccaaaagtttatacaatgtagtgaatttctatagtaggcatttgaaatgtaacctgtggagttttacattaagttttacactttaagtatcaaatatattttatatacttatccaccaccaaacctagcaaatccaggcagaattagaactagaaaaacaattagttttgtatcctctttcataacatgtatctgtaaagggaaaacttgcttccttttctgtaaatgtataatttctttaaaaagcatgtcttagggtctggagagatggctcagagattaagagcacttatgttcttgcagaggactcagggctcagttcccagcatccacatgattgctcataaccacatgtgacctaatatgtaacagtcttctataatattcattgattgatgtaaacattctttcaaaagtgtaagttactatttttagggtccaagggcatggcttgtaaggtatgtattttgcacagctgaagaccatgtgcatgttcttttgaccagggacattaggagaaacttcctttgattagattaagctgtctggttcatatcatagactttagcattattattattattattattattattattattattattattattattatacagtcttataaggggatttttaggtttatactagaaaatgggagtccattgaaacttagtgaaaagcagattaaaactttacaatggcattactttttaaagttcattatttaaccatgaaagccagaaaatttaacattactgtatcttactgtcagacctcattgaggttttatcattggtctcagtgatgtcttttgtagcaaaaattcaagttctgaactatacatgacatttagttgacatgtttctttagtcttccttttagtctggaatagttctttatctttccctgactttaaatattataggccaattatttaatagaatgaacttaaatttgggttgtctggtgcttttccatgattggattcagattttatgtgatgagcctgtcttttcattgcatttttgtcagatggcatatgatttcagtttgctcttttactggcattattcattggtcacttaatatgttgtctgtcagatttttctgtattaaatttttgttgctgttgtaacagttcatcacatacagtggcttaaaacagcacagatttaatcttgcatagttttggatgctacaagtacaatgggtcttactagaaagtaatgatgttcctgggggcgaggggaccttgaagtagaatttgctgactgtttcctgcttctagagacagtctatattccttgacttgtggccccttgctcatcttcaaaagagcatcagtcaaacctttggtttctttttttctatcattttctgtctttagctgccatgtctctctgagaagcactatttgattatagttgagcctactccaataacttccccattttaagatccttaattcgcttatctgaaaatccatttgtcattttaagattacttgctagttccttgcgtgaggatgttgccatcttggactgcttgcttccactttggatagttacccttttcctctgtggtaattaatatttggtgggaaggtagagagatgtttggtttctgggtattgagatttctggttccagttgtttagaggccaaactctgtataccatgttcactgctactgggattttgctgcttagttctacttagtttacagaggtagagaatacataggaatttatagagagagcagtacctgtacaaatatagtacttcatataggtactttcaattccagactaatagtccaggcttagtatcctatcttttcatatttgtcattatcttctctgacatggaaaagtagactttagcttttgatatattaacttttttggtcagtctacctgcgtatataaaactccttctctgttaccacctcttcttctatttggatccttcttcattacattgatactcctgctaggtaacatgtggatacttctattacactatttagttagtaatagggcaatgaacttcctacctggtggcttttgtttttgtttttgtttttgtttgtgtaagggtgtttgttgttgtttttgtttgttttgttttttgagacagagcttctctatttagccctgactgtttaggagctagctctgtagtccaggttgctggcctcagattcacagagatctgcctgtctatgtctgccttcccctcccaagtgctggtattaaaggtgtatgctaccacttctgtcttataaaagtatttgcctgagtatgttttacaagccacgtgtgggcagttcccacagaggactgaagaaggtgtcagctggagttacagacagttgtgaactgccatgtgggtgctgggaattggaagaacagccagtactcttaaccctgagtcatcactctaaccccctcccccccattggtattttaagaattcaaaaatatgcgagagatatatgtgattcatatccatgccttggtatacacgtggacattaggagaacctgccagagatacttctctacttctaccatatggataccagggatggaacaggttggcattgttggtggtcagtgcctttacccagtgaatgcctcactggccctgtgtgccaaattgctttacttacttggtatctcatgtaaagagttcagttttgtatatattttaaaaatatggtaaacagcaacaacaccacccctagaaaacaaaacaaaaaacagaattagcccagctacacgatcctacctttgttgggaacattccaggcatcatagctaggagctgtggaatttttaagcatgtactttttttccccctaaagatggtttggcttgctgaccttagctgcacttcattcatagagcttcttcccagcccgttcgaatgctgcagctatgcccacagctatgtccacagctatgtccacagctatgcccacagctatgcccacagctatgctctgcactgctgagccatctttccagccctgtggactttttttttttttttttttttaaatctagggaggaattatttaatacaagattagtaaaacagagcatgacatttttaggattggttaaaatttttaattgaattgcagtttttcttttttttttttaattaggtattttcctcgtttacattttcaatgctatcccaaagatcccccatacccacccccccaatcccctacccacccactccccctttttggccctggcgttcccctgtactggggcatataaagtttgcaagtccaatgggcctctctttgaattgcagtttttcatagtgatgaaaataacttttgtcacaactcttacacaaatctgtcttaagttcttacagattgggcctacttccccaataaaacaaaataattaaaacttgtgatactgaattttactgtccaataggactttggctgtcagttgattttcacattaaaactataagttctgttagttttatattttcagtagatacaattctgaaccttcttggttaaaatatatcttaccaggtaattatttctatacttgaagaatgttgttttatccttggttcctaaataaccatattttaactactttatactttttgttcagtacaaggagagaataggagtgaaatgctcagacaactgattatatgaccaagacattctatgtttaaattagtttctaaagtttcagagaagtttcacgtgaaaaaatacttgttttttagttaaaaatttctaggtattacttgttttacagacaacttagcatagtttatgaatttttatagggattatataaataggcagggcatatgtttcgacaagaagttagggtaataatgaaggttagtatgatattaactctggttcagctttcattgtaaaaaataatttaactcgtcttttctctcttgacagagcaaattcgattaaagaatatcagaaaagtatatggaagatgtatgtggtatcgtttacggttattaaaaccccagccaaatattattcctacagtaaagtaagtaatggatttcaataacaacacatactgagtacttattcttttctaggtttcatagggaattggaggatggcttacatgtgtggctgtaaagaaattgtggcctgtgagagaggtgaggtttgaatagtaagcttgagagctgtgaatagattagaagtcaaatgaaaaggtatgtagtcagctcttatctgaagactgtatgccatgtgttagaattggagttttatgttgaggtctatatggaaataaagattttagcatgatcagatgtgcatttcaagggataactgaagtttattagcacatgtgtttccaggtgcttacgatgtttatttgattctgtatttaccttcagggtgtgatggttttccttaggctgaggctaagaagtgaactgatgtggccaagatcatgcagtaaacagtggtggagcagagcctcctcccctttattttggcaggttatttgcttagagcagtcactgggatgtgtttaactctgtgaggctttacatcaagtctggaattcagagtcaccagattatctaggacagaaactggaagttgctactgctgaagagtgtctggtaaattactggtctacctgctcaaaagagagacatgtagtagtttcaagtatgattttaaatgatgaggattattttaaatacagttgtgttacttcaggggtttgaaataagatgattttttttgagggtttttgcatagagagagaatcttagctttggtggtcttactcagtgatgtaaagctaaaggcaaagttagctttgagaccaatagcactttttgctcacttttaattgctgttcattttcattttaagttaagattttacacacacacacacacacacacacacacacacacactttttgagataggtcctcaccatgtagccctgactggcctgaaactaatagatcagacaggcctcaaactcttaggagtccatctgctgctgtcttcccagctcctgagtggaagtttggaccactactcctagctttaggccaatctttttatttctaagcccccaccttgcttttgctcaatacttgaggcacttaaacctccactcaatttttatttttgttttatttactgtgtgtatatgatgtgtatgtgggcatacgtgtgccactcactaccttattgtggaggacaaaggacagctttgtgggttatttcttttcttctacacctgtctgagggttctgggaattgagctcaggttgtcaggcttgtgaagcaggtgccatcctgtcagccttgaacctcagctttcaaggaaaaaatgttgaaggcattttcagtaataaataatctttaattccaaatgaagattagggcatgacatttaaataaagttagaagttatgaaaccttttgctattttatgctatatattgcttcttttctgacagtatctttgaaacaaagccatgtaatttctggaagttacttccaaattacatttaaaatatggctaaaaaacagacaattttctaagttaatttaccgaatctaaatgtagggaaatatttgtctttttggagaaaccatatagtcttttagaaaattggacacatagcataaatatggttttcttctttgctttggcgctctgaaaattagaatgtggttttatggactgggatagtttttgtcagctcgggatcccgccatgagccttctcttctcttcttggctttgataatagatgccaaatgtgaagagtttaatagagtttagcatatctggcatattttgttcttttccttatgtgtgctttgccttttgtggtttttcattattatctttgctttatgatgtttgttttgatgacgagtcattgtgtgtgaaaaaacattttcaagtgttctttaaagattattgggagcactagtaaacttcagctttatgtttagatttttctaatttaaattatctttattaattttatatgtaattgttgtgtgccttcatgcatcaggtatagaaggtgttgatgcactgtgattaacaacatagatatggttcagagacgtgactcttaggagggattgcaaaaaaacaattttaactttagtaaatatgttagttcattcttttctttgttactataaagaaacaagacttatttggcctatttcagttttagaggctgaaagccccattcatttgtgtccttggagtagcactacaacttggtagatgtcagaagggcctgtctgtctgtctgtctgtccatccatccatctatacattcacacatatattcatacacatgcatacatacatatttgatatttagaagagggtgtcatcccctgtaactggagttacaggcagttgtgagccacctgatgtaggtgctggaaactcaacttggtcctttgtaagagcaatatgtgctcttaaccactaagccatttctctggtcccctagaccttatctcttaaagatccactacatctttttgtgtatggtgtgcaggtgcatgtgtgttcaaatgtgagtaggttcataactacagttaaacatggatatgtctttgtatggaagccagaggttgacatctggtattgattactctctaatttatttactgaggtgtagggagttttaggggttttttgttttgttttgttttgttttcctgttgccagttacagtcatcaagggcagagagaaatatacctgttttttcttcttctaactagctttcatctagatttcttctgtttttatgtagctcaggactttctgcctagggaatggtacttgcctacagtaaagctgtgtcttcctttgtcagttaataatcaagatgattcccagacatgttcataggccaatctgatctaggcatttcctcaatcgaagctctccttttaggtgatctagattgtgataaggtaacatttcaacctattatacatagttgtccctaaacatggagtttgcctagatagtctagccattttgtcccagggatctcatctctgcctcccaagcactgggcgtttggtgggccgtcatacctgcttggtttttatgagggtgtatagagatatgaattctgattctcagccttgtccactgaactgacaccccaaccctggttctaccacctttttccactctttttctaaaccatagcagtaaagactgggagaagacttgctaagagcagaagggctcctttcttggcccaagacagagaagtccttttaagtgggctataagtatgggtaagggtttttttgttgttgttctagtggggttgaaccttgttaatgctaggtaagtgttctgttgttgatctatatccctagcctttgagatttggggaagagttactaataatagcctatagctaccatgaattgattattgtttactgtctatgagtcactttcaaagtccttaacattctaaacctcatttaattgtcagacctatcatagaagatgaatttgagatgtataaggcttaggcagcttgccaaactttctttatttgatgtgtaatagtggtgggagttaagctagtgagttttgctttgtggcttattccttgcctgtacatggccaggaaagagatggggaacatagggttctctctcctctttgggcatatatgtaggcatttagataggctagaaaacagcttgaagttatatattctttttcttttttctttttcttttttttttttttttggtttttcgagacagggtttctctgtgtagccctggctgtcctggaactcactttgtagaccaggctgtcctggaactcagagatccacctgcctctgcctcccaagtgctgggattaaaggcatgcgccaccacgcccagcgaagttatatactcttataaggtttaaaatatgtctggggatggtacttattattgtagagtgttggccaactatgctggaagcctttggttggtccctagcattctataaaacaggtacaatggccatgtcttcatgattagtacttgcatggcttgtcaagtcgggagaagccagaagttcaagatcatcttcctttatatagcagctggggctacatgtgtgtgagagagagagagagagagagagagagagagagagagtgagagagagagagagagagtgagtgagagagagagcaagagcgtgcatttggtttagaagttgttgttcaggtacacaaggaatttgcagcaagttaaaggttgtttgtgctgctttgtggctgtaactgtgttctcttcatctttggtgaaggattgcttttgaaggatagatcattttagctgagttgaaggacaaatatagagtttgtgtaggtagacacacatacatggggactgagaatttgacaaagatccaagagtgcaaattcatgattgtggggaaagcttatgaaacactgaagtataaaaagtgtttttgttgaaaatcaggtaagtagaaaaatttaagaagtgcctagatgattccagatgtaaaggcctatttccaaatgaatgataagtgcattcatgctaggttcctgccaaagagcagaagcacaggctgaaagtgtaactaagagttcttgcctagcatggatgggaacaccctagatgtgcactctcagtgcagtgatagaaaccaagagcacagaggattttttcctttgttcttaaaactagtcattctaatatttatcttatatttatatctaacaaatcctattaattataacaaattgtgatacaaagggtctaaaataacatctctaaaggtaatgactacttcatactcttatttctaatgtttcttatagatattggattatgttttacctagcttgaagctgtttttcctttcaaatttaatgttaaaaaaatctttctctttcatgccaaattttactgtcagtaaattcactgtggttgaatgatcaaaattaattttttttgtctagtaattcattgatagacattttaagatgtttgtatttggtttatatgtattatattacatatataatatatgtgtacacacacacacacataacattaagccgggtggtggtgagcacctttaatcccagcactcagggcaggcagatctctgtgtttgaggccctctgatctacatagtgagttccaggataaccaaggcagtacagagagaaaatgtgctagctataaagtgttcttttgtgtggctacatcacggtttgactagtccctctaaagtagttattgctgatggacattagaatatttttaagcttgcagtttaaagaaggctatttaattcctttgtatgcctgaccaattttttaaaatccatcttactaaatgtagtttgtaggtcaggagtaatctttttacactaagtggtttcttgactgcttaccttttacatagtttatctaatttaatgagtctactattaatttcagtatttaattctgcaaatagcaactaatagtatagttttaatgtaataaatggtagtatttattacatgggagacattctagattctagagaattcaagtgaaaaagatacttctcactccttgctgtaacaggagtttacagagctgagtagtcagtagtgtagcatagtgatgtggaatcactttaaactgttctagtccttagcttgcagagagccatacagatggatttgtttatgtcatttgtcttttcgtttttgtttttttctaaacaggaaaatagttctgcttgcaggatgggcactgttcttatttcttgcatacaaagtttccaaaacagaccgagaatatcaagagtacaatccttatgaagtactaaatttggatcctgtaagtagtattcttgtgtaataatcattaattcaacagttccttaaacaccaaaggtctatgctctaaaacaaattagatatttccaaaagaagtcagacttcgtctgttaccccacccccctttttcatttatttgtgtctgtgttgtgtgtgttcttgggtgtcatgagtccagaagagggggttgggtcccttggagtttacaggtggttagaagctgcctaatgtgggtgctgggaatggaactcaggacctcaaggagagtagtacatacagtttttatgtaccaagccatttcttcagccctgtcagtaaattaattcttttattaaaataagatctcattcattatcatttgaatatatttgttctattgttggttgctactagtaagtattagtttataactggtaaaatgtaaagaccttgatgagaagttactatagttttaaaacatttttgttgattgatgcatgaaatatcttaagtctgtgttgggggttcctgtaagaaactgttatcattatcattgaaattatataattcttgatatgttctttggtgagattttggttgataaacctctacagaatgaagtgagaactgaagttaatgaagagagagaaggaggtctggagaacagcttagtagccagattgaatctgataattcactgtggtcttttggggtgggggggtaggggtagnnnnnnnnnnnnnnnnnnnnnnnnnnnnnnnnnnnnnnnnnnnnnnnnnnnnnnnnnnnnnnnnnnnnnnnnnnnnnnnnnnnnnnnnnnnnnnnnnnnnnnnnnnnnnnnnnnnnnctgtttattacaaacaccttttttttttttaggattttattttatttttaattgtgaatgtgtatgtgttcaagtgggaatacagaagccagcagaggacattggattccttgaagctgcccacccttggtgttgggaactagacttgtgcatcctttttaagagcagtgtgagcttttaaccactgagctatatcttcttcccagtatctctcttttttttttataactgtgatcatcatggttattaagagtataaaataaaaagatgtggggaaataaaatgatctaaaaattattgataaaaagtgagattgagaagcaaggtcagttcatttttaaaaatatttacttaattttaaaatactggcaagcagatgaaatgagatattgcttagattgtaaaggaggctaatctttggtttgttggtttttgaactgcacttagtttgtttattcttgattatctttgtatacgtaaaaccagtgtacttctacttaaatgtggagttctccggcttcaccgccattatcatcagtgactagtatattccatgccatatagttaagtgcttgataaaaataaatataatgaacaaaagaagtatatacgagatgaaatttgagagacaaaatgtataggaaagctgttagcttcttttgtcagaatattaaatggttcatggtttaagataaaatttgtatccttccttattgcattgtgctcttatgtattaacaaagcttttcttttagggagcaacagtggcagaaattaagaaacagtatcgcttgttgtcacttaaatatcatccagataaaggaggtgatgaagtcatgttcatgaggatagcaaaagcatatgcagcgtgagtaccacaggcctgctgcactctagaaaggaaatgtaaagacacatttctgttttaagaaagtagtaagtaaaatgagtgacatacttttattacatgttaaccaggtatatttgaacctgacattgatggtcctactcagcagcctcaaagtggtagttaattaaccctgaagtaactcgaactggcactgaagagacaccatgaccaaacatggttcacataatcaatactaggcagggacatgtagtaattcccttcctcaaaggaaaaagaaaactaacaccacagtagttagatgactctcatttcccacatacagttatctatctctttaactagtaggtaacacagtaaacgtccttttgaacattttatacagtggtttccaaatttttggcattcacatcacttacacagcttgctgttacatctttatttactttgtaaaaaaattagttcacaaactatacaacacttaagtcctccctccctcatatattatcttcaacatgtattactatgaagtatccaggtaactcttctcttagaatcaatacccaaggaacagttttaattttcctatttcctagaaggtatgcatggctatgttactcatgctgggtcttagcgttgaatccaactacagcactcaggaggcttaaattcatggccagcctgatctacaaagtggaacctatcatattaattgtttttaaggggaagggctcatgtttggagagagagctcagaaattaagggcagttgcaggtcttccagaggactcaagttcagttcctagcacttctcagggagatcacagctgcctataactccagctcctggggatctaatacccctttctggtttctgtagatatgcacatagcgcacacatgcacatacagaaataccataaacaaacaaaaacttctaagtcagacatggttgtgtctatctttaatcttagaaggcagaggcaggaagatatttgagtttgaggacatactgatatacatgttgagttcctgggcagccagggctacatagtgagatcctgtgtttgagaaaagaaagaaaaaagcttataaatgtgcaaatatctgtgcatatttttgtgaataatatagctgtcccccatccccagctttgtgtacacttggcaggcactctgttgagctatactcttagcccatgagctttcttaacaataacaatgtatcttatctatgtctacatctaggtcaacaagaaaataataataataatgtaccacatttttattatccattcttcttttgatggcagtctaagctcattctatatccttgttattgtgaagaaaaaaattcttataactggtaaacatgactacaagtatctgtgtggtattagaatgtagagccttccaggagtgctagtttctagttttagatttttgagaagcctccatcctgatttcgatagtggctgcattagtttatatcctagtggtggttggacttcctctctgcttctgttctttgtttttctgatatgcattctgaaaagggtaagatgaaatcccaaatgttttattcattttttatttttggagacaaagtcttactaagaagccctagagcctggaactttcagattgtctgcctttgcctctgagttctgggattaaaggtatgcaccattgtgtctgactagagatgttgaacactttaaaagaaaaaaaatcttaattggctattgcattttttcctttttttctttcttagtctggtgggcagagaaggagcaacaaaaaccccaagtgttagggtataggattggtagaaggtgaaatataaactctttctattgcagtgtgtgtgtgtgtgggaacctatcttttttctttcctcccagttagctttcatcctgctctcttcctctcttcaaatctgatatagttgtagtgggaaagaccaaatggtatggaggacaaaggggacatatcttaccctgttctctatatagtctagaagttaacttcttgtgtggagtgtagttggtaaagatttttctctcattctgtaaactctgtccatcagtcagtagtttctttcgctgtacagaagcccttctggtttcatttgatcgcatttgagattacatttgttagttccgtggcctgtttcctattcgtggaagttctgttcagaagtctgttgcctgcacctgctgtactgaagtgttgtccttgtcctttcagcatagtcagcatttctgatttttaaataagatctttgattcaggggtttgtttgcttgtttgtttattttggtgcagactgtgagacgtggatctaatctcattcttcaggaagagatcctcttttgctagcaccatttgttgaaaagaattctcccccctagtgtatgtctttgacatttttattaaaactgaggtgttcagaactctgggttcaaatctattttctgttctgtacatgtcagtttttgtaccatactatctttatcaccatgattaacaatattattagtgtgctcattggagaaattttacaaataggctgtagagaaataaataaaagccacttaaaaacatttcttacattcttagaaaatgtagtaagtagcctttgaaattcatctgacttcactggttaaattgaggtaatcaagaatttgtatcaaagtctatgaattagtagcatattctgacagtagggcacacacacacacacacacacacacacatacacacaccttctttgacttcaaagcgattttgtttttgattctttgatttattgatcccttttggggagggtatatatcatatctatgtggtgtggtgtgtgtgttacacaggtgggagtgaatgcatgttgaggcaggttggtgtggggtgtttccctagatcacactccatcttattgattgagaaagcctcactcacttaaatcacacagcagctagccagtttgctccaggcatatcctgtttttgccactttagtgatgggttagtgggctaccatacctttgtcagatttatatgggtactgtggagtctaaactccaggcttcattcctacatagcaagcccttcgtgagtgagccaaaacctcagccttgctgcagatggggagagtttggacactgaacagttaagtgcttagcactcttccaaagaacctaagagctcagttcctagcacccagtttgggtagctcacaacctcctgtaacagtaactccacttccagggtctttcagagtctttgtgggtacttgtgtgtgggtgtacatannnnnnnnnnnnnnnnnnnnnnatgaaataaaataaatctaaaacaatcaattggttaatacaattattgcatttgaatatttatttttgggggtatggctttctaatttttatactttttttcttcatgctagtttaacagatgaagagtctcggaaaaattgggaagaatttggaaatccagatgggcctcaaggtgtggtgaatataaaagtgttatatattatgaaaatattaactatagagtcagaggaatattgatttttctcagtttgtgggtatgaaaattacaaccatggattagatgaataaatcaaacctttcctgtttaaagagattttaaaaatattttgtatttgtataagtattctgcttgtatttatgtttgtgcaccacatgtgttactggtgcccatagagatcagaaagggtgggggtgggtttcagatttcctataactggagttgtggacttttgtgagccatcttgtaggactagaaactgaatatgggtcctaaaagagcaacaagccctcctttttctttttatcaaatttattttatttatgtgttttgcttatgtgtatataataaggttagaaaaggatattggatcccatggatagttgtgagccctagaaactgactcaggttctctacaagagcaacaagtactctgacccagtgagctagctgagactggagagatggctcttatgttaaagtggaggctcacaaccaaaaaggcagcaaacctattcacagatacaaacacaagcatgtagtttaaaaataattttaaaaaaaatctaagaaaaatctgttttccttttgtttgagtgctggggagctggctcagtgagaaaaaaaggctggatttcagatccctggcacctacctaaaatttttgtacctactcataatcccagcattcagcagacacaggtgatcccttgggcgagctggctacttagattctgcaaattatttagacctaggtatctaagagcttttgaggaagacaacagatgttgacctttttctccatagacatagcatttgcatgtaagcatattccttcacacatgaacatgcatatacacatatgtgtacataccatgagacatgtaagaagttttttctttactaagttcttgcatcttcatgtttatatgtattcaagctatgaaagaatttgtgttttctaggaaaaagaaactgagaaaagttttccattgagaactatgaattttcatatgcacactattttgtaacatacatgcatgcatgcatacatacatacatacattacatacacacatagataaatttatttattttgagacatgcctacagtgatcttgaacttgcagtgatcctcatgcctcagtctctcaaaagtttgagacgcctgggtgcattttattaagtttgtataatagagatacatgtaacggagtcttaaaggttttggggggaaatgggagggaacataagtttgagatacaggtaaataaagttagtttatttcaaagtcttttgaaataatggtttatttttatttcagctacaagctttggaattgctttgccagcttggatagttgaccagaaaaattcaattctggtaagtgcatttaaatcaagcctattctaatgtgtttgtatacttgtgctatatgctgtttatagggtgtaatataatgaaagctcgcacaaacaaaatctggcatgcagttcacatttttactgtgttttgaaaggtaatttttagcaaaagaaaaagaattggttccattattatactgctggcttagaacaatgtattctaaggataagcttgaaaccttcaaggtttactaacttattttgaaagtatttttggatagtgtcttacttttggcttgagaactactagatttatataattatgcatttatctaaagtgaattcataatttcacttacttttttcacctttactcatgccaagatattttatgctaaattaaagatctgttccatactaggaggagcattgggacattgggcagatttgctacatcagtgatagttactataaatcaggatttgtcttaatatattgtttaaaaattgacgattttctacttgtggtttcatgaaagtagttatttaggagttgttttattttaatataattttccttattactcttaaatgtattttccccctatgtttatgtctgtgtgtgggtgttcccatgctacaacctaagtgtggaggtcggagaataacttgctggagttggttatttcctatcatatgggtctggggatggaactcaggttgttaggtttggtgacaggtgcctttagctactaagctattttgctgatctgaggagtgtttttttttttaaatcttcaaagtagactatatacagtttagctctaatacgttttgaaaattgctattttgtgacattaaaattgataatcttcagagctctgtgcttgctgctttaactgcatctgccatgcttagggttactgtgggaataatagaaaagagaaagatagttgacagatttcagatgaagctgtagatggaaattcaatagttcaatagttactatcaaatacaaataataaaatggcacatttgtagttaggcacaggaggtagtttgtaagggcttacagtttatttcctagcactatttttgcaagatttgaatagagaagaaagtgcttgactggaagggaaacaaaatttataaaagttctgcagttatctatattatatctgtaaatagtaaattaaactatgatttgttatagcagataaaaacgagtttgaatgtagtaactctgttgtttgtgtgacataggacaagctctgtttatacttcagctatgctgtctgcagaattaaaggaaaaaaatggcacctccattatatagaaccaaataacagagtgcttttaatagtgggtcttctttgtaagtctgaacattgttataatttacctgaccaaggcatagctgttttctcttgaattctaggttttacttgtgtatggattggcttttatggttattcttcctgttgtggtggtaagttttacctctttttactattttttttggtagttgcttgataagattttgattattagaatttagtccattcaacttcatgttttaaaaggtacaattattgcttgagacagggtctttccacttaactctggctgcactgggacttgataggtagtccaggttggcctccagatctgcctacctctgcttcctgattgctgatattaaaggtactaccacacccagcctatttttatttttttatttttatgtatgtatctatgtttgtgtatagagtatctgcaaatgagagtaggtgtctgaggagttgagaagagagtgtttgagtacccggagctagagtgattgtgggttagttgctatggttgctgggaacagactgtggcttctctagaagagtagaacatggtcttaaccactaaggcatatccccagaccctagtaacctctaactgtgtagtaatttagttgcagagctactaaaaagtttatgactacatagtttatttcttttgtgccttgtgttctttttgatcctggagtttgtgtgggtccatgagtcctgttatgcatctgtcttgacctctttcttcataggattgttgtgtaagatccaatctcataagaaaataatcgtgtcagctataaaatggctcctaaatgtattaaatatttattagaaaattctgtgttagaagctactttgtttgcttatagcaatgggtggttttattactgttttatattgtaaacaatttctaaattgtttctgcctaaaacctaaagtattttaatcatgcctgatgatttgtgttggtgtttgggtttctgacaatttaagtatttgttaactaaattatttgaaatatagaccaagctcaaacactttgctcttgataaatttttggaaaattcacacacacacacacacacacactgcactgcatcaggcttgacgtttatcatttttcatgctttatatcttgtctgattctatttgtgtttagggctcttggtggtatcggtcaatacgatatagtggagaccagattctaatacgtacaacacagatttatacatactttgtttataaaactcgaaatatggatatgaaacgtaagtaaacttaagtaactgctgttcgttgcattgctttccgagtcatttatatgttgctatatattttttaaactctatagtagattcagttttatagtttatcagattgaaccagaaaccaggaggaccattgctgactggctccctctcaagcctcacattcagtgacttaggccccctgcctaggaatggtacctcttccaccagcagttaagaaaatgccctcacagtcatgcccacaggcgaagctgatgtagatatttcctcagttaaggttccctcttgtcaggtgactagtttatgtgactgatgagagtgtataaaattaccaagtttctgcatagcaaaggcaacaattaaatgagtaaaaaagtggagaaagtgtttggtaactatagagctgagagaggatccatgtctagaacacataaagagttagagagtcttgtgtaattgtatacacctgtaatcctagtactcgaagaggcaggggtattaggattgtcacaagtttgatgccagcctggtctacatagtgagttacagcctggcctaggagtcagtgtctcaaaaggaagaagtctatctaattctagtaagacttgctgttttacaaatgctggcaaggatgcagttgttggtgagaatgtacgttagtccaacagctatagaagtcagcatacgataagctatactacttctgggaatgtacctaaaggtctcaggtacctccacatacatgcttactgtggtgttgtttacaatggccaagttacagaacaagtgtaggtgtctgtcaactgataaatggacaaggaagatgtggtgtataagaatgaacttaggacagttgcaagaaagttgatgaaacaggagataactatattgtgtaaaataaatgagattcaaaacagtattgtaggaaatcagcatctcagaaacccaaagagcaaggtctcagcacaaagacagagaacaggggatagagacaaagacaagagatggggatgaagatgaggaggtaggggaggggcttttgttcctgaggggcagaggactgccttgggatagagaggagactgatgtgctccataggcagatggcagtttctgaaggtacaaggggaaaccccgtgtaaggatgagctgttgagttttagttgggcatgttaattaatcaaaagggggcttttgattgctggactttaaatctttgatagccggacctttgtaatcagcctcaggaggaataagtggccaaataagggaataggccttggtggttagctttaggaatgtaatctaaatgttttttagaaaggcagagggacttagggagaagggcaaggcctaccagagctatgtttacaagctggctagtgtcccttcaaatattacatgatttctttcaagtatatactagatttttatgtgtacacataaaatcctaaatatgcatatataaatctacccatacatacacacacacacacacacacacacacacacacacacacacacaaattcacagacacatacatatggcatgaaagttaaagcaagactatctgggaaaagaaagaatactagctgaaaagggagggacagatacagtccaaatctaggatataattgagtacgaatgtgaaatccttcactgtgtatagtaaatagactgtagaaaagaatgaatatcactttctgttatgttggactagtataggaactagtactactatagaaacttagttccttacaagaacatttcatggtctttgttttcccctgggatactactgacttaagagaatggtaactagtctcatgtcattctgtcacaaagcacttttcagctggtggatttatttatacatccttcatctgtctttggaacagttcttttcttttcttctttttttttgacccacatgaaaatatttgagccctgtgtagtggtatacacctttaaccccagtacttgggagactggggcgggcagatcttggtgagtttcaggccagcctggactacataccaagttccaggccaaagttacgtggtgagactatctccccctccaaaaaaaaaaaaatttccagtagtacatacatttgctatgcctgctagttttggggcacagctgaagaaactaaaagtacaaggagaaatgtgaagactattgcctaggtcatttagccaggaagtgacagacctatagtcttcgcttttcagcactgctgcagtcccactttccttttgttatgtagatatgttctgctgtgttaaaggtaagactggtgcttaaaatgagattggcgatcacagtgctggcccttaaagagctttttaggataatactgtggcaatgaaatcatgtgtgccaaggttccagaattttcatttactcgacagtctgaaaagtcatggaataaggagaatctctcactcttggtaatacttaaactggaggtcactctctgacatgcaacactctaacatcacatgacacactagtgctctccagcaggcttttctggaacacatgcttagtttagaagcatgccattttaatgaccggttgcttttgtgtccttagtttgatgaacacttgtgtgtatttttaaaagtaaaggtttttttgttgggtttttgttgttgttgttgtttttagtgggacatgttaatttacttagatgattttcagcattttgcatgattaggaagaaaaatcaataaacaaatcactatttaccattatattggttttgttcccataggtctcatcatggttttagctggagcttctgaatttgaccctcagtataataaagattccacaagcaggccaacagataatattttaataccacaggttaggctcatcttacaaattcctcaatgagcaataaagttcaaaagtgaatgattcatgttatgtttctgaataattcttttatttgtcttagctaatcagggaaattggcagcataaatttaaagaagaatgaacctccactcacctgtccatacagcctgaaggccagagttcttttactgtctcatcttgctagaatgaaaattcctgagacactggaagaaggtatttgtgactaacatttgaagggttttaagggaccgaagcaacagatataagtggtcctggtgacccaacatttagatgctggtcttttttttttttttcaatcaaatagttgtttatatttctttttaaaaaaaactatatggtatataattactttgcaaatagttgaaattctgcattagatgctttggcaaatacaaaatacgttatttgaagatgagagtattttgtatgaaatgtttaatagttgcaggttagcagaagcgtttgcagtggctttgctttctgagacagggtccgcaatagtctgtctgctatccttggtctttctcagctcctctggactaagaatgtagatgtggagcatcatgtttgactcctactgtttcttaaaaaaagaacctgaaagccttctagagggacaaaagtatattttacagcaaatatctgaccctcttaatccaacatgattccccccatttctcagtagtagctacagagatatgggtttgtgattgaagttatctacttttactctttaaaacaaaggccttggcttgagatggaagtatttccagagagaccatcgatgaatgtcatctccttttcagttggaacttagaaacttgtcatcctaaaaacaaatgttctttttgaatgaaatcttcctactgcatcactgttgaactagtgacgtaatctaggacttgtgaaaataaggccatccagtgcttagtgcttggtgctagaaagggtgcttagggtgggaggaagggacagttttaggcatcatcattggaattactttgaaatacattagtagttttgttactgatattctgtgtacatatataggcatttttactagtcatttcttacacataggtggcttgctttttaggtagaatacaaaatttaatggatttcattttgaaagatagttttatctatctgggtattcttttctgcatgtatatactggtaccagaaaagcctgaagagggcattgtgtccccttggaactgcagttacaagttgtgaaccactgtgtgggtgttggaagttgaactcaagtcatctagaagagtagccagtgctcataactcttgagacatctctccagccccctcaaatggaaaattaaaacacatttatttttctgtattgctgatacttggactcaggacctaatatgctatgcaaatctctactgcctagctatgtttccaggctgttagatttttttaaatatattttttattttaatgtgtatgagcattttgcttacaatatgtgtttagtgcctgaggaggccacctggtactatagtactgttgtcagccaccatgttggtgctaggacttgaatctaggtcctctggaagagcagtcagtgctcttacccactgagttatctttgccagcccattgtttttgtttatatttgtttctggaaattggactcaggttgtcagacttgcatcacaagctgagcacaagctaagcacaagaagtgcttagctatcccccttaattaacttctttccttccctttctgtatttattgatttttattctcatcacagttataggaatgtagcggagcagcacagatagaacattctcaaagacagcaagattggaattgaatttatgattaggactgttataaagaaaaaacaggatgtataataaatagtaccccattatgttagaattttggctttgccaaatcttatgctagtgatggctttctgtcttttgtttgcagtaatgttgagaaatattctcttaaacattaagattctgagactgggtaaaatatataagggcctgcacattttgtgttagccttgggcttcaagtgggaaagatattttgactataagattagaatagtttatttcagtttcttttgttttgtttttttcagatcaacagttcatgctgaaaaaatgtcctgctctgcttcaagaaatggttaatgtaatctgccagctaataataatggcccggagccgtgaaggtgaggaggaaatgtaactatactttgtcctgaaatcatttgcttacaatacttcacagtgtaaagatttatgagtgtttaattacaactttgtatcccagatcagtcaggctctcagatttgcttatggtctcattcttttcattgctttatttttagtgcatcttcctcctctgaatacttttgagttatttttgtattttcacagtgagtttaaaataattctttaattggcatattttttgtttgttttgtttttttgtgtgaaaagaaaaggaatttttggtcattaatggaaagggaggggctaaaaaatggagactttaaaatttgttgttgtgggtgattttaattcttggcagtgttacagtacctttggaatgttgcaacatctacttgttggtgttaacgctagaggttttagcaaggcgtgacttaaacctgtaacttcagcactgcttaggccgaggtaggagtcctggttgaagccagtctggacttcacacaacaatttcattgttttaaaaagtaaacgtaaaaatacatctaaaactacaaaatctttcttactcttctattttttgaggtaggctcttgcagtgtagccaaatctggctctgcactccatctttctgcctcagcttcttaagcaataggtttccgctgtggctccaccatgcctggctcagaacattttggtgatttgtgtgtttgtggctgcatcttactacatcatccaggctggtcttaaaagcactgtcctcttgcctcagcaacctgagtgctaggattgctatccaagggctgagattataggtgccctccaaattaagtcatgttatattgttagtgcctgatactttatgattattggagttgatatagaggtctttgttaaattagtagttgttgctgggtaatacacatttgaccaattttatgtatttttagcatttttttcagtagcttttaaaggaaaatcaatatctggatcttgaattttaggtgttaaatgttagtgtgattttattccttgcaatgaaagtataaaaaatacagctcttttgtttcttttttccctattctttctaagaaagggagtttcgtgctccaactttggcatccttagaaaactgtatgaagctttcccagatggctgttcaggggctccagcagtttaagtctccccttctgcagctccctcatattgaagaggacaatcttaggagagtttcgaatcataaaaaggtttgtggactgctttctactcagagtttagcaacttgtatcacaagggaatgtgaggaaaaaagttttctagactttgttgtgtgggtttcttagacttagaatatcttttttgttcgtatttcttgattaggtggttttatagtattttactactataggattactgttttgcgttgagtaaattttagtactttgttatttttgcattgcaaagatttatatatcaagtaataatacaccatatacttttcatttcatttttgacttaaagttgggcagttgttatagttgagtatgaaccaaaacaaacaaacaaaaaaatgaagcattcacaaaaatacagttggactaacgctgaagctctgcagtagagtgcttgcgtgcgtggtctgcgtgggttcagcatgccctgggttcagtaccacctagttacagggtgtgggaggatacattgatgaagaaaactgcttttttagaaactttaataaacacttgaatatctcggaagtatgtagaaatgaaaaagtttgggaaataaaagaaaccaaagttatagttgtggtaggtaattttaatcattacttttgggcgtggtcatatgagcttgtatgctcagcattttgggaggcaggttgaagcatgagggttgtagaaaatttgaggcctaggctaagtagtgaacaggaggccaaccggggccatagggtgagcccctgttttaagagaaaaagagaaaaagataaaagtaaaagaagaaagcagaagatagctttggatttggtcgtattaaaggaaataaatgtataagaaatcagtatccaagttctgctcattaatcatattgccattatattaagcaacagtttacaacagaatcctagagttgaaattcacctacctcatgatttaatctctgtgaaaataaaaattaagtacttagtacttaagtagaggccacctgtacttagaaggtttctttctgaggctgaaagtaaacttaagacaatagttactgattggatcaggattctgtatgaacatgtttttatttttatgctctttgtttttttgtttttttttgttttgattaaaaacaaaccctgtaatgaatttattaaaaacaaaaaacaaaaacctagttttaatggtcttgctttgaaatacccataatgataactttttatgaagttgctggattttatttggtcagcatgccagtagttttcatttgacgaaactatttattcattccatcattcattcattcatatatttatttttcttttttagtacaaaattaaaactatccaggatttggttagtttaaaagaatcagatcgtcatagtctgctacacttccttgaagatgaaaagtatgaagaggtcatggcggtccttgggagtttcccgtatgtgaccatggacataaaatcacagggtgagtggagcttccctttgcacattgatgacttgctctcttttatttgactcaactcgtcctttgtcccttcatctcactacattgtcctatctagcctgcatttacttttaggtcaggctccttcaaacgtggagaaatctccctctgccctcttagtgctgatatagtcaggcatgctccaatgtgtccttctttacagcaccttaataatgtgatttgcaactggactttgcagagctgtagttttcttgtcaaaaccctgtttttatttttgtcacagttgtgctgagtacgaggatactgctttatagttggacattggatttttattttgtgtgtgtattaatcacctatagagtgaggatatgggaattttaaccttagttgaattcttcacacatggagctggacaggaggttatgcccagagtgtagaatgtagaacccctttcctgtggttcctgctttatttcatgtcatgtcataggctgccatttttgtcttaatcctgcctatgctgtggagtctttcttcaagctgatggacttaaaataccagttacaatctctaaagtgcctttgggtgcattggcagcttcttcagtgctttttcagtggagtcgtggtagctgtcctcttgtgctagctcaacttcccaaagaatccaagagatgtccacgtgtgatgaaaggaggagatgtctcacgtacattattaaacgaaatagttatctagtgctgagaataacatctatagtaagctttgaaaattactgtgcctgtgcttcgtgtgtttttctaaactttgtatctgtttaattgaaacgacttatttcctaccaatataattgccctgtcacaattttcatagctgaataatatctttgaacacagaaatacagattattagtttagtctgtcttatggtatagttccgagttatagcattcatcaactcactgttgagaggacaaagatgcagggacatattaggaataatttctgtccataaagagttcaccatctagctgattatagaattaacagcagagcataatggatgcttagtgttaggtgatgacagacattgcaccttatattcatgttaaaaatagtgagtgctctgtacttttactagctggagagctatgcttacagcacgttgccttactgaatttgtaacctaacataaatgagaagtaaatgattttctaaaattgcttggaacagggaagcaaatagtgtcatctggttttggtttatgtagtatataggacatttgcagagtatttacatatagtaaatactttagacaactttttctgggatttgggagttttcttctagattagtgagtttttagactttaaagtcactaatctaaatgctgcatttaggggctggagagatacctcagatgttaagtgtgtcaggtggtggctcacacctttaatcccaggtgttgggaggcagaggtaggtggatcctgtgagtttcaaaccagcctggtttacaaagcaaattccaggacagccaggactacacatggaaaccctgtcttgaaaaaaccaaaccaaaccaaaacaagaaaacacctccctcccaaaaaaaccccacctactgctttagcaagggacacaggttcaattcacagcctctacctagtggctcacacccacatataactcacgttgtgttcatgcatacctgtgggcacccacacatacgtatacaaataaatcttaaaaactgcatttacaattttacctttgaaccaaatctagttgggggtttaagaataatctttgttatggtcaattattgtaaaactcatgattagaaaaaaatgttagaagaggctgtcttcaaggaagtaagagtttatttcactatgttatttgtatatgtcatgggagtcacagagtttgaaggacgagtagcaaatataggaccaagtcttaatatggtgctggagataattgttctccctttatcactcgaggctacatagcatctcatggcaagctgtttccccaccagatacatgaacacattgatacagcagatgtcacaggtactgccaagtgaaagtctagatgatatgtgggccaggtttgagttctgacaatggaggcttgtagggtgagccacacattcaaacttaacaaccatggtggaggtaggtagcagttacaagttgttggagactgctgttttgcacgtgttggtgtgtcagaaaggtcagaacgatgtgctgaactaaatttgtaaggcagtataaacagtaaaaacaaaaattctcagtgtagaaatttcttacagataaaatcttgtagaaaatgaatatcatttgagtagacggtataaaaagtaatctttctcattgctttgataaaaaaataatgcctgccgggcagtgatggtgcacgcctttaatcccagcacttgggaggcagaggcaggtggatttccgagtttgaggccagcctggtctacagagtgagttctaggacagccagggctacacagagaaaccctgtctcaaaaaaccaagaagaagaaaaaagaaatgtcttacaagcaattttaagaggaaaatgggagaaacgtttattttgacgcatgttttgaaaagtatagtccatcatgtgaggaagtcttggtgtacaggaggggtgtatgtgtgagtgtgtgtgtgtgtgagagtatgtgtatgtgtgttgcatgcatgagaatatacatgtggataaacaagcatgcagagactagagcaagatgtttggtcattttccctatccttttcctgctacattgcagtaaaaggtctctcagtgagccaaaagctagctcttttgactagtttggacagccaactagctctcagattccaccagtctccaccgccaatgctggtactacacatacattacatgcctggcttttcatgtaggcactgacaagtaacactgtggacccgaagcttgtagaacaagcccttttactcctgagccatcttctctgctcttttagttaattttctattgctgggatgacactatgatcaaggcaacttacaatagaaatcatttaattgggacttacagtttcagagggtgagtccatgaccatcatgatggggagcctgacatcaggcaggcaggtgtggcactggaggagtaattgagagcttgcatcctgatctgggagttggaggcagagagagtgagcatgcaagactgggcctggtatgggctttgaaacttcgaagatcattgcctaagttggggttttactgctgtaaaaagacaccatgaccaaggcaactcttataaaggacaatatttaattggggctggcttactggttaagacgttcagtttttatcaaggcaggaagcatggcagcgtttaggcagacatggtgctgaagaagagctgagagttctatatcttgatccagctgcagccaggagaggactgactcactctggcagctagaagggtctcattgcccagcccctcagtgacacacctcttccaacaaggctcctaattcttaccaaaatagtgctacagctggggaccaaacattcagacatgagcctatgggcgccaccctcatttaaaccaccacatctgctggacagtgttcttttatagaaatatggaattctacacaaacgtgcatgtatgtcattcttgtacacaggcagtgctaatcgtcctgcctgcctgttctagttgtaacatgtttttccaaagctagccgctcttttactataaagacaatatattgaagttactgctttaaatgttgctttttaaatgtttaaggtcattggaatgttggattttactattttattcttttactcaggcattggtcagagaagtaaaattatactgtatctacaaagttggttttgaaggcagtgctagtgcagctgtgaaccttggtttcttaaagtggaaatggtaataaatcataatagttctttaagaattaaatgaaacaattgttgaagatgacctggagaattattttaatactcttttaaaaatatgttcaaaatactgaagtaccaagttgttttgggcaaggtaaatatttctgtttgcattgactgagaacttctttttctcttttgttctgttcctcctgtctcacagtcttggatgatgaagatagcaacaacatcacagtaggatccctagttacagtgttggttaagttgacgaggcagaccatggctgtgagtagttatttgtattactcatgtagctatacttacttacgtagagttattactatggagacttgtttgtgtatctgttggtttgtgtgagaatgcacatgtatttgcacatggtacacatggatgtgtgtggagactgcaggtcagtatctgatgttgcagtggtgttgtttagatggtgtctctcacttaccttgtgtttgccaatttagtgaggctgcctgtccagctcattccagaggcccactttcctagaactgggattgtaagcatgtgctatccatcatgtatggctttaatttatttttaagatttagtcattttgtgtgtatgaatgttttgcctgtttgtatgcatttacaccacatgagtacctggtaaacagaggtgagaagagggcataggatgccctggaactatacctatggaggttatgagccaccatatgggttcttagaattgaacccaggacctatttctgttacatatttctgttacctttcaaattaattaataaagttatcactcaggctttttattttgtctatgtgtgtttgtggaaaatcccttgggctgtttggccagccagtccagccaagtctataagtcagtgagcgaacttgcctcaaaaactaatgtgaatgaaaataagccttttgacaccaacctctggctccacatgtgcacccttgcacacacagtgttggtagtgttgtgctaggctttttacccatcactgcagacaaactgagaaagcaatactttacagttctagtgtagtggcacatgcctataatcccagcaacttgggctcaggaggctgagagggggcgattgtgaatttagggcagctgggttacatgatccctgtcaaaactataaaaacaaacaaaatagtagtgccatcttgacttcttaataagactagcctgtctcttagagcttaataattatgtttgctttaatttatttgctttaataattctaaagatatttattacacataatctctaccacttgtcatatttcagtatgcatttttactaggttctaattgagctttaaattgtatgataagtggttatacttttaggatatgtggattttcttggcaatctgataataataaatttacagtactcccttgatggtgaaaattagaatagtgttatatattcaaatttccactataatattcttgcttgattagtattagaataagtgatattttaaattgaagtatttttgactttaaaacgagtaagcatatattaagtcatcgagtttgttaacttaagtagattctgcttttgaagtctatttacaatagctgtgagatacttctgaaggttactacctgggtatgtacagacttataactgccaagcctactcaccctcccaattgcaactgattaacaaaagctttatggacaaacattttgaaagattttattttccatctgaaagacaactatgggctaatagtattgttcttgttgccctaggaagtgtttgaaaaggagcagtccatctgcgccgctgaggagcagcccacagaagacggggtaactaacaacctgaactctcttaccttcttgatgaagaaatgttctctttacttctgtggttgacttacattactgcggggcataatgcagattatgaaaacacttattttcatcagtctcctctaaagatgactgttcagccttaattgtcatatgtggtttgcagcagagtgatgccaacaagatcaaggcaaaaggaggatggcagcagaagaacaaaggacccaagaaaatgcccaaatccaaaaaaaagaagcctttaaaaaagaaacccacaactgtacccttacctcaggcaaagcagcagaagcaaaagcaagcaaatggagttgttgggagtgtgagtctgcagtctctgttactgttgttactaagatgtactctgtgtatgtgtgtgtgtgtgtgttaaactgttcaaatgtacataccgttcctacatttcacacacgaacatctacattaagtccaagccaagatttgccatcctttctttattttctcccttccaaatgctggaattgaatccagtacctcatgtgtagtaggatagtaccctattgttgagctgtacccaagtaaagatttcaaagctctgggcttgggagtagttcagaggatctatgttcctgcatagaacctgaattctattcctagcacctggatcaggtggctcacaactccctggaactctatctccagggcatctgtcatccccaatgtctataggcactcacatgtgcacataccacatagagatacaggcatgtacacacaaaaataaatacctaaaaggtatgttgaacattgttagcattcaggagagctcctgtgagtcccttcatagtcagtggctcttccattcagtattcatctctcactactgggacttagtcactgtgattttacttactaataaatccatataagtgaaatcattctttaaggtttatttttatgtggaagattgtttttaatctgtctatataaatggctgtgtaccatatatatacagtgccctagttagccagatacctaacctattaggttctctagagggcacttggtactctggaactggaattacacatggatgttagctgccacacgggtgctaggagtcaaatttgggttctctagaaaaaaagccagtgccccttaacctctatgccatctctccagtcctgccccttcctctcttctttcattttttgagacagaatcctactatgcagccctggctggcctggaatttagtatgtagaccaagatggccagagataaacctgcgtctgcctctgcctcctcagtgctgagattaaacatgtgtattctcttttctcttctttttctttccttttcttttctttccattcatccttccttcgttcccgccttcctttctgtttttgtttgtgtgtttgtttgtttgtgctaagcatgttgatgcacatctttaagaaggcaggggcaattggaggctaccctggtctacagagcaagttctagagcagccagggttatacagagaaaaactttctcaaaaaacaagcaaaaaaaccccccaaaaacttattatttatgtgtttgtgaatgtatgttgtgtgtaggtgtgcatgcatgtgagtgggtgtgtgtaagtgtgtgtgtgtgtgtgtgtgtatttgttcatgagtgcaacctgtgaattcatttaaatattatcttcagctctgtgatctaccttaaatgaattttccctgacaatgtaaattctgagatatttattccagtctttattgaaaatacaacccttttcttgctgaattacattggcattttgtttagaacaagtggccatagtgcttgtaatgtgtccctccatcaccataacccactgcatgtgcttctccttaagccagtgtcacgctagctctactgcggctctcggcctttccacatgatagtgtaaattccctagatggtaattttactgattttcttaactattttgcatccagctaaacatttagagtgagtaattttctctaaaaaataattactaaatttagacataattgggtctctggtttgaacggggaattaacatagtactgttaccgagtctttgttcaccctctttggctgtcttcgttaacttagagcttctttatattttctcagcagtaaatgacaggtgtggacatttgtattgctgtgcacttgataacatttattggttattttaaatgaaagaaataaaatttgtttcagtggcttttactgctttgcaggcatgtaatagctttttcttaaaacattgaccttgtatcaagcatcttaatgacttgacattgattttaaccatttatagatgttctaattactccacatatgcagttgcagctgttgtgagggaagacaatttttcttttaacctttatgccctccatttctgccttttgcctttctaatcccgagctagtttagttttgtggacagtgaattagcttcagagactcaaaacgataaatactgactgggatgctcagaacttttgtttttgattttgccttgtaggaagctgcaataaaggaggaagaagacgacatttctgacaagggcagtgattctgaagaggaagaaaccaatagagattctcagagtgagaaagaagatggtagtgacagggagtctgatagagagcaagatgagaaacaaagcaaagatgatgaagcagtaagacctggtgtccttatccatgtcccccttaccctcttatgctgagagcagagccagtgcacaccccaggtccagatgtgttagttacatcacttgaatcctgtttctgatgactgctggagctgggggttcatttgtttaattgtttgcttgccttaactcatccattttagaatctcattactttacaaatgtgtttgttttgaggtattctcaaggaaaattgtttcagacaaggattagaaatcccagttttcttaagtttgttgaaattacaaagcagaagcaggtcctgtgtctgagtgacactagtctggtctcttaaggaaaagtgcagtgatggaaagtgtctctggagatagcagtaagggaaggcaggagcagcccttagaggaccttccatgccttccagagcatatttagaagtaaccctggtactagataatcaggaaaggggaaagctttgattagttgctagatcttgagtgcttttagactcggagaatttcagaaattattttcccagctccactctaagaaaggtttgtcgtgttgttttctgtatctagtattctcagatgcaaatcaaggttttacagatgagtttctttcttgctctctttttctttttactttgtattatttctttttcttttctttgtctttgaacatgctagatatcagggccagcagatttaaagtaaattaatatatgttatgaaagctgaagtaatggcataaagatgtgatcagctaagttctgaggcagagggatatttcttgtaggcttctctcagaagtttatacattagggttttactgtcctgaaggagttagaagtttaaaagactgggaacatgcatttaagagtttagggtgagtgaaatagtttggtaacttgagaggagtgtaggtagagatgaagacaagaaggagagggaaggaagctgtgttgcaggctcattaaggtcagatctggagcagtcttgtcgtgtgctgtagggcttagaggcatagttacatgaggtttgtggaaatgaacttcaaatcctttgtagctagttggcattgtgaagagtaaaagctaaaaacgcatctaaatgatctctgagagatatcaaatgtcacatattgatgttttcttctcccaggagtggcaagagttacaacagagtatacagaggaaagagagagctcttctggagaccaagtcaaagataacacaccctgtctatagtctctactttcctgaggtgagtttcgctcagcccagtgttgctgttattccatttctgctttctgtagatttctcactagctgtgcactgctttgtgggatgcttactgctccaaggtgtgataactagtttatttttgataggtcaccctcataacaaagaatatattgtagcatgaattattttccatgaatatgttgctgacaggggattagtttttaagtctgtatggtttcctattcttctgtcatctctggtcctgttactgagtattgtgcttaatggctgtttcatttagaagtgagaggaggcttataagatagatgaatgcattagttttactttggttacttggctgttctgagtcttccacccacatggagttttaagtaggatgaaaaaattcttccgagggttctttacatagttacttggtactcttgtgccaggaagtgttcgtggaccccaaaagaccaccaaggagctgactgatgtaatcacgtaaggatctctttagtacaaattcgaggttgggtttactcaccgcagacaccgcagaccttcaggaaggtctggtgaaacagcctcaacctctcatcgggacaaggttttacaaaaaagtaggagaaggtgagggggtggggtccaaccggcaagcatctaattgaatgtctatcataagctgtctggtgggtgttctgaagcaagaccgtatacaattatagtctgaaagtacatctgaaacaatcagactaatctttgaataactgatgctagggagtagctagggagtaactctggccaaggacaagctgaggggtccttcctggtgcttgaatttatagctgcaggtcagattctcagccttttttctttttctttttcttttctttttcttttacctttttttaagatgggagtctggtcccaagatggagtaggcctagcctcttattcccccctttctctggtaactagaaggttaatgagacttcctgaagcttataggctgtgttatggagaggctgacagtgaattattgtctcagtctatcatcatgtttgtttgtgacatcagggcagtcatctcagtgccagtgtcagctatgtctaatctcatgaaaacagctagtaacagggctatgtctttatgactcagctaattcaggccaagttgtgttggtgacctgaaaagactggaccatcatattttagagggggtcaggtttgtcattgtccagttctcatggtgtccctatagcttggataggggccccaacagtgggagacagaagggagtcttgaggctgagtttcttcctgttggtcagggtcatcttcaactgtaaacgtgtatgtgttggatccatgctgtaatcctgtcgaccttcccagtgatggatgtggtcaagatgacatcatagggaccttttaacgaggctcttaataacccctggctggagggggacctgtttcatagataacatgaagtttaggccaaacctgtttgtgaattcattggacacctttgagatagtctagcaattggcactcctcgaactcagtgatgacctctgcctggtatgttaagaaccatgtggagtggtatcccgaacattattttaaaaggggtgagttccatctggtaaggggagtttcatgccctatagagagtaaagggaaggagagttattcagtcatcactagtctcttaggtcagtttagttaaggtctcttaggattttgtttattttttctacctgtcctgaactctggggtctatatatacaagtttttaatcaatctccagaatattgactagtctctgacttacctggggcacaagagctggtccattgtctgactatcatctgaggaagcccataccttggcagtatgtcctctaagagcttctttgtcactatgaatgtggtgtcatgtttggtggggaaagcctcagtccaacctgaaaaggtatctgtaaacatcagtaaatatttatatctaaatttttctggttttacctctatgaattatgtttcttaaactctgggctttgtgcctctaaacctattactgggtctaatttctttaacaggtaggccactggccagatctttcgtccatgaagagatggaagggcttagtcacatctggcaaccccaaagctgtgtagaaatttctgtctggtctcagtgagccacctctgacctttcttaatatgtatctcccagatctgggaaaatcacctgtagttggcagaatggggcctttttagcagaggcttgataatctgaactttccagggcctccaagaggtcttagtctcctttaaacatttttgtttgatttctggtgccaccaggaagtcattcacaaactgtaggagagtcagcttaggatgctgggttctcaggtcttcgctcttgggtgccaagggtaagccaaagaaagcttcttttaaatctagcaccatataccattggcgcttaggaggaacagcattcaaaggggggggggtgtagggattaggggctgttgggtggataatgaatgggttaccctgttcactcccaagtccactgttctttgggtaggtaggccatgagtgttatttaattcctgttgctccttggacctaggatttttttttttttttgaagagacttcattttcaggttttagtaagacagagtagaatgttaagctctattagcaacaaggaagctggtgctttgctttgctttgctttgcttttttctttttttttttctttctttttttttaatttttagggttaccatgggcatcttttaaggccatggtttgaataggcttttttttccttggtgtattttctggcccagtggccctctttttttataataagtacattggttctttcccatgttgcactttagggccccccagctccccttagctctttcttagaagtcatttgtttcaggcatctcctatagtcctctgggattggccgtggctgccaacaggatctctgtcagatcaccagtcttttgttttcattcttagacctttttctagtccctaaaccccttgtcattttttttcttaatatttggtgctgcctgataaagggtagagctaccactactttcatctttggccaaattagtcgttttgatacctgccagtagagactggtgacttaagaatcctttcttacaggctggagagatggctcagtgcataagagcactgactgctcttccagaggtcctgagttcaactcccagcaaccacacaatggctcacaaccatctgtaatgggatctgatgtctttttctggtgtgtctgaagatagcaacacagtgtattaaatgcataaaataaataaataaatctttaattattaaagaacaaaaaagaaaccctccttactttatcaggactggagtcccaatctgggtgggttcagggaaagccagcacagatagctgcttggtgaagtttcctggcctctgtctgaggtgaagacaacctgccagagctgttggtaattatctcaagtgggcttgtgggtgaagaggactgtctctaggaaattaattaaatcttgagggtttaattaatctctgaaaagcgggagttctgaattctccagtaaaagtcactagtggcaaggggccaataggatgaagttgttttccttgatcaccgactagcccagctgcacacaagggcaggacagacaatagacttgggctcagaagaccaatctcaacttttaatctttgggcagagggcgttgggggcagagcctctaagaattcagtctgaagccgtcctgggttgccaccttaacatagcagcatattgtcttgtttattctagctctgagtaggtaggtgactgcacagagtaccctaaggcacgtggaagggagtggttgttgtttctaggtgggctaagtgtggcaggatggtgtcaatggagaccctctcattacaactcagaggctacatctacagcctacatctgcatcttgttcagacagggagtgagcacttctcctggcaggaagggtagcagccactcactgaacaaaatgagtgaccaggagtctattctacgttccggtgtggaaggagacatctgccaaattggggtctctccggtccaggctgtccttgcttggagccctgttctctgggaactcatcttccatttggggagatcttcattagggccacaggaggccctagtctcagacctttctaggggcccaaggacgcttccccacccctgcctgtgctcagctgagttgcctgcttgcagcttgccaccccaccaggccaagggaagcccttgacacccctgtgcgaattgtcagggagctggccaggttctatgtgtcccacagccagtgggaagcaggtgggaagcagcagggagggccccgcaagcagcactgagaaggggcacagagccctccacacaccgctggggtgcaacacagtgccactatggtgggccctgtctccccaaagatttgtctgcctctgcctccctattcctgagattaaagacatgtgccaccacgcctgctttcataattaagctatattgtaaacatgagcacagcttcactcattcttttcatgctgcaacagcaaatctgaacacctgccgaggtctccattgacactgcatgttgagagtgtttggtttgtataaactttgtatactttgtatacgaaacaaacgttgcaggatatgtgatcacacactttacagtgtgatatttactgataaaacctgtttctagttgtggtgtggcttgccacttagcacacacctttaatctctttggctggaatacagacatgcccttagtacacacttttaatcctaaacaatgaaggtaaagttagtttatagaagaaagccatgtttgaaagtgatgtctaattgagtggcaaattaattgagtacaagatttgacaggataggttatgtccaactctcacgagaaaatgttacttaaagcagtgcagagaaaaagattttaccaggacggttgtacagagacaggttgcagagagaacaagccagggaatgaggcgccagaagatttgaacagatagagttagtttgaggccaagcagggaggccaagaaaagagggatttgtaagggtggggctgggaagagaggagagaggggctgctgtggtcaagatagaaaagcaatttaagagaggaaaaaagaagccagattgaatcagtcagcttggagaggagttttggaccagaacagttgagttgaccagccagcaagaaaactagaaatggtgagcttatttagcagtaagtctcagaggctgaaaacattctaggcctggattagattgtacagaggctaggttagtggagacagtaagcctctgaggctacaattaattctggcaaataaaagatatttcttctctctccctccctacctcacaattttgatttccatgatatatatgggcatattataaatgacaagctaaatacattaaatgattatgtacttttttgtttctttttttatnnnnnnnnnnnnnnnnnnnnnnnnnnnnnnnnnnnnnnnnnnnnnnnnnnnnnnnnnnnnnnnnnnnnnnnnnnnnnnnnnnnnnnnnnnnnnnnnnnnnnnnnnnnnnnnnnnnnnnnnnnnnnnnnnnnnnnnnnnnnnnnnnnnnnnnnnnnnnnnnnnnnnnnnnnnnnnnnnnnnnnnnnnnnnnnnnnnnnnnnnnnnnnnnnnnnnnnnnnnnnnnnnnnnnnnnnnnnnnnnnnnnnnnnnnnnnnnnnnnnnnnnnnnnnnnnnnnnnnnnnnnnnnnnnnnnnnnnnnnnnnnnnnnnnnnnnnnnnnnnnnnnnnnnnnnnnnnnnnnnnnnnnnnnnnnnnnnnnnnnnnnnnnnnnnnnnnnnnnnnnnnnnnnnnnnnnnnnnnnnnnnnnnnnnnnnnnnnnnnnnnnnnnnnnnnnnnnnnnnnnnnnnnnnnnnnnnnnnnnnnnnnnnnnnnnnnnnnnnnnnnnnnnnnnnnnnnnnnnnnnnnnnnnnnnnnnnnnnnnnnnnnnnnnnnnnnnnnnnnnnnnnnnnnnnnnnnnnnnnnnnnnnnnnnnnnnnnnnnnnnnnnnnnnnnnnnnnnnnnnnnnnnnnnnnnnnnnnnnnnnnnnnnnnnnnnnnnnnnnnnnnnnnnnnnnnnnnnnnnnnnnnnnnnnnnnnnnnnnnnnnnnnnnnnnnnnnnnnnnnnnnnnnnnnnnnnnnnnnnnnnnnnnnnnnnnnnnnnnnnnnnnnnnnnnnnnnnnnnnnnnnnnnnnnnnnnnnnnnnnnnnnnnnnnnnnnnnnnnnnnnnnnnnnnnnnnnnnnnnnnnnnnnnnnnnnnnnnnnnnnnnnnnnnnnnnnnnnnnnnnnnnnnnnnnnnnnnnnnnnnnnnnnnnnnnnnnnnnnnnnnnnnnnnnnnnnnnnnnnnnnnnnnnnnnnnnnnnnnnnnnnnnnnnnnnnnnnnnnnnnnnnnnnnnnnnnnnnnnnnnnnnnnnnnnnnnnnnnnnnnnnnnnnnnnnnnnnnnnnnnnnnnnnnnnnnnnnnnnnnnnnnnnnnnnnnnnnnnnnnnnnnnnnnnnnnnnnnnnnnnnnnnnnnnnnnnnnnnnnnnnnnnnnnnnnnnnnnnnnnnnnnnnnnnnnnnnnnnnnnnnnnnnnnnnnnnnnnnnnnnnnnnnnnnnnnnnnnnnnnnnnnnnnnnnnnnnnnnnnnnnnnnnnnnnnnnnnnnnnnnnnnnnnnnnnnnnnnnnnnnnnnnnnnnnnnnnnnnnnnnnnnnnnnnnnnnnnnnnnnnnnnnnnnnnnnnnnnnnnnnnnnnnnnnnnnnnnnnnnnnnnnnnnnnnnnnnnnnnnnnnnnnnnnnnnnnnnnnnnnnnnnnnnnnnnnnnnnnnnnnnnnnnnnnnnnnnnnnnnnnnnnnnnnnnnnnnnnnnnnnnnnnnnnnnnnnnnnnnnnnnnnnnnnnnnnnnnnnnnnnnnnnnnnnnnnnnnnnnnnnnnnnnnnnnnnnnnnnnnnnnnnnnnnnnnnnnnnnnnnnnnnnnnnnnnnnnnnnnnnnnnnnnnnnnnnnnnnnnnnnnnnnnnnnnnnnnnnnnnnnnnnnnnnnnnnnnnnnnnnnnnnnnnnnnnnnnnnnnnnnnnnnnnnnnnnnnnnnnnnnnnnnnnnnnnnnnnnnnnnnnnnnnnnnnnnnnnnnnnnnnnnnnnnnnnnnnnnnnnnnnnnnnnnnnnnnnnnnnnnnnnnnnnnnnnnnnnnnnnnnnnnnnnnnnnnnnnnnnnnnnnnnnnnnnnnnnnnnnnnnnnnnnnnnnnnnnnnnnnnnnnnnnnnnnnnnnnnnnnnnnnnnnnnnnnnnnnnnnnnnnttatgatgtttcattaaaattttaataatgtggcttactgtattttgctcattgcattttctttgtttttgttggggccagcccgtaacattagttctggggtacatgatggtctctccagatacctgcacttatgtgtatgtacacacacacatctaatttagaatgaaaatagttttgttttgttttgttttaaggaagggaggattaatctcagaagggtcatccatgtttgacaaatagtcctttacttttactttcatgacaaggttaagacacagaagtaaacttgttcttatagcagtcgggaagcagagagaatagggaaaggataggagacaagatagacccttcataggcacaccccttctgtggcccacttcctctagccagggtctgcctcctattgcccatcacctttcaatatgtcatcaaattatgttgccatcaaagggttaatcatagattgtattgtagctctcaagtttgtgatgaagggtcatttactcaataagttgtttactcatggaagctgtattctgttctactgtatcttggggtatatggatgtgtgtgtggatgtgtgtatgagtggtttgcaggctgtggtccagctagtacaacaatggctgtctctcaacagtccacaaaactggatgtctcagatggtcttcagtgtatgttggaatcccaaagcagtaggatatatgaacttgccaataagagtgagggcaagcagataaagagcaaaagctgctgtcttccatgtcttttatataagctaccactagaaggtgtggcccaggtttagggtgggtcttctgaccttaaatgatccagatttaaagttgatctttcttaattactgttctttttctgtgaagagacatcataaccaaggcagcttttacataggaaggaattcagtgggggggtcttacttacagtttcaggagcttagaccattagcataatggcagggagcatgacagcagacaggtatggtgctggagaagtatttgaaagctgtatcttgatttgttggcagagaaagggagactaggcctagcatgagcttttgaaatttcaaagcccacccccagtaacacagttcctcccccaaagccacacctccttatccttctcaaatagagccactccctgatgcctaaacattcaataaatatatgagcatatgaggccattcttattcaaaccaccacacttcactctctacccccatatatagccatatcataatataaaaatgggttcagcacaacttcaaaattccccataatctgacacagtctcaacattgttttaaagttcaaattctcttctgaaattcatggcagtttccttaactgtatccccctataaggtcaaaatcaaaaagcagatcatatacttccaacatacaatggcacaggataaacattgtcatttcaaaaggaaggaagagaacatagtgaagaaataatgggccagggcaagtcttaaaaccagaagggcaaactttaaattctgtatctccatgccaaaacactctttagatcttcaattcctttcaactttgttgactgcaacacacttctctcagtctgtttccactcccagtctgcaattctccttgtcaggcaagtgctcggctcgcctacacagttcatgtcatctattttgttgttactggggctccctcaccaacaggatttctctatgtggtcctgggtgctctggatctagctctgtagatcaggctggcctcgaactcacagagatccacctgcccctgcttcctgggagctgggattaaaggcgtgtgccactactgcccagcactccatttttaatgtattttccttgtggtatttatgtagataatatacagattatttgccctccccaaatttttacacaaaagttggcaaatactgtgcttcacaaccgaccttttttcttctaacaataaaacttgggcctggatctcctgagttacagtctcttgccacaagtgtaatgcagttgttaagagtgagcactgatgtgatgcagcgtcacagttcagttcatggccctgcatatctgccacaggctctgcttcctcttcaagttcacaagcaaaaggaaggtcacttggtttttgttctcagtccttttttctctgggtacatacacgccagccaagcgtggcgatcactggagtcagaacttgcagctccttttttgtttcttcatacaatcctttgcaagactccgccaggctgttttgttagagtatcagtgtaacttgtctcactgcttactcactacatttcttactggtcacatatttcatgtgtcacacgttgtgtgtgtttgtccccatttgtagtgataaggtttccttacttccagagtgtttggtgaacctcatctgtggtatgttatttgggcatcgtactgttctctggatatttttaccaaatgtttagcatgcagtgatggtttggctgtaaatcactttttattctatagtctgaatttgttttaacagtgaaagtagacactcagtgaggtcgggcatatttttgtgtgtacgtttgttcccttgtttttatttatctcttaacttggatgtctttcttttattgtgaggaagtgagtctttaaacatgaacatgagtattccccctatttgtttcgggccccaattttccaaggtctggggttacagattctcaccacaatgacctatattaatttataatattggctacaaaaatctggaatttggagactggaggcagataactagagtatagaaatgttattttaaatatgcatttttactctcatatggaattgaaatctctaaagctatgttactgtttgtatttgtttatgacttgattggaaatttaatatccttttgggcttgtttttatatagttttatgtaatttatactttatttttctgctatggatagatgttagggtagtaaagggccttattaaaactaacaaatcatttattgaaatataatggagtaaaaatatgtaattctttttaaatttgttttcataattttgagtttcatatatgaatatagtgatttttagttgttttgtatctattcttccctctgatttcttcttcccttgccctttgaagccctttttcccaacaagtaagtgtgtgtgtgtgtgtgtgtgtgtgtgtgtgtgtgtatttgtatgtttcctactgagtttcatttggatgctcgcatgaacgtgggtgaaaagctgtttactggaaagtgggcaccttcgtccccagcaactgttaactgccagcagcagtcccttgggagtcttgggtcttgctggcttatgtggtataaccaccgctgcagtgagttgggagttcagcggccctgtcatgtcctcaagactcttttctgcagcagatccctgctccagctcttacattctttctgcaccttcctccctgagtcttgaagtgttctttttggatttttaaggcataaataatttattatggaaatagaatttggcaaaaattactttttatctagccaagtctatttaacctttcatttattcatactttcattctttattgcatttcttttgagtgttaaggtggcagcatagaatttaatatgctttcttgagctgtgtacatagaaatgaaccccagtagttctgcttaatttgatttcctttttgtttagagtttataatagatgagatggaactcacacgtgctgtttgttattatgacagtgtgtgcaaatcatctgctccaccctctgaggcaggaagtttaaaggcattctcttggtctttaaagtgttgatttttatcttcttaggtagaactgaagtttcccgcacccggcaagcctggaaattatcagtatacagtgttcctgagatcagactcctatatgggcttggatcagattaaaccactgaaggtaggacaagtgagcagtcactgagggcacatggagtgggccctgagcaaatgcctgaggcaggctggagacagagaaagaccacctcatacgccttcagtaatagctagatttttagggagccctgaacttagattgtacgttgctttagtggtcgttttaatgcactgtaacatgtgatacatctcagggctttaaaaaggctggtgggggtcagatggagacaggactcatttttccttagactttactggagtgtttgttgatttctgaaatgaagattttttttgtacttttgggtttttttgttttgttttgtttttgtttttttttaaatcatcttagaacataaactttgtgtatggtttgaaacacactttactcatttcccttgagcttttcatacacgtcatctcttagattagtgagattgtgctaaatgattgtgacactgttgagagtaaaggagacaggaaaggtgagtctgtctttcctcctgaaagctctgtatttcttgtgttggccatagaattttacttcctagaagtctttggaaggcatacttgaatttttctttcttcagccaaagacttctaattagagaccactcagtgttattgcttaggaatcatggttgctagtagtttgtgccatagaaatactttcttaaatgcttgaacttccacagagtcaaaatgttgaactatattagaaattgaattacattactaagtatatttagcgtttttatttgcagaatgaagaatctttgtaatgaatgtgctgaatgtagagttgcagctacaaagttcactctctgtgattgccacagtcagagaaaaccttcactagatagtgttttcattattcttctccaaatttctgacatacgtatttaattgtttatagttggaagttcatgaggccaagcctgtgccagaaaaccacccacagtgggacacagcgatagaaggtgacgaagaccaggaagacagtgaaggatttgaagacagctttgaggaagaggaggaggaagaggaaggtggagactaacccgagtgagtggactacagcgtttgcacatccttgcaaacattgctgctctgtgagaggtcataaagcagcagcagtgagggctgatatggagggaagggttgccgactttactagaaacggatgcaaaaaagaggccgctggtgccagggtacaatctgaaaagggtttttaaagcctttcaggtatggggtggtgcgtttatctcatctgcaaatgataataaatcctttgatgttccaactgtccagaagtgtgggctgtgcattacctgatagattatgctctcagtaaaagtcaaggcacatgaaaacaatctataaatgaggagctcttctttgttcagctttagttttagtaaacattaaaatatgataagcatcacacatgttttaagtaatgtctgctcaagtttttaatctgttagtaagctctattattcatttatcaatattttacaaatggtaagattgtaacagttccatatgtaagttgaaaccataattttcatctatcttggccataacttagcattctcacacattccacataatacagagggctacattttagaattttccattcttaattgcccagagttagcagacgttataaaagtggcttttattggcttacagcctcttaaagcctctggtggtgtcagtgcaggatcgaattaatccgataagcttcagggccaaaagttactccgggaccacacgttctctgacgctcggttgatgtcattcagccttttggaaaaggttcactagaaaagctgcactacattcgtagtttaacctacctgactctgtccgaagccttctgaagacagtaactacagcatacaaaggaggcacttttgtattcatttggactcctgttaataaaatagaagtttgactcattttatgtttgtaatcgtgtgtgtctttttactcctagagaaagggcataaatagggtaatgttttatttttcaactctaaagtttaatattgtacctcactgtggaagtgactgctatctctgtctactcttggaaagcccaggaggaagaactcttctctctcatttagtacaacctaaaagatagtgctcaacacagagtagaaatgtgtgtgtgatgagtcactgaggtcagaggaatatttttattactagacatagaggacacacacgtctacagtactataagactgactgcaataatcctatcaaactctccataggccaaagtactgttgcaatactaacttatcacctgtttatttaaaaggttgctactcttcctgcagaattatcgctggtattttgttactacagtagttggaaataaaatttaaaaattaccaaaaatgaattttttgttattgttctaaatttaagatgtaacatgtaatagttgttctcactggaaccctgcttccttcctctgcaggcccgggggtgtggctttgccttcagatcgagactggctgggaagctccagggttggctggcgctgttagacgcaggcgggagggagggagggagggagtcagctgtgtcaggtgagcagagatgaacagccagagctgtgctggtcacatttcctagttttcctgagggagccaggctcaaggaccgcttctctagtggctctttgccctctgaaaggtatacagactgttcaaacaactggcttctctggcttgagagtctctggtgaggattttacaccctgataacagcaccatgcttacaaaacagcatgtcttccatgattggaaattccaacaacttgattctgtttgcctatgttgtgatgtgtagcaacatctcaacctaaaggaccagttttcctcttaacaagtgctttggggaaagactccagctagggtgctcgtctctctactcagtcacttaactccacatccctatttttctctggattaataatttgtctgagtttgcatttagttgaagggagatacagagtgaaattgattatgaaattaagtagtttacattgtgtaaaagttttaatctctagatctgcagaatgtctgtcaaaatagagctttccacaaggggtcttcctgctagtggaaagtgtggcaggtgcgaaggctgacatcgggccacctgactgaggtctcagacccaaaagcagatgttcgcagtctctaaactgttgggatttttgagaagactcgagacattgaattaagattctgtgtgtggagcaatctcgttctttgctctgcctttcccagcatgccctaggggtggagaagaacaggctgttgagtggtactgtcctgctgtgctgggacgttcgggcctgtccgacaccagttcctgccatgtggaatgaggcagtgtactgaggctttctttgtgtgacttgatttgtgttttgtttttgagactcactatatagccttggctggccttgacccacagtgtagcctaggatgtggaccttgtaatcctcctctggcctccgtctccggagtaataggattacaagcaagagccaccacgcctggtgttaacgtatctgctacatgtattcaggtatccgctccagctgcctcctaccatacactggagtgttgtttagtaataatgtgtatttcaaatgcactacatgtttttgagggattgtttatcatgtatttactgaatttccatgtccgggctctgtcattaggcactgtagctatatggacactctctgtgttaaggacttaacttggacttttagtcagcacatggtgggaatttctcctttctccactggcacagtggccaatacctcccctttcctttcctttcctttcctttcctttcctttcctttcctttcctttcctttcctttcctgttgttgtttgtttgtttgtttgcttgagcttgtcactaggcagaggaattctgtttgaaggaactagctattaagttaggtggcctttgcctagccccttatcccttttgaataaagcaacatgcatcttttgttgttaaatgcttcttttttgaagcattttctcgactctatgaatcccctatttagtctgccttaaagtgaaacaacgaccagtgaaccgaagcatgacattttaccagctgtgcagtggttagctaagtgtgtcttgagatgttagcatcatcatgcacttaaacttgacactagggctattttacaaaccttaacaaacaaaacagatgccaccttgtacattatcctgttactgagctaaaaatccaaatagcaatcatgggcatgctttagaactgtggtttcaggcaggggtatacatcctgggggtatgcagatactaagtccattgagaaaatgttaaaataatgattctttgtatttaatctcatccttttaaatttctatttttatgtgttttataatgtacataatatattgtacagttgtacacttatataatttataaataaataatacatttattggtgcattattttttccctgatttcggtgtgtgatgaaaagattcgtatactactgttttgtcgtatagataggatgacgtttcaatgagctgaaggttggggcttttggcactctgctatctgagttgacagtgacatactttgacaccaggaggcaaggcttcatttgttgtatctagatctcctgctgcccagaagaacaaagaggatggatgcccttggagtggggccatgaaagaggaaggactgtaccttccatgagctgggtagtcattagccgctgcaaattaaaggctggtgtgggaaggaccatccctccagtgcagaaggagccacgtgcctgcatgatggtagcagtgaccaccacttaggtatgagccgattgtaaacatcacagttaccctgtattttccagcctggttccagtagagggcgatagggccatagttcattttctttataagaatgtttggggagactaaaccaatacttcaaaaatgatttttatttatttatttttgagatgagtgattgcatgtttcccagtcttgcctcaaattcttgaactcacagtcttccttgagtctcttgaacagctgggactgtaggacagcaccactgtgcccagctttatattgtgagagaagggccagtcaggtaaaacgttgatgtgctccttataaaattcagttttttgtatggtgtcagctacaagggtctggcatttttctctttgtgcaagctaatctgccacattttctggatgctagctccaactcccaggtaaggtacaccgtgagctctatgtcacccaaacctctcctgtcctccaagttacatgggggcgatgccaagtgcctcaggttgacattgttcatatcaacagaggaacttggaaatctagtcatttaaaatagtgtgtgtacagagctgttcactctttactgctgtaacagcatgtcctctgttacgggggagatgatgcctgtctaccatggctgtttagacacacgtgtgagaagggcagcatgcaaccaaagtgtgtgtgtgtgagagagagagagagagagagaaacagagagacagatggcacgcactaaagtgtacctaaaggtaagagatgggcagtggccttttagcatgtgggatactgtatgcataaataatattataccaggaggtgcagggcacttactttaaatggaatacggtcttagtttaaaaagaaaaaaaagaccatctcatttggtaatgtacatttaagcctcttgcaaatgtttgtcttactattaagggtagctttgtttcatttgaagatagttcacttacatgcagctactaatctagaactttgtacatggaattcagtctgttacagtgagaaaggggctgtctgaaaagtgaccactacacctgttgtacattgtaaccttagaaggttttgattattgccatctgcacccttccctagcaccctgccaggctgctgtgggcctccctctgctgggagtaatcagggggcccctgagagcctgttctgaatgtgaccagtgatcctcactgccctctgagggcagattgcttactgctctgtctctgacatctcacttggagagagtacagagaacagagaggctggtcacatttaccagtgagaatgttggtttaaaaaattcagtgaaggactagaattgctggactttgaaacaggttggaggatttctcaggggaatatggcatccagtaagaggcctggggtgaccgtacctcctcattgccatgcactgccaaccttcatccccatcctgttaacttgtctgtcttcacaatcacatgcaaaggttctccagcttcttaattccttgattctctgccacattcttgggactctagtcacttcccttcaaaagcttactgttcctcttgacaacacattaaacacacagggcagtggcaaggagaatggagagggcaggagaaatgcccatgtgacaggcttcaaggcaccctctttggctcaaagctccggcttcagaacttgtgggtaagttttcccacgatccctaggagcgcctgccccacctccccacccctattcacaggtctgcatctattatgatggaaattatcaggattaatgtgattatctgagaagtgcctttgagagtgggggtgagactggtgttatgatctactgcagtatttctttgcacaagacaagcccctgtgtctttcaagtgttctgacttaatgacagggtatcccaccaaatgtcaggagtgacagacacctcaggagcgcatttttcacatggagttttaagtttagcagtactaagggtggagtagaattcttatatttggtgtgttacacggtggaacagtttctgagagtatgaaatctttaaaaagcctttacctcctgatttctggaattttctttggtgcttagcatccaattaatctaagtccctccaaagaaaagcacatgcaaacagaatctttgaggcttgggcccgacgcgccttccttgcagtggtaccacggcaggagtggtgagagtgctgagagacacttggctcctggctttcccctctgagagtcagacatgatatgaagaaggaacataaagaacaaagagccagagaagagggggtttgttacatctggagagctgcagtggggacccaggcatccctgtgcacactccaaagcccccgttcctttgtctttccaatgcatgtgtggatatggaaatcccatcctagtgtgttcagcaaccctacctcaccagctcacctcagccatgagtgttcccatcagtcggcctggggttacacatgactcagcccctagctcagggctcgcaggctgcaacaacactggatccagctgtgtccagctttgtgagattccaagttgggtaacccatgttagctaaaagcatgaaagtgcttttttaaatccctctcaggtcagagattgaagtgttcgttgtaggtctgtcttgagtgatatactctcccccagtcttgaatgtggtggccttaggagcccaagagaaccccagacgctcaaaacaccgtccccactcactcactgttttctacagtgtgggcccaagagccttcacttttaccaccttaacccaaagcattagaaagatctgttcaagacacctttcttaaccaaatcagatagtttgttgtttcttagagacttgccttcctgcccagaggtagaatccagggccctgggcatgctgagaagcacaggtagactgagctatgttcccagcacacctcccgtgctcacaccttaaacttttgtatggatttattctttaacctttttttagtaaattgtctaaggctgcactttcagtcctcctgctggaattacaggcctggcctggagaatttttttgatgttaacaaagatgaagggtaaaagtgaaggagctgctccgggcatgaacactaggtcaagttcaaaggctcataaaagctcttctcagttcgatttgctggtacccagcaatatgctcataataagaaaagacatacttaaacttgcctcatgcagtgcacagtctgcatgatttccttaccactgagctactgtttgccctggtaggaggctttcagagtaactgaagtctagctcattgagcatactgttgaactgaaatgggagtggtgtcctgctcagatatttgagggtgagactccctgtgttacttctcatgaccctgagaaggttagggttcgggttggatgcagtaaaaagtatgttaaaatcccagcacagggcttgtgaggttggggcaaggagcaagccaggagaccatgatgtccacatgtcctgagatcatggggtcaagactagagttgccgatgttcacagctgctagaagttgagcaaatgaggggtgggaactgacttttccccagaggagacagtgttgatgttcatatgagcagttctagcaaatggcaagggagagtaaaatacggtagaaattaacaaagccacgcgaagaactcacagtgtatgtaaggcaggaaaagaccccatgtattccctgtaagatcagagcaaggcagggtgcccattttcaggtctattcaacctgaagctgagatttcaagcctgagcaattagggaagagagagaaacaaaaggcaacaaaatcggaaagaaaaaaaaagcgagctcattcctgttcacacacgctctggttctgtatgcaacctgttagatctcacagatgagttcctccaaagttgcagaatgcaaaggcaacatataaaagttaattgtatattctgtacattacagtctgagaagggagtcagaaaaaaaacgattctgtttacagtgtcatcagaaggagtaaaaagcgttaggactaaactacggtgatgaggactatgaagtattgctgaaggagattaaagaagacacagattccacactcctgatagaaaggctgaaaattagtgaggcgtcagtactcccgagttatccacagtcagtgggatcctcagagtttttgttgcatttttcattttgtttttacaggaacggaaaaacagccttaaactttatatggaatttcaagggagcccttggagtggggggttgggggagaacaaggctaaaggagccactcgtgtttattttaaaacttactacactgccataatcaaaacagcatgctactgacatggcgacagacagacagactgactaatgaaagggaatagagagtctagaaataagtctttgcatatacggtcaattttttgtcatttgtccatttttattttgtttgagccagggtctctctatgtagtcctggctgttctggaactcacagtgaagatcacgtacacaggaaatcacagagatctgcctgcctctgcctaaagggctgccaggactaaagggatataccaccacacccatattggtcaaataatttttaacagaggtatccagaccagtcaattgagaaaaggtggcattttcaacaaacggtactggaaagaccagacatgcataggaaaggaataaacttggagccttacttactaacatcatacacaaaaatcaactcacaaagcactaaagagctaactgtattaagacctaaggctataaaaaactcttaggaaaaaaaaatacagggaaacccttcatgctcttagtctagcagtgatcacttggataagacacctaaggtatgcacaacaaaattttaaaaaatagacaaatttgatttcgtggaaaatgtctataagcctagttcttgggaggaccaaaatttcaggggcagcctgggctatacaggaaaacatctttttaaaaatggggagggtaacatagagaaaagctacaaagtggaaaaatagttatataaaattaaatattaaataaaattctatgtaaatatatatcctgaatatatagagaagttaaaaaaactcaccaaaaaaaacaaaaaaacaaaaaaaaaaaaaaacaagctacctgcttcaaaattggacaaaggcttggataaatacttttatgaagattataaaaatattcaagtaaattcaccaggagttgctcaactacagaagtgcagtgtcagtaacctggctactgtaaaggaaacaaagtaacaagtgttggcaagaagccgaggaagctgggactcttgtgcgttgttccactgatccccagatgctccactgacccccagatgctcccaccacagtggctcctcagttggcctgggggagcggtctctgctgtgtacctgacagatatgacagtagatgttggtacagtgtgatccttgctgtaaatagctaaaacgtggaaacaggtgtagtgagaaatgttggtttctttaaaaaacccagttatgttatgtgattatgttttaaccctgggtacggatatggggctgcttcagattgtctgcagcagctgactatgatttgtctcatgctctggcaggggcgtgattctgccagctgcggaatagtttacgtttggaattctggggactcttgaaagggtataaaacgtgccagagttcagagaggtaggggaggctactgctcttcctgctgctggtggtttctattgctgtggtttgtcaagtggttgtgagcaaagagacaagaagaaataggatattttgatgaagaagatcaacactgccccaaggaatttgacactcctagtcagcaggaaatagtctaaagagatggacacctctttctcctctaaacacctctttctctcctacctagtgttagggggttgaatgggattggggtggagaagggtggtaggtaaaagaatggttacaggaaatgacgcaagcaactactgttgaacaaacagacaaaatgaactggctactcagccttaagaaggaaatagattctgccacatgctaaagcacacacaaaccttggcgtcatacacaatattgtgctatggaaaatataagtcacaaaaggtagctgctctgtgattctcagtatttgaggcactttactgttgtccaaagctgagagtaaagcagttgtttctgacactggaggaaggaaaggtggggagtttcctaccgtgcaatcggcacagcacttgtgttacaagacagaaagttctctggaggtggatggtggcgatggctgcctatgatgagtgtactaagtagcactggaggatgcgtaccaaatgtctaactaatgtggtaactttcattttgtgtaatttgccacaataaaactaaaatggagagggggagaggagatctagtttggcattggaataagccacatttgtggatggtacccacttgatgtatgcaccaggctggtgccagaggacacgctggggtggtgtatggcgagaggcattttaggatacagaatttcgacgctagcacgtccatttggggggaggaatgatacatggtcctgtctcttgccgtatacaacaattaaacccaggtggcatctaattctaactttgaaaggcaaaacaatggggtcttttagaaaataatgtagaatatgtttatcacccaagggtaggaaaatacattttaagcaggatgcaataaacattccccaatggaaaaaacaaattgaaaagttgaatggtatttgaatgacgagtctcttgtttttcaaagacagtgagggagcataaaagcgaggccacagagtggggaaggtgtctgccatccacgtaactggcagaaaactggcctctccactaagcaaaatcacaacaaacttaaaaaaaaatggcaggggttgggaagaaaatgggctagtgacttgaaaacagcccttccttcctaaacagtttttaggggcagatcctgaggggtgggaagtacaaaagatttcttttttccccctaaaatgtttcttaggaatcaggactttcaaacaaatgcaagaggaagcatctttgactgggaaaggagttggccccagtgcagacctgggccagctggcgggaagctcaggtgtgaagcccactgccctgtactgacagacgggtgggcctggagccctcccaccaagtcagagctgagccaccaggaggtgaccccgagtaaaatgttctatatgggtctagagagatggctgggcagctacggaggactggggttcagctcccagcacctgtatccggtagtctacaactccagtttcaggggacctgatgccctcttctggtctctgtggacactgcgctcatgtgtacatatcctccctacacgtgtacacataattaaaagtgaaccgctttgaagtggttctgtgtggtgaaggcagcttccagagagctgtttgctgtctgtagctgaccccat

SEQ ID NO: 704 - DNA, 3771 bp, Mus musculus
cctctcgcgagagttggcgacggccgcggcggcggcggcggcgtgtccgtgagagcggcgtgggggcggggaggagagcggcggcggcggcggcggcggcggcggtagcggcgtccgagctacgccacacggggccggggcgctgggagccgggagccggagcgcagcgcggggtcgtggcgacggcggtgaggggagcgcggcggaggaggcggagccatggcgggccagcagttccagtacgatgacagcgggaacaccttcttctacttcctcacctccttcgtggggctcatcgtgatccccgccacctactacctctggccgcgagaccagaacgcggagcaaattcgattaaagaatatcagaaaagtatatggaagatgtatgtggtatcgtttacggttattaaaaccccagccaaatattattcctacagtaaagaaaatagttctgcttgcaggatgggcactgttcttatttcttgcatacaaagtttccaaaacagaccgagaatatcaagagtacaatccttatgaagtactaaatttggatcctggagcaacagtggcagaaattaagaaacagtatcgcttgttgtcacttaaatatcatccagataaaggaggtgatgaagtcatgttcatgaggatagcaaaagcatatgcagctttaacagatgaagagtctcggaaaaattgggaagaatttggaaatccagatgggcctcaagctacaagctttggaattgctttgccagcttggatagttgaccagaaaaattcaattctggttttacttgtgtatggattggcttttatggttattcttcctgttgtggtgggctcttggtggtatcggtcaatacgatatagtggagaccagattctaatacgtacaacacagatttatacatactttgtttataaaactcgaaatatggatatgaaacgtctcatcatggttttagctggagcttctgaatttgaccctcagtataataaagattccacaagcaggccaacagataatattttaataccacagctaatcagggaaattggcagcataaatttaaagaagaatgaacctccactcacctgtccatacagcctgaaggccagagttcttttactgtctcatcttgctagaatgaaaattcctgagacactggaagaagatcaacagttcatgctgaaaaaatgtcctgctctgcttcaagaaatggttaatgtaatctgccagctaataataatggcccggagccgtgaagaaagggagtttcgtgctccaactttggcatccttagaaaactgtatgaagctttcccagatggctgttcaggggctccagcagtttaagtctccccttctgcagctccctcatattgaagaggacaatcttaggagagtttcgaatcataaaaagtacaaaattaaaactatccaggatttggttagtttaaaagaatcagatcgtcatagtctgctacacttccttgaagatgaaaagtatgaagaggtcatggcggtccttgggagtttcccgtatgtgaccatggacataaaatcacaggtcttggatgatgaagatagcaacaacatcacagtaggatccctagttacagtgttggttaagttgacgaggcagaccatggctgaagtgtttgaaaaggagcagtccatctgcgccgctgaggagcagcccacagaagacgggcagagtgatgccaacaagatcaaggcaaaaggaggatggcagcagaagaacaaaggacccaagaaaatgcccaaatccaaaaaaaagaagcctttaaaaaagaaacccacaactgtacccttacctcaggcaaagcagcagaagcaaaagcaagcaaatggagttgttgggagtgaagctgcaataaaggaggaagaagacgacatttctgacaagggcagtgattctgaagaggaagaaaccaatagagattctcagagtgagaaagaagatggtagtgacagggagtctgatagagagcaagatgagaaacaaagcaaagatgatgaagcagagtggcaagagttacaacagagtatacagaggaaagagagagctcttctggagaccaagtcaaagataacacaccctgtctatagtctctactttcctgaggtagaactgaagtttcccgcacccggcaagcctggaaattatcagtatacagtgttcctgagatcagactcctatatgggcttggatcagattaaaccactgaagttggaagttcatgaggccaagcctgtgccagaaaaccacccacagtgggacacagcgatagaaggtgacgaagaccaggaagacagtgaaggatttgaagacagctttgaggaagaggaggaggaagaggaaggtggagactaacccgagtgagtggactacagcgtttgcacatccttgcaaacattgctgctctgtgagaggtcataaagcagcagcagtgagggctgatatggagggaagggttgccgactttactagaaacggatgcaaaaaagaggccgctggtgccagggtacaatctgaaaagggtttttaaagcctttcaggtatggggtggtgcgtttatctcatctgcaaatgataataaatcctttgatgttccaactgtccagaagtgtgggctgtgcattacctgatagattatgctctcagtaaaagtcaaggcacatgaaaacaatctataaatgaggagctcttctttgttcagctttagttttagtaaacattaaaatatgataagcatcacacatgttttaagtaatgtctgctcaagtttttaatctgttagtaagctctattattcatttatcaatattttacaaatggtaagattgtaacagttccatatgtaagttgaaaccataattttcatctatcttggccataacttagcattctcacacattccacataatacagagggctacattttagaattttccattcttaattgcccagagttagcagacgttataaaagtggcttttattggcttacagcctcttaaagcctctggtggtgtcagtgcaggatcgaattaatccgataagcttcagggccaaaagttactccgggaccacacgttctctgacgctcggttgatgtcattcagccttttggaaaaggttcactagaaaagctgcactacattcgtagtttaacctacctgactctgtccgaagccttctgaagacagtaactacagcatacaaaggaggcacttttgtattcatttggactcctgttaataaaatagaagtttgactcattttatgtttgtaatcgtgtgtgtctttttactcctagagaaagggcataaatagggtaatgttttatttttcaactctaaagtttaatattgtacctcactgtggaagtgactgctatctctgtctactcttggaaagcccaggaggaagaactcttctctctcatttagtacaacctaaaagatagtgctcaacacagagtagaaatgtgtgtgtgatgagtcactgaggtcagaggaatatttttattactagacatagaggacacacacgtctacagtactataagactgactgcaataatcctatcaaactctccataggccaaagtactgttgcaatactaacttatcacctgtttatttaaaaggttgctactcttcctgcagaattatcgctggtattttgttactacagtagttggaaataaaatttaaaaattaccaaaaatgaatttttt

SEQ ID NO: 705 - protein, 736 aa, Mus musculus
GERGGGGGAMAGQQFQYDDSGNTFFYFLTSFVGLIVIPATYYLWPRDQNAEQIRLKNIRKVYGRCMWYRLRLLKPQPNIIPTVKKIVLLAGWALFLFLAYKVSKTDREYQEYNPYEVLNLDPGATVAEIKKQYRLLSLKYHPDKGGDEVMFMRIAKAYAALTDEESRKNWEEFGNPDGPQATSFGIALPAWIVDQKNSILVLLVYGLAFMVILPVVVGSWWYRSIRYSGDQILIRTTQIYTYFVYKTRNMDMKRLIMVLAGASEFDPQYNKDSTSRPTDNILIPQLIREIGSINLKKNEPPLTCPYSLKARVLLLSHLARMKIPETLEEDQQFMLKKCPALLQEMVNVICQLIIMARSREEREFRAPTLASLENCMKLSQMAVQGLQQFKSPLLQLPHIEEDNLRRVSNHKKYKIKTIQDLVSLKESDRHSLLHFLEDEKYEEVMAVLGSFPYVTMDIKSQVLDDEDSNNITVGSLVTVLVKLTRQTMAEVFEKEQSICAAEEQPTEDGQSDANKIKAKGGWQQKNKGPKKMPKSKKKKPLKKKPTTVPLPQAKQQKQKQANGVVGSEAAIKEEEDDISDKGSDSEEEETNRDSQSEKEDGSDRESDREQDEKQSKDDEAEWQELQQSIQRKERALLETKSKITHPVYSLYFPEVELKFPAPGKPGNYQYTVFLRSDSYMGLDQIKPLKLEVHEAKPVPENHPQWDTAIEGDEDQEDSEGFEDSFEEEEEEEEGGD

SEQ ID NO: 706 - DNA, 107543 bp, Homo sapiens
agcagttgcctgcttttgtcatcttcctgtctctggaagagcacctgatcctcactaccaaaaactaaatggttttaaaaggacaaaaatggtctcagcatgattctacagctttcttaagggcaatgttttcttttcaaatgctcaggctgactgtattctagaacttagcatggctcttggcacatagtctcaatatttaaataaatgaatgaatgaatgattaaatagttctgaaaaggagcaccagaatagcttggaggaaggaaccaggaagcaggctgcctccttgaagtcctcacttttgacctcatgtacattcaaaaaaattacattcacacatatccagccagtgcaatatactttgtttcggtgaacttgacatatgaccaacaaataagttaggaagtgattattcactgtgcaaaggattatttgattcacagaaatgattccctagagcagtgtggtttccagaccaggagcaggagtatcacctgggaacttggtagaaatatgaaacttgggagccgccgtggctcaggccggttgccctggcactcggggaggcgaggctacacgttcgaggccaacctggtcaacactgattaaaaaaaaacaaaaaaaaacttgaccctgagggcctgaatcagaaactctggcttggggcctaacaatttgtgttttaacaagcctttcaggtgattgtcaggctgctaaatctgagaactactgccccagaggagtttcttaaatgaaaagctttccacctgataatacaaagaatgttcaagaacacgctaaggtgatcttagctaaattttatgaccaagttccccaatgcacctgcagaaaatttctggattgtagttgcttatttatttaataaagcattttatatgttaatatgtatcatttatttatattttatataaataaatttatggaataagaaaaaatcacagtggtttgcacatgatatttttttcagtaacacactgagccataatgtaaaatatatttattatgaataatggtcaaaaataagtttgagactgggcacagtggctcatgcccgtaatcccagcactttgggaggccaaggtgggtggatcacttgaggtcaggcgttcgagatcagcctggccaaccctgtctttactaaaaatacaaaaattagctgggcatggtggtgcacgcctgtaatcccagctacttgggaggttgaggcaggagaattgcttgaaccgggaggtggagattgcagtgagccaagattgcgccactgcgctcctgcctgggcaacagagcgagactccatctcaaaaaacaaacaaacaaaacataaattagctgggtggggtggtgggcacctgtagtctcagctactcgggaggctgaggcaggagaatcgcttgaacccaggaggtggaggttgcagtgagccgagattatgccactgcactccagcctgggcaatagagcaagactctgtcccaatcaatcaatcaataaggctctttactgctgtggtcctgactcagattcaagcagtgagctttggttggttggttgttgtctccttttttcccctgagcgtctgggatttagtgacaggagatgcaggtacttggcaggacattaagatatctatgcaaaactactaatatgtgtgtaatactatacttaacaactgttaagagcaattcgtttagcatttatctacctagaaataaagcaagaccacctcaatgagaacaaacagatgctgtttattcagagcttgctatagcaagggattctgccactgttccttgtgtttggcagagactcagagccaggcaggggagtggggaagctttggaatggaaaaaagggaaggtttcaggtatgcttagattgcaggttgttggcatggggaaattggaggcaggctaactagaagcaaggcatcctatgtgattagtttatgtgtgtttggctggttgatcctgatttggaagtggggcaaaaaattgggaagctggtagtcattgaccacatcctaatgttctaggccagttgttgtggaggctgtgggttggctccctggactggttgccataaaggttgtaggcatatagttctgcccattgtctcactagccatgaacgcaagacaacaacttaacctgtagggcaagtttattcatttatttaacactatggtcttttgccagcttgtccggtgaatcagaaattaaaatgagggctgaaacaagtcaatctgtagttcaaagtttccctccccctatctgatttgtcagtgttggcagggatgtgctcacacattaatgttaccaatatgcttttggtggactagaagtgctcgttgatgctgaaacttcttggctagttatcagacagctttagggcagatactctgatgagtctgtgctaatcttttttttctagatggactcatgctctgtcacccaggctggaatgcagtggcgtgatctcggctcactgcaacctctgcctcccgggttcaaacaattctcctgcctcagccctccgagtagatggcattacaggtgtgcgccaccacgcccggctaatttttgtatttttaatagagacagggtttcaccatattagccaggctgttctcgaacccctgacctcgtgatccacccacttcggcctcccaaagtgttgggattacaggcatgagcccccgcacccggccaagtctatgctaatcttgtgttagacttcagagctgagaatgctatcctgactccagctacacattcctgtggagttaccgggctatctttaagttgtttacagttactttcacttatagttgttgccatttccaggaatgctcctttccccataaggcaaactgaactagctttgtaacattgttgcaggacttttccttaagctaaagacagggtacttgtcccccagccacagaagtttaggcttgcaggccgtttgaagggtgagtaaagcagggttttattggttgaaaggaaaaaaaggggggaacagggatcctccacaaagccagagtccctgctggtgcgtttcccacctcccgttagaatcccagattccacacaggaagaggaggggccaggcttctgtagctccaccccagtgcacattcccagcgcaggctggttggagttttgccaagtaccccctcccacctggctgtctcaacatgaaagtgtgatacatcttgattcacattatgaatatatcccatggggcctggcacctgaagtatgtaggctgtggaggagaaacgttgtttgaaatgtactgagtcagaaactactctgaaaattcttccacttatcacatactaaaattataagctaagggtttgattctcttgactgagctttagtcaaatagaaacgtatcaatatgtcagaggcattcaaaccaaagcgactccatcttgaacaggggctgagtaaaatgaggctgagacctgctgggctgcattcctaggagatgaggcattcttagtcatgggatgcgataggtcgacaagatacaggtgataaagacccctataataaaacaggagcggtaaagaagcctgccaaacccaacaaaaccaagatggcaatgaaagtgacctacggttgtcctcactactcattatatgctaattataatacattagcatgctaagacactcccacctgtgccatgaccatttacaaatgaaatggcaatgtcaggacgttactctatatggtctaaaaaggggaggaaccttcagttctaggaactccccaccccaatcccaaaaaactctgaataagccacactttgtttagcatataatcaagaaataaccataagtatagtcagtcaagcagtccatgccactgctcatgccactgctctgactatgaagtggctttttttttttttttttttttttttttttttgagacggagtctcgtgctttggtgcaggccagactgcggtggtgctatctcagctcactgcaagttctgcgttccaggttcacaccattctcctgcctcggcctcctgagtagctgtgactataggtgcccgccaccacgcccggctaattttttttgtatttttagtagagaaggggtttcaccgtgttagccaggatggtctcgatctcctgacctcgtgatccacccgcctcggcctcccaaagtgctgggattacaggcctgagccatcgcaccgggccagagacttctaattttataagctttaagacccacagtatttgtttttcaacaaaatgattgacacaagataattgatatcttccctgaagcttgttttaatcctgagagttttctttcttcttactcaaatatatacctttgaaatttcccagagtgaattcttctatttatttatgaccaatctcccaagttatattttgatctgggtgggaaatttcagtaagtgctattttatggcataacgtgtagtgtcaatcattattttttcattaaagcactttacatatgtaggcgtcttagtctgtctgtgctgctataccaaaatactggacaccgaataatttataaagaaccaaaatgtatttctcacagttctggaggctgggaagtccaagaccaaggcactggcaggttcagtgtctagtgatgggcatggactctgttttcaagatggtgccttgttgctgcatcttccagaagggaggactgctgtatcttcatggcaggaggagaagggcaagacactcaaacactaacacttcatgaagtttcttttataaggaccttaatcccatttatgagggaggagcctcatggcctaatcatctcttaaaggccccacctttgaatactatgacattggcaattaagtttcaacacctgaattttggaggggacacattcaaactatagcaactggtaatgtatacaattaattcataaaggaatgacctgagtttgttgatgtatctctgacaactggctttagtgcaaaaaattctcagctttataatcacaaaagcagggatagaaaaagaacaataggttgggtacagtgcttgtgcctgcaatcccagcaaattgggaggccaaggcaggaggatggcttgagtacaagaattcaagaccagcgtgggcaacacagcgaggcagtctaccaaaaaaccccacaacaaacaacaaacaaaacaaacaaaaaccccacaaaattaacaagtccaacatactcataaaaagaaagaagtcaaaatacaaacctgcttccaataccaaaggaaaaccacagccctcaattcctcttttaggattgttttcatggttgaccttaaactagttttgctgtttttccaactcatacctctctttacattctctccagataggagattgtggttttgttgggtctgaagggccttagtgggtcaggaaataaaaggattgcaatgatttaataccttttacctagtcaaagttccaacatagggtcatgatttgaaatttcaattggaataatgttttggaagatttttgtaaatcataagtgttgtacaaacattactttgttgatgttactgttgtcataagcaggattggttactttgtatcagaagagatttagcctcttaatgaaaaaaatctctggtataacattaaagataacattaaaactcgggtttaacattaaagataattttctaggctttggcagtaaaggttatgttctactgtagcatgggggaaagggaagaagactggaagtaactgtgtgcccttatttaatcataatttggttccttccagtttctttgcagctaactccacaagtagataattaaataatgttgattatggctacagaaatatactttggtatgtataaatttaagtcaaaaatgtagtataaggataactggctaggagtgatggctcgtgcctgtaatccaagcactttgggaggctgaggcggatggatcacttgaggtcaggagttcgagaccagcctggccagcatggtgaaaccctttctctgctaaaaatacaaaaaactagctgggcgtggtagcaggcacctgtaatcccagcaacttgggaggctgaggcaggagaattgcttgaacccgggaggtggaggttgcagtgagccaagatcgtgccattgcactccagcctgggcaacaagagcaaaactccgtctcaaaaaaaaaaaaaaaaaaaaaattagccacgtgtggtggtgcatgcttgtagtcccagctacttgggaggccgaggcagaagaattgcttgaaccggggaggcgaggttgcagtgagccaagattgcgccactgcactccagcctgggctacagagggatactctgtctaaaaaaaaaggatgacttacaaagaaggaaagattcactctaaggaaaaagcaaagtatgaaaaggaaccccaaaatagtcaggctttctacagggaaaatgtctatctagcaattaaaacaaaattgattaaaatattcaattacagacataaatactaaaatgcccaatgccttttttttttttttttttttgagacatggtcttgctgtgtcacccaggctggagtgcaatggcacgatcttagctcactgcaaccttcacctcctgggttcaagtgattctcctgtctcagccttctgagtagctgggattacagtcgcctgccaccacacccagctaatttttgtatttttagtagagaccgggtttcaccatgttggtcaggctggtcttttactcctggcctcaagtgatctgcctgccttggcttcccaaagtcctgggattacaggcctaaatgccttttaatatatgctgttagactaaagacaagttttgtctgtagctttgcttcttccatatttttcttttttttgagatggagtcttgctctgttggccaggctagagtgcagtggcatgatctcggctcattgcaacctctgcctcctgggttcaagtgattctcctgcctcagcctcccgagtagctaggcttacaggcaccaccaccatgcccggctaatttttgtatttttagtagagatagggtttcaccatgttggccaggttggtcttcaatgtgatccatggcacccagccatattaatttacttttattaaatatctcactaaaataatttcttgaaacaattttattaggttaaaaatatctgctgggcatggtggctaatgcctgtaatcccagcactttgggaggctgaggtgggcggatcacctgaggtcaggagttcgagaccagcctggccaacttggtgaaaccctgtctctactaaaaatgcaaaacttagccgggtgtggtggtgcacgcctgtagtcccagctactcgggaggctgaggcatgagaatcacttgaacctggaggcagaggccgcagtgagccaagaatgcaccactgcactgcagcctgggcaacagaatgagaccctgtctcaaaaaaaaaaaaaaaagtgaatcagaaattgcgattaaattaattaaaggtatgattaagatttgctttggagaatatttgggtggtctgaggttatctatgttcagtaatattaagttctaggataaattatatgtatacttttgaaaatagaggatacattttcaaatcttgaacatgctttggttaaaaaaataacattttagattgatctggggttttttcaaattgctatttcaatttggttcaagccacttttaggcatgaccccaaagctgcagtgaaaatattattcctgcagaaagaaagaaggggagtatttatcatcaataacttatattgctacaaggttacaaaactgatgtattatctttaaacaaatgcccagcaaaacataataggagtaataaaaaaacagttcaacattattaaaaccgaggaagacttaataacatattcaacaaacaaaaggaacttcatgatcctgctcacttcagctgcaacaagtctgtgactaattttctgtagcaaggcaaattgttcactctgggtatatcagcgttgggagatcacaatgctatgttgatttcatagttcaaccttcccttcatttcttggttttattttttcacctataatatagttttgaactttgtgcagaaaaaaagtgaggagggaaatgcatagaaatgaatttcagaaatttcctttcaaagtgagtagataggaaatttgaagggaagagagaatacatatgaacacaatctattatgaaggaaagcattactgattaagatactagttttgaagacatgaaatgaaagacaatgagcaaccagatttttcctccaacaatggaaggaatattataatgcatttagttaacagagtataaagtattaaaatgagtccttgaaatatagtgtaatatttggtatttgcatattacactttctcctttgaaaagcattttcacaattagtcctttcaatctctgcaaccaggtgggctatccttttaacccagagaggggcaatggactttgggatagaccccagccacagctgccgctggaccgtggggtcgttcaaagatctgggcagaagtccagtttccagctcagcagacaccagcctctagggtcccacagccaggggaaggagaggctcccgagagcgactgctcccgccaccgtccatccctgaaatgcagtttcctgttcacaacccgcagggagaatgccagtcactgtcaggaaattttaaggtcctgggcgatggagggtcaagggcacactggctttgtggcatcaaaatgatatgggtttgaatcctcagacattcttttactgtgagggaccttgggcagtctctctgggcctcaattttctcatttgtagagcagacatactttgctttattccatggggtttactgatgactaaatgacacaaaacaataaaggtctcagcctaccgcctgaagctggtggttataattagcagctctggaatgggtagggaaccatctgtaacggcttggggaaatcttcatctgcaagatgggcacagcgtagattcaaatctgtcgcccagtggagagcgatccggtctcactgcaacctccgcctcccgggttcaagcgattctcctgcctcagcctcctgagtagctgggattacaggcgcgtgccaccacagccggctagtttttgtatttttagtagagacgcggtttcaccatgttggttaggctggtctggaactcctgacctcatgatccacccggtctcccaaagtactgggattacaggcatgagccactgcgcccggccagatagtaaacattgctttgaaaacacaactgcaacccacacctcccgcaacccacacctccccatcccccaattttttttttttttgagatggaggcgcgcgccaccacgtccggctaatttttgtatttttagtagagagtgggtttcaccatgttggtcaggctggtctcgaactcctgatctcatgatccgtccgcctcggcctctcaaagtgctgggattacaggcgtgagccactgtgcccggcctcccaccccctattctaaatgacacttgtttccaaaatatgggggctggaggagcagatccagaacccaaggaaacgtgatcaaccagggcaattaatccagagggcaggacaggctgagcctcagctcttctctgaatatctgggacccctgcgcagccaggtgaaccgcccgcgaccgctgctccggcgggaagccttctctgggatcctgtacgccgacgcccggaatccggcgtggtgcgctgggaaactgagcggtggaggaaggcggagcggttaggggcgggaccctaggggaggggttgggggagggctttgacgttagggcggggctaagggcgagacctcgccgagttccaccgttgcgctcgccacgtctcccttagcgagctcgctggggacacgcagggggagggaaaactgagcggggcgggaactatctcctctcgcgagagctggcgacggcggcggcagcggcagaggtggcggcggcgtgtccgtgagagtggcgtgggggcggggaggagaggcggcggcggcagtgtccaagctacgccactcgggccggggcgttgggagcgggagtgcagagcgtggtcgtggcggcggcggtgagaagagcgaggcggaggagggggtgccatggccgggcagcagttccagtacgatgacagtgggaacaccttcttctacttcctcacctccttcgtggggctcatcgtgatcccggcgacatactacctctggccccgagatcagaatgccggtgagtcccgccggcctttgcccgcgaacccgcgcaggccccgccagcgcccccaggccctgcggcgcccgcttgcccggccccagcccgcggcgtccgggatgacagggacggtgcggcccggcctgtgtccagcgtccgccactggcggggcccgggtcagcagcgtttccctcggcgcttctccacctcccttcattgtcctcaggagtttcgctcgctccatcttctccattgttgtggacgctccttgcagcctcctcctgcctctttgtcttctctgcctttgcttttattggggatttttctttatggaggaagcgggatggggacttgggaggtgagcaaagagttggccaagaagagactgaacgtgcgggcacaactctcagtccgtccagttcgcggccctcatcccccgactccggtttccctgttgcagctgctcttaacagatgttttagggcatctctgagccgggtggcatgcttaggactccaattgagctttccaccgcctacccccgtcacttcctcccgttgctttttcatttgttcactcactgtgggggttggaagcaatgccgttattcctcttagcaaaaataggcttttttctatttccttttcttcggagtttcctgtttgtgacggaaaaagtgcaagtatgaaggattaagtctcgtttaattaatcttgtagggaattttgaggtagtgggtcgatttacttttggttctaagtcttttcacattaaacaacatcgaattaaagcacagaataacagattcttttcatatttcacttgatgtttgggtaatgtttgcatccatttgttgcactctactaggacatatggcagatggtattcttaaagctgatgtaactgcgagggcctaatgggttatttatggtagtgttaacagtaaggagtgggttttgagtattaacaacttagggaaagctttctattgcacaagagctgtgctaacttgcttaaatatcttctcttcaattgggtgtgctggaggtctaggttgtccaggttatatactctacttggggaagttgttaacagtgaagccttgaatcagctcagaacttgttatactttcagatggattcagtgtcctgtaacattctttttcccccccgccccatgtgatctgcaggaaactaacattcttgacttggaatagaactaaaataaatttaggataaatagtaacaaaggattgcatcattttgtacgtttgacaataagtttaaaaatccattagatgcaaaaatctgtccaaagttactagtcttaatactttttttactcaatgggtagtttatgaaatttggatcttggactgttgtgccttatttcctaagtgcatttaaattgtgtaggttcttcctcgatgttgaaaaaggaaaaaaaattgggtaggttctttgggcagtggttgtgtataagtgaagtcttaatgctgtaatggcttttcttatctgcaaacctaggccattcttgtggttgttgtatttcaagttaaaagggtacacttttcagtagtttattttcacctaacagccattatgtgtgcaattggtagtgtagaaaacaaaaaggtattgggagagtagtcggtgggtttggccagaatgtgttttgatcaggcagaacaaaggtataaaaaaaagtgttttgagaaactgccctgatttcagaaattagccatcattttttaatctacattggatttttaaagttgttctttttttctttttaaagcggggagagtctcatttacccagtctggtcttgaacttgcttcaagtcatcctcccgcttcagccccccgagtagctggccttacagacttgagccactgtgtcaggatggatttttgaaatttgaaagtcatattttcatggtgagtttcgtattataaaattcacctgatttcatagaagaatcatactatttatttatttatttatttatttatttatttagagacagagtctcactctgttgcccaggatggagtgcagtggcttgatcttgactcattgcagcctccacctgctgggtttaagcagttctgccacagcttccccagtagctgggattacaggcgtgcaccaccaggcttggcttattttcgtgtttttagtaaagatggggtttcaccatgttgaccaggctggtctccaactcctgacaccaagtgatctgccctcctcgggctcccaaagtgctgggactacaggcatgagccaccacgccctgccaacaagtcatacttgacccccttcagcatgtaagtgtctttgaaaaagtggtggtagtttaggtggagggaattaatactatttgtaaatcatggacttcaacttttactttatttaatcttcttaaaaatgcagtgaggttggccgggcatggtggctcacgcctgccgtggctcactttgggaggcccaggcgggcggatcacctaaagtcaggagttcaagaccagcctggccaacatggtgaaaccccgtctctacaaaaatacaaaaagttagctgggagtggtggcggacgcctgtaattccagctacccgggaggctgaggcagggagaattgcttgaacccgggagctggaggttgcaatgagccgagatcgtgccaccacactccagcaatgcagtgaggtaggttctattattatctccatttacaggtaaagaaactgggggtagagcatgtaagtaattttcctgtatggttgaactgggattagaacattggtcgcttagcttcagagccctgtgtggtttccatactgctagatagaaagttaggtgaactattatgggtgtcagtttgcccgttttacatccggctctctgcttcaggcttgccttagtccatatgcatattttgatgtatttgtttgctcttgctcaaaattgtgttatgaaaattaaggtgaatacttaaatgctattctaatcattatgaaaattgttgggcaccacttggacttttttcttggatttaccctaataacttgagttgtttctgtggaattacagttgtagtaaaaggatgttttcatcatagtgactttttttctgcagcccagttgcagtatcttgaatatgaaagagaaatcttgaattactgcctcattcaaagctctgaataaggaacttttttcagaagtttgctgcaaaataatttgccgacttatactgacaggaggctactgaataatctttatctcacttaataaatagttatgttctgtcttggaatattaatttgtttggttattggtgcactttagaccccatagggtctgtttgagtgtaaacgctgtgttacttttctaaaatctgaaaaattcttttttttttttttttgattttttttttttttttaattgatcattcttgggtgtttctcacagagggggatttggcagggtcataggacaatagtggagggagggtcagcagataaacaagtgaacagaggtctctggttttcctaggcagaggaccctgcggccttccgcagtgtttgtgtccctgggtacttgagattagggagtggtgatgactcttaacgagcatgctgccttcaagcatctgtttaacaaagcacatcttgcaccgcccttaatccatttaaccctgagtggacacagcacatgtttcagagggcacagggttgggggtagggtcaccgatcaacaggatcccaaggcagaagaatttttcctagtacagaacaaaatgaaaagtctcccgtgtctacctctttctacacagacatggcaaccatccgatttcccaatcctttccctgcctttcccctctttctattccacaaaaccgccattgtcatcatggcccgttctcaatgagctgttgggtacacctcccagacggggtggtggccgggcagaggggctcctcacttcccagtaggggcggccgggcagaggcgcccgtcacctcccgtgcggggcggctggccgggcggggggctgaccccccacctccctcccggacggggcggctggccgggcgggggggctcctcacttcccagtagcggcagccgggcagaggcgcccctcacctcccggacggggcggctggcgggcggggggctgaccccccccacctccctcccggacggggcggctggcgggcggggggctgacccccccacctccctcccggacagggcggctggccgggcagggggctgaccccccacctccctcccggatggggcggctggccgggcagaggggctcctcacttgccagtaggggcggccgggcagaggcgcccctcacctcccggacggggcggctggccgggcggggggctgacccccccacctccctcccggacggggcagctggccgggcggggggctgaccccccacctccctcccggacggggcggctggccgggcagaggggctcctcacttcccagtaggggcggccgggcagaggtgcccctcacctcccggacggggcggctggccgggcggggggctgacccccccacctccttcccggacggggcaaatctgaaaaattctgaagcacatttgttcttaaggattttaagtaaaagatgaggacccccgtagtacagttttggggaaacacaacagcatatataagtatttttattttttgagatggagccttgctctgtcacccaggctgaagtgcagtggcgtgatctcggctcactgcaacctctgcttcccgtgttcaaacgattctcgtgcctcagcctcctgagtagctaggaaaactggcgcgagccaccatgcctggcttatttttgtatttttagtagagatggggtttcaccatgttggccaggctggtctcgaacttctgacctcaattgatccacctgcctcggcgtcccaaagtcctgggattacaggcgtgagccactgttccctggccacagcagcatattttaatacttgtttttgaggcttagtttatttagttttcctgtgaaacagttaagtagccaaatacaaaaatgtaggcatgcgtttgaatttcagacttctgacagtattttcagagatagcatgtgcatgaaagcatgaaaaggtttgctctggcagttacacaaccttaaagttcagtttaagtaattttttttttgtttgttttggcatgaagtctcgctctgttgcccaggctccagtgcaatagcaagatcttggctcactgcaacctccacctcccagattcaagcagttctcccacctcggcctcccaagtagctggtattacaggtgcctgccactacgcccggctaatttttgtatttttagtagagacagagtttcaccatgttggccaggctggtttccaactcctgacctcaagggatctgcccacctcggcctcccaaagtgctgggattacagctgtgagccactgtgcccggcccagtttaactaatctttattgaggtttttttttgtgtgttttctgcaacacatttgggactttcaatttttaaggttgacagtcgtttcagcatggctgttttggaattagtgggctcttgaatacaccagaaagcatagcaccatttcacagcttgtaaagtctgcggtttgaaaaatggaaatagttcgtttattggcatatttgacatgttaattgaacgtacctgttatctaaaacattattaatggaatacttttgccttgatttctgcctaacatgtttagctaagcgtacttataattaataccccttttagtagttatttgttttactctcttggtttgcaaattggctgaataaaatgaatatttcttcagacaattaaggacaaaagctctgtatgcaatgataacacggagggcttagatttccttggcatagtgattcttaaccctggctacacattagaatcacttcgggaactttttttttttttttttgagatggagtctcgctctgtcacccaggctggagtggagtggcgcggtctcagctcactgcaaggtctgcctcctgggttcaccccattctcctgcctcagcctcccgagtatctgggaccacaggcgcccaccaccacgcctggctaattttttgtatttttagtagagacggggttagccaggatggtcttgatctcctgacctcatgatccgcccgcctcggcctcccaaagtgctgggattacaggcttgagccaccgcgcccggcccacttcgggaactttttaaaacacttgtacccatccccagatactctgatttatttggtctggagtgggtgttatgtactggtattttttaaatatccctatatgattctaaattgtagctatgtttgagaagtgctgcttggaggagagcttccttagtaatggtcttttgctgtagttgccattttgggaggtagtatatttgttttgctatgtgctctttgctaacaacaacaacaaaatccaaaaaactaatgtgttagcctttttgttttacatagctaagaagcacttacagaacagtaacgtaaagttctgggagttaaaagccagatatttttgtcaaacaactttaatgatacaagtttacaatcagtttatcatagttgtctattaatggcttccagagtatttaccattgtgctatgattggagccttatgtaatttggatatccttaacattttgaaataattgcacataattaccttaacactacccatctttggtattgccaacaatactgtgctgtgaccttttgtgtgtactgcccactttgtgctttcttgtaattgttaatgtttgtctttcctagtgcttttaaaatgagaagtgttcttaatgtttatgtggaatttcaatccaaccattatttgtaagtgcataattttgtttactgcttttttgatttacaatagaagagttatcactttaaacattttatatcattaggctttcattgatatatttgacaagagtattatctgacaagagaaaataactgattgcttgtaattattagaatttcgaataatcaaaagcatgcttttattctttccgtaggttatggaaagaattccttttgaattgagataaaatgtatcatttaaaaaaagtttttgttgactccttgatcttacttttggggcttgatcttcccttttcaaaacttacttaaccttactttttcaaaatgcctggttttgaaatgtggctctgcagcctactgtaattttaggcaagttatttaacttccgtgtgtttcagtatactcatctgtattggttactgatttaacttctgtgtatctcagtatactcatctttattggtcatactcatctgttacggtcagagaagatactttgtatgatatctatctttcaaaataaaatatcttgtggcttaacatatagtctatcctgcaaaacgtcccatggcacttctgaacaatgtatgtgctgctgctgtagggtagtgagcgttgtatatgtctgttagatctagttggtttgtgttaagtcctctatttccttatcttctttttggttgttctatccatttttggggatggagggtgtattgaagtctgaaactattattgtagcactgtctgtttctctcttcagttctgttggtttttgcattgtacattttgatgatcattagatacgtaaatgtttataaatgttatatcttcttgctgtattgaacctcttactaatatgtaatgtcttttatctcttgtaatcttttttgttttaaagtctattttgtcttatagtcaccaccctgctatcttttggttactgtttccatggaatattttttccatcctttcaccttcaatctgtttgtgtctttggatataaagtgagtctcttgtagatggacgtagttggatcaggtgcttttaatccattctgccagtcttttgattggaacatttaaccatttacatttaaagtaattactgttaaggaaggagggccaggtgcagtgtttcattcctgtaatcccagcactttgggaagctgaggtgggaggaacacttgagtccaggagtttgaaccagcctgggcaacataatgagaccgtgttcctacaaacaaacaaacaaaaaaatattagccaggcatggtggcacgcacctttagtcctagctactcaggaggctgaagcaggaggatcacttgagcccaggagatcgaggctgcagtgagctatgatcatgtcactgcactccaacctggatgacagaaggagaccctgtcacacacaaaaagtaaaaagaaggacctctgtcattttgctatttgttttctataggcatatatccttttgttccttatttcctgcattactatttttttgtttagctgattttttttgtagtgaaatgtttacatttctttgcattttctaatttttattttattttatttttaaatagagactgggttttgccatgttgctcaagcttgtctcaaactcctgggcccaagtgatctatgtctcggactctcaaagtgctgggattacatgtgtgagccactgctcacatctcattttcttttgagtatattctgtagttactttttgtgtggttaccatggggattacattaaacatcctaaatattgtaatttcaatttataccagtttaactttgacatataaaaactctgctcctttatagctcctttcccacctctttcagtatttgatttcccctaattacatctttatacattgtgtgccccaaagcataaactaataattcttttaaatgcattagtttattgtttagaaaacaaagtgtggatgtaggggccaagggaaacttcccttttgccctctgaagatttgctgaaaaatcaactcagacaaggtggattaattggaggaaagacatacacatgtatttaatgtgaacatggggcgaaccacagagtgattccccacatcccaatgtagttcagaagcttatataccatcctggtgaaacaggttatgggaagggggagaagaggaattctgttgataggattgctagggacaatggatcagagaacagagattaacttgtacattatcttgtgaagggtctgtttaggtgtggttaccttcttggtcctacaggaggagaagaaaagcagttgttcgttttggtgggtctggatcttaggcagatgaaggctttgggatatggtggggggcatcaggagggcagggaggaaagtcagagagaccttgaggcttcttcattcagcatgtcaaaatgccatattttgggtatcactgagccccaacatggaggtacaaaccaaggaactaaaattgaccaacagccttcgtaatttaccctccaagcctttcccggaaagttgcaagccttcagtagactccagagttacatctagactcagctctgttgctgttcagtgagtgagtgctagctagcctgaaggtgggtagtgcggaatgcactcacggtagcactttgagctagattcatgtattatctcattttattcatgagaaaactgcgtcctagaggaggttaccaactttcctaaagtcatacagctaccaggtggaagactgtttgttggactcaactctgtcttatgccagagcatctcttgttagccactactctctgctgcctcctgtaattaagtaaatataacacattacgatatgtgttaaaatggctagtggaaggtgctttgggagcacataggaaggagtaaataattatattttgggatttggggaagtgtttcatgcagaggaggtgacacgagataggtcttaaaaggtaagtgggagaagggcattccatatataggggaaagtatatgcaaaagcatggaggtgtttagtaaatggtaaagatttgaatgtgattggcacttacgaccaactcaggtattttaagagggttatactttatcctgtaagttatttggtaaacaatggaggttttaaagtatggtaataaaacatggtcagtttggcttttgtggaatattgtgtggagaatggtttggtgggtggagggggaggttggtgatggctgggtgggaaactagatggagggggtgtccatttcagaggctctttccagtgacaggtggtcagattagaaagagaattctaagaaagcttggactgtttattgaatataagtactgaggagagaatgagagtggagtgcagattttgaattttcactcatttctaggattacttatttcttgtcctcttgaaagcttttggtgattggcccaatgatcagtttggggatttaagtgcagggaaaagaatggggatgaatttttttttgagactggatctcatgttgttacccaggttggagtgcagtggcaccatcactgctccactgcaacctcaatctcctgggctgagccatccttctgcctcagcctcccgagtagctagaactgcacgtgcacaccgtcactccctatagagttgtaattacagtaggatgggttatctcagtctcctgttgagtggtttggtttttttgttcttttttttgacaataacttcttgtccgatagtgagtgtttttgttttttgttttgttttgtttttgagacagggtctcactctgtcacccaggctggagtgcagtagcacaatcttggctcactgcaacctctgcctcccaggctcaagtgatcctcccaccacagcctccaagtagctgggactacaggtgcgccatcatacccagctagtttttataatttttgtagagatagggtttcaccaggtcaccaaggctgtgttttttaacattagaaaaaactagcttgtatcagctttgtattcaaagggatatgtcttaatgttcatatttagagcttatggttgatgtttggtttgagacagagtcttgccctgttgcccaggctggagtgcagtggcatgatctcaactcactgcaacctctgcctcctgggttcaagtgattctcctgcctcagcctcctgagtagctgagattacaggagcccaccaccacgcctggctaatttttgtatttttagtagagacggggtttttccatgttggccaggctggtcttgaactcctgacctcagatgatccgcccgcctcagcctcccaatgtgtagagcttacagttttctcaggctttagctcttgaaggaatattagcgatctgataaaactttaaattgttttaaaaagttattccttctttgttctatcctgacagaggggtgtatcagacatgcagcatatacacacttaagtcctatacagaggaaagcagttgggaacttggcagtaggaattacaggacaacatgaaggttttataaatgtggtgacaaacattagattaataactgcattatgttggccgggtgtggtggctcacacctgtaatcccagcactttgggaggctgaaggcgggcagattgtttgaggtaaagagtttgagaccagcctggccaacatggtgaaactccgtctctactaaaaatacctgtaatcccagctactcgagaggctgaggcaggagaattgcttggacccgggaggtggaggatgcagtgagcagagattgtgccactgcactctggcccgggcgacagagtgagactcttgtctaaaaaaataaaaaataggtcaggtgcggtggcttatgcctgtaatcccagcactttgggaggccacggtaggcggatcatgaggtcgggagttcgagaccagcctggccaatatggtgaaaccccgtctttactaaaaatacaaaaattagctgggcatggtggtacacgcttgtagtcccagctactcgggaggctgaggcaggagaatggcttgaacctgggaggcagaggttacagtgagctgagatcgcaccactgcactccagcctgggcgacagagtaagactccgtctcaaaaaataaataaataaataaacaaacaaacaaaatacaggaaaaaaaccgcctgcattatgtaaaattgcttttatttaaacatcttgttgcatatctgcttgatcttgggaggacctgataaagataggcttattttcttttcttagatgcctgttcccttaatcatactttttattcagacataaagaaggtgattacaaatgtattcataaattgcttagacttccttttaaaaatgttttcctattattaccagactttattgatgacaaatgttgttacactatttcaccatcacattgtttctttgaaaggcgatgctgttcattcttttaaaaagatgttctcggctgggctcggtggctcacgcctgtaatcccagcactttgggaggccgaggggggtggatcacgaggtcaagagatcgagaccatcctggccaacatagtgagccccctctctactaaaaatacaaaaattagctgggcgtagtggtgtgcacctttagtcccagctgctcgggaggctgaggcaggagaattgattgaacccgggaggtggaggttgcagtgagccaagatcgcaccattgcactccagcctgggcgacagagtgagactctgtctcaaaacaaaaaaaaaaaaaagaaaagaaagatattctttacattttggaattctgtttatgtcagtaggagttttctcgtgtagattccaactctttttttgctttagattttttttttttttttttgagacggagtctcgctctgttgcccaggctggagtgcagtggcgggttctaggctcactgcaagctccgcctcccgggttcacgccattctcctgcctcagcctcccaagtagctgggactacaggcgcccgccactacgcccggctaattttttgtatttttagtagagacggggtttcaccgttttagccgggatggtctcgatctcctgacctcgtgatccgcccgcctcggcctcccaaagtgctgggattacaggcgtgagccaccgcgcccggcctagatttttgtttagttttagtagttactgattaagcgttcactgtttgaccgtacaggtacagcagatgatacaatgatgaatgcagtataaacatagtcttattttggtagaatttgtaacccaggtggggtgacaggcttaggattagactaatgcacagactccaaaatttctatttccaggctagacttctttatttttatttttatttttattttggagacaagagttttactctgatctaggttggaatgcagtggtgtgatcgcggctcactgcaaccgccacttcccgggtttaagtgattctcctgcctcagcctcctgagtacttgggattacaggcatacaccaccacctgcagctaatttttgtatttttagtacagacgggtttcaccatgttggccaggctagtcttgaactcctgacctcaagtgatgtgcccacctcggcctcccaaagtgctgggattacaggcatgagccgctgcacctagcccagtctgaacttctttcctcagactccagacttgtgtgtataagtgcttaacccacatttccacttggatatctaatagagatctttctatgaatatgcacaaaattgacaggattactttcttcccctcccctccaaccttcttgacccataacctttatctcaattaatcacaactgtcttttcagctgttcaggaaagaagtcttgggagtcattctttattttttatttacatttttacctttaagctctggtggactggattagaagttactcttgattcatctctttctcatactccactttcagactactagtatgttcttttggctctacctttgaaatacatcgtgtccgaccatttctcatcactccaccaacaccactgtcctggtttattgcctagattatcattagcttcctaactagtctgtttctaccctggctgagtgtagtcttttctcagaatattagcaaggatcctttataacagaagtcagctcatacagttctgctcagaactcttcagggatctgtctcaatctgactagaagctcaagtcttagcgagtatcctgtaaagtccttcgtggtctctttgatcactttgctgtttccattccagccatacgtgcttcactgcacttttgaacacagtgaaacacactctttcagtcttttactggttgctgctccctttgcctggaatacttttcctctagatagtcacattacctcttccctcatctctgttgtctttgctcagatgccatcttccctgagcttcctattttaaattgtagtgtttcttacccctaccttactaattttctctcaaaagaacccttcaacaacatgggtttgaactatgtaggtccacttatacgtggatttttttcagtaaatatattggaaaactttttggagacttgtaacagtttgaaaatgttttgcagaagaactgtagcctagaaatatcaaaaagaaattaagaaaaaggtatgttataaatgcataaaatgtatgtagatactagtcagctttatcatttgctaccataaaagaaacacatatctattgtaaaaggtaaaatttatcaaaacttattcacacaaacactatagacaggacatggagccatttgcagttgagagaaatgtagtattaaatcataactgtgtaaagttaactagtgtatactactgtaataattttatagccatcttctttgctattgcagtgagctcaggtgttgcaagtgtctgcttaaaacatcgtgtgacgctaatcatctctgcgtgagcagtttgtctcttcagtaaattccatatcaccatagaaagtgatctcttgaggttctcttgtatttttctttgtattcagtgtgataccataaaccttgcaacaccatgggactcatacagagtgccactagtgatgctctaagtgctccgaagaagaaaaaagtcatgataataccagaaaaagttgaattgcttgatatatactgtagattgaggtctgcaacttgtaaacaggtgacataaacttaaggtattaataacagtactgtaaatatattttctcttccttatgattttcttaacattgtcttttttctagctttattgtaagcatgcagtatataatacatacacaaaatatgtgttaatcaactgtttatgttatccataaggcttccagtcaacggtaggctattagtagttaagttttgggggagccaaaagttatatgcagatttgtgactgcacagggggtggggacagggcccctaaccccaacgttgttcaagggttaactgtactatataatttactttgtttattgctatggtctttgagagcagggttttttgttttgttttttttctatatcctcagtgtccagaaaagtccgggtacgtagtggatattcaccaaatatttgttaaataaaggagttcatcattctcaagaaatatttatatagtgcctcctctattccagggaactggaaagaggaggggtgaacactgtgggtaagatacagtctctgcccttgaacttcagtacagaggaatcaaatcggctttaatactggctgctgaagaatggtggtgccaacggggaaactgctgaaaaggatgtatagtcctggcttttttagaaaggagttgtaaaagtgttaaagctcttaaacctagtaattatacttctggggctgtgttctaaggatagagtgttctgaatacttacaggaccaaagagatccacaataccaagaaattagaaacattttatatatctaattatagaatggtaggtatattgtggtacctttattcatttggttattagtagtcattaagtgatgtttataatgatctaaacacggggaaatgtttagaaattttaaaaattaaaaattactgctaatgcgaccttaacacaaacttcagctttttatttttgtctctttcaatttgtacactgatacatcatagaaatgctatccttaagtgggcttttatgtgtcccgtttttctctttgagaagctcacttgggcagctgctgcagtggagataagcaccaggtatcgtcaacactgcaaaagggcccttacaggccctgattgaagcagcagggcagccctctaattgagtgaagctcattccttgggaagtcagttgctggagcttccttcttcacagagctgtttctcttctgagggtgtacgttcaacctcgccaactctcctgtctcctttgcttttccagatattttcctaaatagaactaaaaaggatactacaatggtattaatgattactatctgggtgttggattggtggatttttttcttccactgtatgccaaattttctttctttttccttcttccttttttttttttgagacacggtctcactctgtttcccaaggctgtggatagtggcacagtcatggctcattgcagcctggatctcctgggctcaaggagctgattcctctgccttcttgaggaagcttctaagtagtaggactatgtagctggactatgggtgtgtgtgggtagctggactatgggtgtgtgtgccaccacacccggctaatttttaattttttttgtagtgatgaggtcttgctatgttgcccaggctcaaattttctttatgaatttgtattaacacccaaaatcttattaaaacaatctctggctagcattgcgatcttgagcaagacacactctgcacttatctccagaggccctttcagctcaatgaattgttactactttggggtatgtggtgtttaaagttctggtgggacatacatccttgtatgttaagttgcctttccttcttagctagcatttatttactttcctagtacttgagtttctcctccactttctctttgttttacctgtttttggttaaccttttacttaggctatggattatcactataagattaagactaaaagaaaaataggaggacagagctaacagggtggttagtaaattaataatgaagcttcccaggtcctcctctcccttcttccctccccgcgtcccaggtaagtactcaaagatactgcagcgagtctttttttttttttttaagaatacttttaagggaatgggaaaagacaattgttgcgttttcatccatttattctgccaacttttcctatctttcttttccctgtgttcctgatatgtaggtcatatcgtttaacttgcttttcatgtaccgtctgtagctgtgtgtgtgtgcctgtgtatgtgtatgtgtgcgcgcactttaaatcaggggcaattttgtgtcccagaggacatttgtgaatttctgaagattttttttggtctccactggggagctgttcctggcatctagtgggtagagatcacgatgctgctaaacatcctaaaatgcacagaaacattgaattataagaattgtatagtccaaaatgtcagtagtgctgatgttgaaaagccctgctctgtagtacttatttcagtaccataaaaggaaaagaaaaagagataatatatgatataattgtatgctgctgtcaagtacctgcttaaggaagacaaagctcttgatttatttgaactacttggtttgtattggtttgcacttagattgttcaggcattcctgagaattgtgaactttggtggtagaggggtggttctgctgtgatccagtgtttgtttttttttttagttcaagaacattttcagttgccttctaggttccctcctccattgccagagtatgtgtagtggataggggtaagtaggacccacgtttctgtaacccttctgatttaggtaatctgtgattgtgtatcctgggtggtggtgatggtgaacaatatgtaatcttatgaagcctatattccaaatccaaatagttctgaactggccttgggaatgagacatatggctaactattcagattcaagttaagagcataatgattaagattactggatgacttttatttttggtcgtctagagcagtgtttcccaatttttcacttccaagttattttcatgccttttatattctgaaacattctggcaaacaaaccacggttaaaggaaagattgtttttaaaaatttttttttttaaattatttttatttttaactattttttagtttttgagacaatctcgtactttcacccgggctggagtgcagtggcgtgatcttggctcactgcagcctctgcctcctagggttctcctgcttcagcatccccagtaacaggtgctcaccacccacacctgtctaatttttgtatttttagtagagatggggttttgccatgttggccaggctggtcttgaactcctgacctcacgcgatccgtctgcctcggcctcccaaagtgctgggattacaggcatgagcctttttttgatagttcaatttggttggttagtttaataatgaaaactgcctttgccaattaggttacatggtatatgttttctatacatcgaataagctaatctgcagctttaggtaaagctgttttggaaaagattgagccatactggcagaagtgtactttttgttttcaaaaataagttttagttgtttttttttctttgagacaccgtctcatgccattgccaggctgaactgcagtgatgtgatcatggctcactacagcctcgaactgctgggctccggtgatcctcctgcctcagcctcctgaatacctgggactgtaggtgtgtaccaccactcccaggtaatttttaaagtttctgtagggacaaggtctccctgtgttgcccaggctagacttgcacccctgagctcaagtgatcctcctgcctcagcctcctaaagtgctgagattaaaggcatgagctactgtgcccggccattgtaatattctttcaacttttatgatgacttgaatattttcaaaacaaaaaaattgggaaaaactttatagtcacagggaattaaaaaaataattttaagaagcatatttcggtattataagaaaggatttactaggactagctgggcgtgggcggtggctcatgcctgtaatcccagcactttgggaggccaaggtgggtggaacttgaggtcaggagtttgagaccagtctggccaacatggcggaaaccccatctctactaaaaatacaaaattagctgggtgtggtggtgcatgcctgtaatcccagctactcgggaggctgaggcattgcttgaacctgggagttggaggttgcagtgagctgagatcacgccattgcactccagcctgggtgacagagtgagactccgtctaaaaaaaaaaaaaaagaaaaaagaagtgacttactggggccagatgtggtatctcacaactgtaatcctagcactttgggaggctgcggagggaggattgcttgagcccaggagtttgaaaccagcctgggcaacatagacctccttgtctctatgaaaaaaaattagccaggcatagtggcatcttcctgtagtcccagctactccagaggctgaggtgagaggatcccttgagcctggaaggttgaggatgcagtgaaccgtgatggcaccactgtagtctatctagcctggtgacagagcaagaccctgtctcaaaaaaaaaaaaaaaaaaaaattaactcaccaggatgaaatatattaaattaggataatattatgtgggagaagtagaatgaaggacttttcataaatttttgtaaatggatgatgatgggtatgaaattgctgtggtttttagctttctttggatgcatttaaaagagatggaattattttaaaatatcagctttacagttgcagcaaaagcaagaattgacaaatggatctaattaaactaaaagattctgcacagcaaaagaaactatcaacagagtaaacagacaacctacagaataagagaaaatatttacaaattatgcatccaacaaaggtctaatccagaatgtatagggaacttaaacaactcaacaagcaaaaaatatccccattaagtgggcaaaagtcatgaacatttcttaaaagaagaaattttttttttaagtggccaagaaacatgaaaaatgctcaacatcactaatcagataaatgcaaatcaaaaccacagtgagagatcatctcataccagtcagaatggctattataaaaaagtcaaaaaacagatgctagggaggttacagggaaaaggaaacacttatacgctgctggtgggaatgtaaactagttcagccactgtggaaagcagtttgcagatttctcaaagaactgagaattgtgatttgacccaacaatcccattactgagtatatatctaaaagaaaataaattgttctgccaaaaagacgtgcacccatgttcattgcagcactgctcacaatagcaaagacatggtaccaacccaggtgtctatcaatagcggactggataaagaaaatgtagtggccgggcgtggtggctcatgcctgtaatcccagcactttgggaggccgaggccggtggatcacctgaggtcaggagttcgagaccagcctgaccaacatggagaaaccctatctctactaaaaattcaaaattagctagccgggtgtggtggcgcatgcccgtaatcccagctacttgagaggctgaggcaggagaatcacttgaacccgggaggtggaggttgcaatgagctgagattgcgccattgcactccagcctgggcaacaagagcaaaactctgtctcaaaaaaaaaaaaaaaaaaaatgtggtacatatacaccgtagaatactacacagccattaaaaagaatgaaatgtcctttatagcacataaatgcagctggagggtattattctaagtgaattaatgcagaaacagaaaaccaaatactgcatgttctgacttataagtgggagctaaacattgggcacacatggacatagtgatggcaacaattgacactgaggtctagtagagggaggaaggagggaaggagacaagggttgaaaaactgttggatactatgtggtaagcaggcaaacaggtttgaagactttagatctggctaacgttccttcacctctttgggttctatgattatggtgctaagagttcactcagtaatactactgactggcagatcatgcagcatggacagagtgactgttttagcaaaggcactatgtggtttatgaagcacagccataacccaaatctagattatccctgcagctttactatataaagttcggctgctgacagcaattatgacacattacttatattgttttatgatcttaggatttcctgtttctataaatgtggataatttctttaaaaataatacaagttaaggatactcctaacataatttttagtgcccatgaaaatagtaattcaataagcaagaagtttataagtgaacttcattttattctgttaagtgtcttattaaaaaactgtctggaagaacttgactcataatagttactttgacttgaggtcattcatacagagattttgaatgtgtaccacgaatatttagttttgctggaaatctaactgctactatgttaatgtgtaaactgtggcctgtggtacttactgattgattgaaatagtctcctaaaaggttaagatttaatttttaggttggaagagtggggcatacaaggtccatgcacacattgtgtggcccccaagaataaggggctgaaaaccatatgtactttctcttggccaggaacagtagaacatcatacctttgaatagatcaaactgcctgcttcataaagagacttcagcattgttcttataaaacctcatcaaatgtttccttgattttatacttgaaagtgggatactgtagaggcttaatttaataaaatacatatttaaaaatcactagtggtattttcaaaagtgttctctaaaccatgaaaatcagaaaattaacattaccgccatctcatcgtctgactccatttgggttttgtcactttctcagtgatgttctttatagcaaaatatccaatttagaatcacataacatttaattgatgtgtttctttattttattttattttattttattttttttaattgatcattcttgggtgtttctcgcagagggggagttggcagggtcataggacaatagtggagggaaggtcagcagataaacaagtgaacaaaggtctctggttttcctaggcagaggaccctgcggccttccgcagtgtttgtgtccctgggtacttgagattagggagtggtgatgactcttaacgagcatgctgccttcaagcatctgtttaacaaagcacatcttgcaccacccttaatccatttaaccctgagtggacacagcacatgtttcagagagcacagggttgggggtaaggtcactgatcaacaggatcccaaggcagaagaatttttcttagtacagaacaaaatgaaaagtctcccatgtctacttctttctacacagacacggcaaccatccgatttcccaatcttttccccacctttcccccctttctattccacaaaaccgccattgtcatcccggcccgttctcaatgagctgttgggcacacctcccagacggggtggtggccgggcagaggggctcctcacttcccagtaggggcggccgggcagaggcgcccctcatctcccagacggggcggctggccgggcggggggctgacccccccacctccctcccggacggggcagctggctgggcggggggctgacccccccacctccctcccggacggggcagctggccaggcagaggggctcctcacttcccagtaggggcggctgggcagaggcgcccctcacctcccggacggggtggctggccgggcggggggctgacccccccacctccctcccggacggggcggctggccgggcagggggctgacccccccacctccctcctggacggggtggctggcctggcggggggctgacccccacctccctcccggacggggcagctggctgggcggggggctgacccccccacctccctcccagacggggcagctggccaggcagaggggctcctcacttcccagtaggggcggctgggcagaggcgcccctcacctcccggacggggtggctggccgggcggggggctgaccccccccacctccctgccggacggggcggctggccgggcagggggctgacccccccacctccctcctggacggggtggctggcctggcggggggctgacccccacctccctcccggacggggtggctgccgggcggagacgctcctcacttcccagacggggtggctgccaggcgtaggggctcctcacttctcagacggggcggctgccgggcggaggggctcctcacttctcagatggagcggccgggcagagacgctcctcacctcccagacggggtcgcggccgggcactctcacatcccagacggggccgcggggcacagacgcttcccacatctcaggcgatgggcggccgggcagagacgctcctcacttcctagatgggatgacggccgggaagaggcgctcctcacttcctagatgggatggcggccgggcagagacgctcctcacttcctagacgggatggcggctgggaagaggcgctcctcactttccagactgggcagccaggcagaggggctcctcacgtcccagacgatgggtggccaggcagagacgctcctcacttcccagacggggtggcggcggggcagaggctgcaatctcggcactttgggaggccaaggcaggcggctgggaggtggaggttgtagcgagccaagatcacgccactgcactccagcctgggcaccattgagcactgagtgaaccagactccgtctgcaaacccggcacctcgggaggccgaggctggcggatcactcgcggttaggagctggagaccagcccggccaacacagcgaaaccccgtctccaccaaaaaagtacgaaaaccagtcaggcgtggcggcgcgcgcctgcaatcgcaggcactcggcaggctgaggcaggagaatcaggcagggaggttgcagtgagccaagatggcagcagtacagtccagcttcggctcggcatcagagggagaccgtggaaagagagggagagggagaccgtgggccgtggggagagggagaggcaggggcaggggcaggggcaggggcaggggcagaggcagaggcaggtgtttctttagtctcctttagtctgaagtagttattcacttttccctctgctttaaagattagagaccagttatttagtaaaatggatttgaatttgggttgtacagtgttttctcattattagagtcaggttgtgtatcttgggcaggaatttcacaaaactgattctgtgttcttgtatgctgtcaggtggcatatgattttaggttgtctttttttctggcgatgctcaccgatcacttgattgaggtggtgtctgtttaggtgttttatatttgtttcctgttgctgctgtaacaaattactacaaactcattggtttaaaacagcacaaatttgttctcttaataattctggaggccagaagtccaaaatcagtttctttgggccaaagtcatgatgttggcagggctacttccttctggaggctctagggtagaatctgttttcttgccttttccagcttctgtagatagcctgtatttttttagcttgtggcccttccttcatctttaaaaagggcattagtccagcatctgcttccgttgtcacattaccatctgtctttgacccttctgcctccctgttaaaagtacccctgtgattatggtccttctatgataatctccctatttcaagatccttaacttagtcatatctgtaaagtcccttttgtcattcgagatagtatatttactggttccaggtattaagatgtggacatcttgggggacagttattcagcctaccccactgcaaagtcattcgtttcccctttgtaattagtattttgtgggaggatacttggattcctggttcctgttagtggagaatggtatttagaagccaagatctgcatgctagatgtgctcattgctactaggatttttctgctcctaggcccacttagtagatagagctagggagtatgtatatatgtatttagaactgcatttgtatttctttattaaaagacattcattcgtagtgatatttttaattccagtccaacagtacagggttcattcttgttttctattttttcactcctttttcttgacagtggaaaactgactccaggtatctttaatatattaacttattcagtcagttcctctgcatattatcagtctccttttctgctaccatactctcccctacatggatctctccctcttcctgatacttggtttcggtacttcttgctgggtagtcctcccatgtggatgacttcatctaagcatggtggtaacaaggtagttggacttcttacctggtggttttggaaccttctatatgccaagtccttttacttacctgttacctcatttaagaactgcagttttgtagatttttttttaatatggtaaaaaaaaattataattagccagctggactcattttagatcatctcaattgtgttggcagcattcaaaacatcgttaagttacgagccagttgaacatacaccttcttctctccatcagacctgatgagtatgtttaccttggccatgccagtgtcatagagcttcttcacagcctgtttgatctggttggccttgacatccatagtaaacacaaatgtggttgtgtcttcttcatggctgacttagtggtcaaggggaacttgataatggcataatgataaagcttgttttttgtgggggtgttcttcctaggacatttgaactgcctttggagctgcgttgtcttaggccactggaaggtgggtggcaagtcttattttgtgtggttgtggatgcctttcagcactgccttcttgttctttcaaagcctttgctttgactttggctttggggtgggcaagggcttcctcctttgtttttggtgccatcttcttaaaaaggcagatttttgtttcaaaacttgattttttttttttttgttgagacggagtcttgctctgtcacccaggctggagtgcagtggcgtgatctcggctcactgcaacctgcctcccggattcaagtgattctgctgcctcagcctcccgagtagctgggactacaggcacgtgccaccacgcctggctaattatttgtctttttagtagagagagggtttcactgtgttagctaggatggtctctatctcctgacctcatgatctgcctgcctcggcctcccaatacattttttttttttttaaacttgggagagtctttcagtccaagtgcttggggtgaatttagtaaaacaatacatactatttttgcttgggcttaatttctttttaattgagctgcaagtttttcatgaggattaaaataatagctttttttgttgttgttgagatggagtttcattcttgttgcccaggctggagtgcaatggcgtgatcttggctcactgcgaccttcgcctcccaggttcaactgattctcctgcctcagcctcctgagtaactgggattacaggcacgcgccaccacacctggctaattttgtatttttagtagagatggagtttcaccatgttggccaggctggtcttgaactggctggtctcgaattcctgacctcgtgatccgcctgcctcagcctcccaaagtgctgggattacaggtgtgagccactgcacccagccttaaaataatagcttttgtcacaactcttatgtaaacttaagttctttttgtttgtttgctttgagatggagttttattctgttgcccaggctggagggatctcagctcactgcaacctccgcctcctgggttcaagtgattcttgtgcctcagcctcctgagtagctgggactacaggtgtgcaccaccatgcctggctaatttttgtatttttagtagagatggggttttgccatgttggccaggttggtctttaacttctgacctcaggtgatctgcctgcctcagcctcccaaagtactgggattatagaggtgagccacggtgcctgaccccataaacctaagttttacgggtttaggagacttttccagcttaacacaaaataattagaatttatgatactgaattttactctactttttttttttgtttgtttgagacagagtttcactcttgttgcctaggctggagtgcaatggcatgatctcggctcactgcaacctccacctcccaggttcaagcagttctcctgcctcagcctcccaagtagctgggattacaggcatgcaccaccacgcctggctaattttgtatttttggtagagacagggtttctccatgttgaggctggtctcgaactcctgacctcaggtgatctgcccgcctcagcctcccaaagtgccgggattacaggcgtgagccaccgcgcccggcccccttttttttttaaaataaaaattttaaatggtgctttttttggggacgggggtgctctgaggcaggaggagtgcttgaggccaggagtttgagaccagccttggcaacatagcaagacccagtttctacaaaaaaaaaaaaaaaaaaaaaaaagaatactttgcaaatttgcgtgtcatctttgggtgagggccatgctaatcttctctgtattgctccggttttagcgtatgtcctgctccggttttagtgtatgtgctgctgaagcaagcactctacctttgttttaactgcaagttgattttatgttacagctctaaatcttactagttttatatcttaaatagatgagatctaaactttgttgattagaagacattttgataggcatttatttttgtgtttgaagagtattatttctgcttagcttccttaataaaccatgttttaactattttatacttcttgttccttctatagcagaggggaaagagggagagaatttcccagaaattactgattatatctgactaaatattttgggtgcaagtcagtttttgtgttttcattaagtctcatttccaaaatggtcacttggtagttgaatgaaattttctagataggttgtttgttctaaatggcagacaatttaacctatcttgtaagttttttaaaggctatttgaataggcagtaatttcatgttccattaaactattagcgtggtaatgaaggttagttaaccagttagctggttttaccttcacttgtgaaaaatggtttttaattcatcttatttttctttcttgacagagcaaattcgattaaagaatatcagaaaagtatatggaaggtgtatgtggtatcgtttacggttattaaaaccccagccaaatattattcctacagtaaagtaagtaatggatttcaagaaaaaaacctacttaatgcttactctttgctaggtcatacaacatatacgtgtaatgatgaataagtcattgtgtctgtaaagaaattgtaatctatagtaagggtaagataggagaaaatgtgggaacagtctgaacagattggtttagaagttcaaaggaaggggagtatactgttgctggaggtcgggggtagaaagagataagtcatatcttgagggaccttgtgcaccttgtgccaagatttgaattttatcttaaagactatgggggaatctttaaaagatttcagaagtggagaggtgacatgaacaagttagcatttcatggtgataattaaagtttattgagcacatactgtatgctagaatctgtgctagggctttatatgttatctaatttaattctgtattaacttcaaagtagatggttttgcattttctcagatgaggaaacaaaggctaagaataatgacataacttgaccaaagtcatgtagttagaagtgttggatcagggacctaatcaccctttattttaaacaggccattaacatgtttagttacagcagaccagtttaatcctgtgaggctatggggtgtactggttaaacacaaggctttggacatttatcctgcgtcatcagtttagaggtaatagatgaaactgacaggaggtgagagagttaccattattggactactatgtcttgtgaattacctacatttatccagtagattggaagagaagatgtagcaaaagaaattagtgagagtagaaacagttatttagaaatcttggtttaaatgatagttttttttcagcataatttcagggcgtttagtttttctttgtaaggttttactttacctaatttagtttatttttcttttcttttttttttttttgagacagagtcttgctctgttgcccaggctggagtgcagtggcactatcttggctcactgcagcctcagcctccttgggctcaggcatcctcccacctcagcctcctgagtaggtgggagtacaggtgcatgccactacacctggttaacttttttttttgtattttttatagggatggggtttcaccatgttccccaggctggtctcgaactcttgggctcaagtggtctgcctgcctcggcctccaaaagtggtaggatcacaggcgtgagccaccttgcatgagccacccagtttagtttctttgtaggaggagggaaattctagctttggtgttaagagttctttaatgatgtgaaactaaaggcaaagttagtcttgaaaagagtaattttctcttcactgtttattctttactgttggttctcattttgaattaaattttcctaaagcagcaagacagaaaacaatccgcccctcccccccatatctgcgggttccaagtgggaagattcacccaactgtgaatcgaaaatatttgggggaaaaaagcaataaaaataacaatacaacaattaaaagtataaatgaaaatacagtgtaataactgtttccacagtgtgtattatattaggtaatatcagtaatttagagatgatctaatgtgcatgggaggatgtatataggttatatgcaaatactacatcattttatactgcggacttgagcatccatggattttagtatctgtgggggtcctggaatcagtcccctgaggataccaagggacgcatgtatttttggcctcccagtctcttatctggctttgttcaacactttgtgggtatctgaacctgttttcaaggaaaaaaacttttatgaagcttttttagtgattaataaagtgatttaattaaagtacagattaagggagtttaggtaaggaagaattaaatatatactggtaacaatttagataaggtcataaaccattaaaacttttactacttaatcttgaagcattctttcaaagttaaacaattgggtaatgcttcttttctgacacatgtgcgaaactaaggcatgtaatttttggaagttgcttctaaagatgacccttcaggctgggcgtggtggctcatgcctgtaatccgagcactttgggaggccgaggtgggcggatcccctgaggtcaggagttggagaccagcctggccaacatagtgaaaccctgtctctactaaaaaaatacaaaaaattagccaggcatggtggtgcgtgcctgtggtcccagctactccggaggctgaggcaggagaattgcttgagcccaggaggtggaggttgcagtgagccgagattgtgccactgcactccagcctgggtgacagagtaagactccattccccacccagaaaaaaagatgacacttgaagttaattactgaagccaagtatggggaaaatgcttatcttttcagaggaaccaaacaggttttttaaaaaaattgagcacagagcatgatgtgatccgttatgtttctatctttgctttggctctcaggaaactgtagagcatggctttattggttgtggtaattttcatcagcctttggattctgttatgagcttctcctttcctcttctcattccttggcttggagaactggatgctccatgtaaaacatacggtttagcatatcctaggtgttttgttccttttgccttgcttggttttaaatcttgcttttttggtttccaatttcattttatctttgttttgtgagctttgtttgttagccttttggatgagttgggaaaacaaaaggggagttaattcttgtgggaataaagcatattttcaatttttgttttgttttgtttttagcatattgaggctattaccaaattttgggtttaaaaagtgttaaaaaaaagtttgctgttgtaggctggccgcggtggctcatgccttaattccagtgctttgggaggctgaggtgggaggattgcttgagcctgggaggtcgaggctgcagtgagccatgatcatgatttaaaaacaaatcattccaattttgtttaatttggcctcttaagattcatttgatgtctttgtctaacagttcttgctcagtgtaacaaattgtcatacaaagggtataagaaataaaagtcattcagtataagaaataaaagtcattcatcacctaaagctagttattattaagataattactttatgcacttatttataataaaacttttatatacatagagttttgaaagctgttttgtaaatttaacaatataagatagatagtcatccacagcaaatatttttagtagccagaaagtatttcactgtagaggctgggcgcagtcgctcacccctgtaattccagcactttgggaggctgaggcgagcggatcacttgaggtcaggagtttgagaccagcctggccaacatggtgaaaccccatctctactaaaaatacaaaaattagccgggtgtggtggcatgtgcttgtagtttcagctactcaggaggctgaagttgctgtgagccaagatcgtgccattgcactccagcctgggcaacagagcgagactccgtctaaaaaaaaaagttaatcaaatgtacaaatgaactaatgatacatctctacagtgaaatactttctcttatttacatctgtgaccgccattttagacttattctttccaaattatttgaagtgaaatggtttgatagaaaaacggtatgtatttctttagggcttttaataccttactgccagatattactttagagtgtatagtgtatgagagtttctctttttctttaacctctccagtgctggtaatgttaatcttttacataattttactcactagaacacattggagggagcagaaattagtttattttcaaatgatatgttcttttatacctttattttaaccgattatgaacatccttctataactatttattggctacaaaatgttgcattgtgtggctgtatcatggtttatttaattatttctttgtaaatagtttatttaatcagttcctgtgagccgtaatttaggttgtttccaaagttttactactataaacaaggctatgtatttatttttgcacaattgaccaattgtttttcctagtttatcttaataaaagtgtaattgctgggtcagagcaattcttttttacattaaatggtttacttagtatttatttattttgatctaatttaatgcgtccagtaagttaataagttgaattcacttctgtatttaaaattgtgcaaatagtaactgagaaaatctatgaatagtagacactgtactagattataaagaatgcagaggtaaaaaagacactgtcgttgctgtaacaggagtttgtaacccagtgattgtagaatttgagtcagtagcatagtgatatggtactactgtagagtttttgccttgaccttgccataatgtctttagactctatgcagatgtatttgtttatgattcacttacctttttcctaaacaggaaaatagttctgcttgcaggatgggcattgttcttattccttgcatataaagtttccaaaacagaccgagaataccaagaatacaatccttatgaagtattaaatttggatcctgtaagtagtatttttatataatgcatattagtttaatggtcccatgaaaatgctataggtcctcattctaaaagaaattgtctattcctatagaaatcagactttggtcagtttgtttattaaaataagatgtctaatcctctgttattataatttaagctataactgttgattgttatgttattaataattggttttcaattgctaaaatataagaatatttgaagatgagaggagaggttaacatttttttttacagagtctcactctgtagcccaggctggagtgtagtggtgtgatctcggctcactgcaagctccgcctcctgggttcacgccattctcctacctcagcctcccaggtaggcgcccgccatcacgcctgtctaattttttgtatttttagtagaaacggggtttcaccatgttagccaggatggtctcgatctcctgaccttgtgatctgcccacctcggcctcccaaagtgctaggattacaggcgtgagccaccgcgcccggccggttaacattttttaaaggctttttttttttttgagacggagttttgctctgttgcccaggctggagtgcagtggcacgacgtcggctcactgcaaactctgcctcctgggttcatgccattctcctgcctcagcctcccaagtagctgggactacaggcacctgccatcacgcctggctaattttttgtatttttagtagagatggggtttcaccatgttagccaggatggtctcaatctcctgacctcatgatccacccgccttggcctcccaaagtgctgggattacaggcgtgagccaccgtgcccagcctaaaggcatatttttaagagagatctgtaatattggttaatgcaaagttaaaactgggaggataatttgtgttagttgaatgataaaaatcttatgaccttgtattcattgacacttaagcaatgtaaaatctaggttgggggtcttagaaagaactaatatcagccaggaacggtggcttacacctgtaatcctagcactttgggaagctaaggtgggaggatcgcttgaggtcaggagtttgggcaacatagtgacacccaggctgtatcaaaaaaaaaaaaaaaaaattacctgggtgtgatagcaacacacctatagtcctagctacttgggaggccaaagtgagaggatagtttgagccaagaaggttgagatgagtgagccatgatccgcaccattgcactctagcctgggcagcagagtgagaccctgtctcttaaaactaaagtgaaactagtatcattaatgtcattgtcatggaaatttaggttaaccttgagtgtgccccttaggtgattttttgattaaacctgattaatgggttctaaatagaaaactagtcttttggccagccgcagtggctcgtgcctataatatcagtactttgggaggctgaggtaggaggattgcttgaggccaagagtttgagaccagcctgggcaacatagggaaaccctcatctgtacaaaaaactaacacaattagctgaacgtggtgacacacccctgtggttccagccacttgggaagtcaaggctgcagcgagctgtgattgcaccactgcactccagcctgggcgacagagcaagactgtctcaaaaaaaaaatcttttgtgtttatcagtagaatgttagaactgaaattaatgatagagatcatctagccttttataaaaatatataattttttaaacctgggagcatatattcaagttgccctgaatatatatgtatgtattccctatttattaatttttttttttttaaagaaaatgaggcctggataatttgtgtcttgtctggggttccaagcttcttacttagtagccaagctcaatctagtgctctttctattttctcccccatggcacttacttttactttgagtctttgctcagtagatggcttgatccagacattcatataatacaaactaaggagggtgtgtatcatctagttttctgttttgtagaagaaaagtttacatatcatgtgatttttttcttattgcattgatcatagtcattaagagagattttaagattagaagggcaataaaaaacagtgaaaaaattattaatagaaatcgagactaagaaaccattaaggtcaacttgatagacaagcagctgaaaccaggtattcctcagattattccttagaaagttaacctttgatttgaggattctttgagccagatttaatttattgtgattattttttgatatttatttatttttatcttcattttttgagagacgaagtctcactctgtcagctaggctggagtgcagtggcgtagtctcagctcactgcagcctctacctcctgagttcaagtgattctcctgcttcaccttcccaagtagctgggactacaggtgtgcatcaccacacgagctaatttttgtattttttagtagagttggggtttcactatatgttggccaagctggtcttgaactcctgacctcaggtgatccgcccaccttggcttccaaagtgctgggattacaggctgtgcctggcctattttttgatatttaaatgtcagtattattttatgtaaatttgtcatctgttttcactttcaaattatcagtgcttagtttactatgtggcacatagtaggtgctcaataaaatacatatattggacaatataagtgtttttatttaaaatatatgggatgaaatttatgggaaaaatatataggatgaaaaatggattttgtctttctcaaaatactgagtagttcatattttaagttcaaaataggattgattatttctttacagaattgtgcttatttttgctaacagaaagcttgttttttttttttttttccccagggagccacagtagcagaaattaaaaaacaatatcgtttgctgtcacttaaatatcatccagataaaggaggtgatgaggttatgttcatgaggatagcaaaagcttatgctgcgtaagtatcaggatccattacaaatttttaagaatggtacagataagccaggtgcagtggttcatgcctgtaatcccagtactttgggaggctgaggcaggaggatcgcttgagcccaggagtttgagaccatccctggcaacataccaagaccccatctctacaaaaaataaaagaattaaccctgtgtggtggtgtgtgcctgtagtcctagctacttgggaggctgaggtgggagcgttgtttgagcctgggaggtcaaggctgcagtgagccgtgaccatgccactgcagcccaacttcgatgacagtaatactccatctctaaagaaaaaaaaaaaaaggatagttttctgttttaataaaatattaaaatagttgtcatacactttttccaagtgcttacttcatgttgagtctatcatttaggggctacacagcagcactaacgtggtaatttaatttaattaaactgtaatttttgccatgtaaacttgattaaattaagtggtgaatgataagttaattgagctattttattagcattttgattagaggagggtatacttagatcttaccatttctagattttttttttttaggcttgatctgtttctcttgttttggcaatgtgtagcttatctcatttaaactatttaaagacaagtttaatttggacttttaagtacttcatttttggtgtctttttctttttagaatttcgtcacacaagattattcttagttaataacaactgtacttgttgagatgtggatttttaaggtctcctttttcactgctcagaaactgtcttcacaaatcttttcagaacttccaaataattttccttgttggtcttataccttaggtaaggtgcattgttattatgagatacatatattcacatatgcgttatatgcacacacatatgtctgtgtatttataaagtttgaggaacatttgtgcacccttttgggaagcagaatagagtatgtaacattagatgcagtgatctcttgggtattaatcttccaagagataaaacttaactagattcttcaggactcttcataagtacatccccacatagctcttacattgaatgaaagagtgaaatatgagattgtctgtcttttgaggactcagtgatgtataattttgtgaactcaatttaaacgtgtaaataaatacaagcatactttggagatactataggttcagttccagtctcctgcaataaagcaaatattgcaataaagtgagtcacaaatttttttgtttcctactgcatataaaagttgtttatactacaccatagtctattaagcgtgcagtagccttatgtctttttttttttttttttttttttttgagacggagtctcgctctttcgcccaggctggactgcagtggcgctatctcggctcactgcaagctttgcctcccaggttcatgccattctcctgcctcagtctcccgaatagctgggactacaggtgcctgccaccacgcccggctaatgtttttttgtatttttagcagagatggggttttaccatgttagccaggatggtctcgatttcctgacgtcgtgatcctcccgcctcggcctcccaaagtgctgggattacaggagtgagccactgtgcccagccagccttatgtcttaaaaaacaatgtacataccttaatttaaaaatactgtatggctaaaaaatgctagtaatctgagcctttgacaaattacattctttttgctggtggagggtcttgccttgatgttgatggctgttgactgatcaggatagtggttactgaaggttgggctggctgtgacaatttcttaaaataagacgacaattaaattgactacatcatttaaattcttttcatgaaagatttctctagcatgtgatgctatttgatagtattttatggacagaacttctttgttttctttttcttttttttttttgagatggagtcttgctctgtcgcccaggctggagtggagtggcgcgatcttggctcactgcaacttccgcctcccgggttcacgccattctcctgcctcagcctcccgagtagctgggactacaggcacccgccaacatgcccggctaatttttaatatttttagtagagatggggtttcaccacgttagccaggatggtcttgatttcctgaccttgtgatacgcctgccttggcctcccaaagtgctgggattacaggtgtgaaccaccgtgctcagccagaacttctttcaaaattggagtcaatcctctcacattctgccactgctttatcaactaagtttacgtaatattttaaatcctttattgtgatttcaacaatgttcacagcatcttcatcaggaatagataccatcttaagaagctactttgctcaactataagaagcaactcatctgttcaagttcgatcatgagattgcagcaattcagtcacatcttcaggttccacttgtttagttctcctgctatttctagcacatctgtagtgactttctctactgaagtcttgaactgctccaagtcatccatgaaggttgaaatcaacttctggccaggcgcggtagctcatgcctgtaatcccagcactttgggaggccgaggcaggtggatcacctgaggtgaggagtttgagaccagcctgaccaacatggagaaaactctatctctactaaaaattcaaacttagccgggtgtggtggggcatgcctgtaatcccagctacttgagaggctgaggcaggagactcacttgaacctgggaggcggaggttggggtgggccaagattgtgccattgcactccagcctgggcgacagagtgagactctgtctcaaaaaaaaaaaaaaaaaaaaaaaaggaaatcagcttctaccaaactcctcttgatgttgacattttggcctcttcctgtgaatcacaaatgttcttaatggcatttagaatagtgaatcctttccagaaggttttcaatttactttacccagatccatcagaggtatcactgtgtctgtagcagctatagctttacaaagtgtatgtcttctttttgttttttgtttttttttttttgagatggagtctcactctgttgcccaggctggagtgcattgctgcgatcttggcttactgctacctttgcctcctggattcaagcaattcttcttcctcagcctcccgagtagctcggactacaggcatgcaccaccatgcctggcaaattattgtatttttagtagagacagggttttatgttggtcaggctagtcttgaactcctgacctcaggtgatctgcccacctcggcctctgaaattgctcagtgcaagtcttactatttcttaaataataagacttaaaagtcaaaattactttttgatctgtgtgctgcagaatgaatgttgtgttagcaggtgtgaaaacattaatctgtttgtacagctccatcagagttcttgagtgaccacgtgcgttgtcaatgagcagtaatcttttgaaaggaatcattttttttttttgagcaggtctcaacagtgggcctaaaatattcagtaatccatgctgtcaacacatgctgtcatcaaggatttgttgttctatttatagagcatggcagaatagatttagcatagatcttaagagctctaggacttttggaatggcacaccagcattggcttcaagttaaagtcgccagcaacgttagcccctaccaagaaagtcagcctgtcttttgaagctttgaagtcaggcatttatttctctccagcagtgaaagtcctaaatggcatatttttccagtataaggctattttgtctacattgaaaatttgttgtttagccaccttcattgtgatcttagctagatcttctggataacttgctgcagcttccaaatcagcacttgctacttcaccttgcacttctgttgtagagatggtttcttttggaaaatcttgtggaccaacatctgctagcttctgcagctccctcacctctctcagccttcgttagggccttgctttggattaggctttggtttaagggaacattgtgggtagtttgatcttctgtcgagaccactgaaacattcttcaaatcagcaacaaggctgtttcactttcttattatttgtgtgttcacttttaagttcctttaagcgctgttgctctgaattcacaacttgactgtctggcacaagaggcctagcttttggcttgttttggcttttgacatgccttcttcactaagcttagtcatttctagcttttgattcagagtgagagacgtgtgagtcttttttcgtttaaacatttagaggcccgccgagaccagctcggtcagggagaccctaacccagcggccctagaggaattaaagacacacatacagaaatagagaggtgtgaagtgggaaattaggggtctcacagccttcagagctgagcaccccaaacagagatttacccacatatctattaacagcaaaccagtcattagcattgtttctatagatactaaattaactaaaagtatcccttatgggaaatgaagggatgggccgaattaaaggaataggttgggctagttaactgcagcaggagcatgtccttaaggtacaaatcgctcatgctgttgtttgtggcttaagaatgcctttaagcagttttctgctctgggtgggccaggtgttcttgccctcattccggtaaacccacaaccttccagcgcgtgtgttagggccattatgaacatgttacagtgctgcagagatttcgtttatggccagtcttggggccagtttatggccagattttgtgggggcttgctcccaacagaggccattttagggttagtaatttgcccaatttgaatcttgtgtgtctcagggaatagggaggcatgaggagtgggagagagatgggggaatggccagtgagtggagcatttgaaacacatatgtattaagttctttttcttctgcaggtgcagtttgtgtgccagccccgcaatgataatagaaatgtcaaagatcacatatcactataacagataaaataatagtgaaaacattagatatattgtgagacttaccaaaatgtgagagagggacatgaagtgagcacatgctgttggaaaaatggcactgatagaattgcttgatgcagggttaacacaaatggcagaaaaacacgattatctgcaaagtgcaataagaagtttgcttgcaatagcatactaagttataatagcaaattgtgaaagtggcatgtaaatgacagaagtttgggagatatcaccttacttatttttgtacttagtagaggatattgactatgtctcttctctccccttgttttgtggcttgctgtttatctatgtgaattactatatgattctgtaataaagcagtgccattaggacttttgaagtgtgtactacattttctgcgtagcagttgtccttgaggttactgtctttcagttagtgtctccttcaagcatttactctcttttcacaagtattggtatgccttgattgctgtcttcaggtaatttaaaaagacatttccagaggaagtcaggtagccaagactatttaattagtagtttttattttagtgctttggtgaaatccccccaccctatccccccagtctttaggtattttaacattttcaagtttataattttgttctcagatttctggaaatctgactatgatgtgtggtcactattctgaaaaatgcacaagaataatataaggtgtttagttttaactcagttatgtggttaaactgtagaatattttatgtataaaatgtcttaaatagttgacgttctgtaagaccaatgaaaaagtgaagtgatcgtgggacctagaactttgagattatgtaacttgcataaatataactatattagataaaggtatatattttaccaactataagttctaagtgcttgagttgaagttcctatctcatgaataactctagcagccttggaatgcagttatataggctttgatgtgcaaagttttttagaacttgcttaggttatttgagatcatttttctctccttagttgcctattataataaaccagctgggtcatttcattttttttttaatcagattttcactctttcctttaggagttataccattgaattctctggttcattatctagatagaattgagattttgctctcagatgtaaaacctgtctttaaagctattgtatagcaagtgggcagcgttgttgtcaccttaaagatatgttaatttttataaaagcatatggtttttacagatgagcatgtaacttataataactgtgcatagccaactcatggtcacttgtttacagtttagtgaaagcattctctagatcaagatttatgatctggagtccctgaaattgtatacaaaatttatgtgtctttgtaatgtgcatttttcccagggcaaaggggtcatagatttccttagattcataagagaatctataatcgtcctctgttacccccaaaaaattaagggatataatcatgtttaggaaactacactcactgaattttcaaaaattctgttagcatcattgatcttgtttaagcttgttaaatgtgaattatactaaaattacgcagcttttaagtactttaactcttagaagtggtattatactgaaatactaagtaacaaaaattcatttgcttcttaaactgactttaagttgctgacttattttattagattgaatgttcaacatggttcccatcacacagcagttgtagaagtcagtttaatgagtgagttaatgtaatcgtaactcgtaggtctgtgtaggttgcaaaatcagagtgtctctgatgtgagctatgctttatttggcaaaatctgggagtattgtatagaggacagagcagtttgttttgcataatcacaaaggcagaaggggacagagatggttattttgggcagaaggatccaattagaagacaatagtgaaagaaacaagctaaaactctgagttgggtggacagttgtacaggggatctaggacaaaatttttgagaaacatccctcaattttgaaaagaaaatcttagcactattccttattatcttgcaacctgtctagtaatgctttttattggctcctgtatttttctgtggcctttcatcaaatagtgtaagtggagttacaattaaataaggattaaagacatcaaggcacctgtttgcataaatgactaaattgataaatttaaaaatattttcaagtcatcgaaaactaatgaatgtcctttttgctattttataaaggtatttctgcattgcctatctcagattggagttttgttaaatagaaactacattgcctcttaagttttgagaagtagaagtacggttaaaattagatttgaccatatggaagatcttttaccagttggtctccaagaatgtcttccttattatgttattggtcatttttgagcgtgtgtgttggtggggtggtttctgccttatattccttaactacattgtatatttttgtaaggaattgggaattcattttaatgctttttaacatcttcactgggaactggaataaagttattcttgactctgtaccttgagccattgtcaaagtcaggggttacattttaggtatctaaaaattactctttaactttcacattccctgggttaggaagctgctgttcaggagaaattttcctggttcttctggcaattggcttaggagaaaattgtgatcttagcacagtgcaaattaccttacccacagcaatggagttttacatgtggtggtcatctgtttctttcagaatgtggtgctattgttttgtggggaagctaccattatgaattaaatttatgtttttaaaaaatgtgtatttatcattactaatgtataaacatgctcattgaagaaattttggaaaatatatgagagtataaggggaaaaaaatcgcctacaattctccctgccttcttagaaaatgtagttgcctttaaagtttgatctggttgaactgagaaccatctggttgaacatgagaactggttaagcttgagaaccatgggccaaccaggaattagtatcaagacgcaatagttagcattttctgttaatgcgcatttcttgctcctccctttccctttctcctgatttcagagaaacttttcttgattcatggaatcagtatcttctaagaaatgagttggttggctaatggagtttgtctatatgagtacttgtttttcagatgtggctttctaattttgcaactttgttcttttgatgctagtttaacggatgaagagtcccggaaaaattgggaagaatttggaaatccagatgggcctcaaggtgtggtaaatgatgattttaaaatattggcgatatggtatatattataaaaatgttaaccagattaaaggaataatattattttcttactaaacttatactcacatggagtttaacatagataaattgagctctcattaatttttgctttatttttctttctaaagactagtttgaaagatataatttaagttgatccatagagaagaataatcactatcatttccaattactagttgataaaaatttggaggaaaaaatcttatttttctttacagacttcacattttctcatgtgttcatagtgtttatgtaaactcaggacatataaaataatttatattttcttgagagaaggaatttgtacttacagggtttctttttccttgaaaaatttgaagtttcagatataaactatatccctgaacttttgtgtaatgggggcctactaataagataatctttctcaaagtttgtttttgtgttgtgggggagagttctgggatatattatagatcccaaatatatttaatgtatttattaaaactgaaagtagagattcttcagaaactgatattttttctatttcagccacaagctttggaattgccctgccagcttggatagttgaccagaaaaactcaattctggtgagtgcatttaaataagatacattatgatgtattagacaaaatttttgttatgtacaatctgtcttggtaatacaagaagaactattacaaagaaaatactggtgtgccattcattcattcattcatttgagacagagtcttgctctattgcccaggcaggagagcagtggcgtgatctcggctcactgcaacctctgcctcctgggttcaagcgattctcctgcctcagcccccgctgagtagctgggattacaggtacccaccaccatgcctggctaatttttgcatttttagtagagatggggttttgccatgctggccaggctggtctcgaactctcaaactcctgacctcaagttatctgcctgcctcagcctcccaccatgttgggattacaagcatgagcactatgcctaattttaatttacaataaattgaattgtatatattccatatggtatttcaggaggaggtaggatatcagacttcaatcactgcaaccctaaaatgtcaagaattatcttactcagggatacattcctacttcaactttcttgaaaataattgtctaaaggctgtctttgaggcaataaaaacaaaatccacatagtctgtaatttgttttgaaaatggctattaagttattatctggcagattaaaattggttaccttgagggggtatacagttgctgcataagcttgtttgtcatgcttctggttagtaggaatagtcgagaaggaataagttactaccagatttaggatcaagtaataggagaaaaatcagtaggtaaaaattgctagtcagcattatgaagtgactccttgatatttagctaaaggaacctttggccaggggcttcttatctcatttgttcccagagcactaactactgagaggttgtggatatataaatacctgcctgactggaagagaaatgtaatttacaaaactgttttgctggtgttaatctgtattgtgtcagtaaataaaaaattaaaaggtaatttattatagtggatatgaacataggctctagagctgaactacttgggttcaaatcctggctgtgcaatttgctagctgtgtcctaggacaagttatgtaacccatgtgtactgcaggttttctacctacaaaaggagggtaataatggtaccttcctcttggagtttgagaataaggattaaacaagataatacatgaggaatccttttaatagtggctcccccattgtaagcctcaaaataaattcatggatgttgttttaatttacctgacgaaggccataattctttttctcttcaattttaggttttacttgtatatggattggcatttatggttatccttccagttgttgtggtaagttttagctttttaagttaatgttttttttggaaaggagattgacatgttttggagtctccctataacattttaaatgtatgttagaatataacccattgatccttgaatttaagagtcttgccactgaaggtgaggtgggaggatcgcttgagcctaggtgtttgaggttgcggtgagccatgaccccacctctgcactccagcctgggccacagagtgagaccccaactgaaaaaaaaattatataactatacttttaatggtcttctaaatgtgacattacttgagcatgatgtgtatatcctcccaattcaaaaattacccacaactgaccgggcatggtggctcactcctgtaatcccagcacattgggaggctgaggtgggcagatcaatttagggcaggagtttgagaccaacatggtgaaaccctgtctttactaaaaatacaaaattagtcagacatgctggtttgaacccaggaggcagaggttgcaatgagccgagattgtgccactacactccagcctgggtgacagagcgagactctgtctcaaagaaaaaaacaaaaatcacaaaagttacaactgagttaacacagatacatatatacatatgtatacatatgtgtgtatgtatatatgtatgacatatgtatatgtgtacatatgcatgacagatgtgtataaatgtatgacatgtgtatatatgcatgacacgtgcatatatgtatgacacgtgtgtgtatgacatacatgtgtatgacacgtgtatatgtatgacatgcatatatgtatatatgtatgacatgcatatatgtatatatatgttttaaatacagggaaactgtccattttaattttatttttgttatttatttatttttgagacaaggtcttgctgtatagtaaggtggtgcaaacatggctctctgcagcctctacctcctgggttcaagcaaatcctcccacctcagcctcccaagtagctaagaccacaagtgtgtaccaccatgccctgctaatttttaaatttttttgtagagatggggtcttgccacgttgcccaggctggtcttaaactcctgggctcaaacgattatcctgcctcggcctctcaaagtactaggcttacaggtgtgaaccaccatgcctggctgacacagatatatttaaagtttcaaatgaaagtcttcccgcactaccaccctcaacttcatttatttaggaatcattgggaagttgggtgttttttctttaaaatctttttctatgaatttatgtacacacattcattttaaaaaaaacctttaatgagattttactgtatgtgtgcattattctgtttttttgcttaatataatggggatgcaacatatagaaaagcctcatttttaaaaacagctgtataatactataatacggagataccatacaatttgatattcaccatttgttacttttgtgacttgtgtcctttctgatcctggagttccttttagtcacatagtgagtctaataattaagttgtttgttttgctttcttcaaaggattgttgcaagaatccaatcatattaagtaatatgaatgaaagtgtcatgtcaacttgtaaaattatgcctacatttgtttatcaagtatttattgaagacatgctgtgtgtcaagaaccagcttggtgcttatagcagtgggtagttttatccctttttggtctttaaggtatttctatccaaaatggtaaatgttttgattatatatatgcagtgacttaggttggtgtttaggcttcagacagtataaatatttgctaaagaaatcacttgaaatatgcaagaaagaggtccttgttgtaagactcaggtatttttattgttttatgaatatttagaagatttgaccataaacatattctgcctcaaacttaacatttatcagggttttgttttgctttttttttttttttgagacagagtctccctctgtcacctaggatggagtgcagtagtatgatcatggctactgcagccctgacctcctggactctagcaatcttcccacctcagcttcctgagcagctgggactagaggcatgtgccaccatgcccagctaatgtttgcatttttctttttcttttgtagagacagggtctcactatgttgcccaggctggtctcaaactcctgggctcaagcagtccactcacctcagcctcccaaagtgctgggattacaggaatgagccatctcgcccagcctatcgtagtttttatactttctttcttgtttaattttttttgtgttttagggctcttggtggtatcgctcaatacgctatagtggagaccagattctaatacgcacaacacagatttatacatactttgtttataaaacccgaaatatggatatgaaacgtaagtaaactttaagtaactttgctattaatcacattgttttgtgacttatgtggggttgatatatattccttaactctatactgttgagattctattgtacagttttataaatagttaatttatataattaaagctagagaaaaatgccagcaccctttgtcacatttcttaatttatattttcattattcacatttactcatatatttcatcagaaattttaccataatccttatgcgtgcaaattttgtaattctagctaacatttattatttgttgtatgccagacactgctagttactgtatgtgtcttgactcatttaatttttgctgtgttctcgtaagtgagtgctgttttacagtacatcttatagatgaggaaactgaggcaccgaaaagtaacactctcaaggatacacagtaagtgatatccaggattgaacccaggcagtctggttcttgagccttaaaccattatgttatagtgtattaattgtagtaaaaataaaaagtcttaggtgtgttgaaagaaaactagtgctagagtatttcattcccagttcttatttaaaaatttaagaaaaaaatactattttcactttctttgattatataaagcaaactttgcagtttatccttgggagatagagtgttacctttcagaatgatggctctgcaaaaatcatagctgctcctccatccctctttaaaaaaaaataaaataaaagaatgtaagttttgaattgtgtctccgggaccaaaatggacttttctgcattttggatttggcaattttactaattttcttagtaatgagagagacttctcatggtcatatatgactgtgtgtgaacagattttacatttctgaatgagttaatactactttgccttatcgaaaatattactcttcctaaagctggattgaaatgttaatacagaaacttactcccttatgaaaatgtttcatgtttataattttaagtgtgctttttgcctcaatcattttgatttctgtttcttttctgagggtggtatccttacacagctttgtcagagaagcattgtttagctggtggatttctttacacattctaggttattttagctgttttaggaacagttgttattaagtaaacatttgagggtagtaatagtaatagctcacacaagtactgtgcttgctgtgtgtcaggcacatatgaagaagctgagatacacagatatgaagaatattgtcctaggtcatttagctaggaagtgacaaaataccaaggtctgtgcacttaacttctatactatcctgccttttgtgagtacattacatggatttttttttctctgaggcaaagtttctctcatctcccaggctagagtacaatggcacaatctcagctcaccacaacgtctgcctcctgggtgcaagcaattctcctgcctcagcctcccgagtagctgggattacaggcgtgcaccactatgcctggctaatttttgtatttttagtagagatggggtttcaccattttggccagcttggtctcaaactggctggtctcaaattcctgatcttgtgatttgcctgccttagcctcccaaagtgctgggattacaggcgtgagccaccactggcctgagggttttaatcatgtgtatttccacaaaatcctcttgggttccataataaaatttttttggaaaattataatgcatattaggtttacaaaaggccttgagaagtcatgtagtaaagaaacctttaactcttgtttacattattttcagctttatttaatcatagggcccccttttttcacgtgaattattaataccacacagaatactgatgttctatagaaagtttctgtggaactttcagtgattttaatgcctccagttgctttggtgtgctttatttgatctatacttctgttcacttgtggtggttgatactgtgtacattttaaaaagcgagatgttactttttttatggaagaaataaatacttgtcagtggagttcagataatttttagcattgtgcatgtttagaaaagtgcttcactttcaagtgaattaagtatctcaggagggggaattaatgaatgagcatatttatttaccttcatatttcttttgttttgttaggtcttatcatggttttggctggagcttctgaatttgatcctcagtataataaagatgccacaagcagaccaacggataatattctaataccacaggttaggctaatttcccaaatcccccgatgagcagttaagtattaaagtgaatactttttttaaaaaaagcgtgtttttgaataattattttatttattctagctaatcagagaaattggcagcattaatttaaagaagaatgagcctccacttacctgcccatatagcctgaaggccagagttcttttactgtctcatcttgctagaatgaaaattcctgagacccttgaagaaggtatttgtgattccggtatctacagaggtttagtgggatgaaagcagcagaattaattagacttaatggtgtgtattagtttgttctcgcattgctctaaagaaatacctgaggctgggtaatatataaacaaaagaggtttaattggctcattgttctgatggctgtacaggaagcatggctggggaggcctcaggaaacttttattcatggcagaaggcaaagccagagcaggcaaaggcagagcaagtgtcttcacatggccagagcaggaggaagagagagatgggggagatgccacacgtttttaaacaaccaggtcttgtgagaagtgtatctcgagaacagcaccaaagggagaactccacccccctgatccaatcaccttccaccaggccccacctccagcattggggattaccattcaacatgagatttgggtggggacacagacccaaaccatagcatggtggtgcggtgtgttttgttgctgttcttttttggccaaataattgctcaaggactttttaaaaaagaaatgtatatgctacataattacttcacaaatggtttgaagatctaagtaagtcagacgttttggcaagtgttaaaatttagtgtttcaaggtgagagaatgctctgtataagaaatgtttagttaattgcagatcatacaaaagttcctaataatttttttaaaggactttgtaagtttttggagggagcaaaatggatttcacaacaaccaacacctctcacctccccatctacaagcttcctccgacagtggttaccaataatgtctgttttatagttatttaaagcttcataagtacttgaagccatgtattctgcttaaaagaaaagtagttgatggaggcaacagtgtttccagggatgtcattaattatctctttttcaccgacattatttcagttaaagttttaaaagacagttactacctctaggaaataaatgttctttttgaatgatatcctaccatcccccacctcctttaaggcagtaatgcagttaaatgcttccgaaaacaaggccatgtgacgcttagtaattggtgataggacaggatgcttatggtggaatgaaggagcactatttaggcaatatcattggagttgctttgaaatactcaattaactagtaattctgttgctaatgttctgtacagatacataagcatctccatttttacttacctgtaagaagcaggaaacaaatcattgttgagtaccaaatccataggttaatgtggtcttaatagttaactattatatgcagtataaatgaaagagtctttctctttctgtaagttgccctcttcttctcttctacgtctcttatctctccccctgtatttagctgacatatttattttgacatatttagttgatctgcctgcctcagcctcccaaagtgctgggattataggcgtgagccaccatgcccagctgggagttggtttattaagcctaacattatgatattaaaaatttgtctttgaaacgtctaatctgagctagggttttatggctgatttttgacatagtgatactgaggagaaactcttccattcaatctgtaaaattctgagatcatgtgaaatatttgtggcataactttaatattagttttgggccacagtgataaagatgctttaactgtaaaattaaaatgatctgtttcaggttttttattgttttgcagatcagcaattcatgctaaaaaagtgtcctgccctacttcaagaaatggttaatgtaatctgccaactaatagtaatggcccggaaccgtgaaggtgaggaggaaatatagttaattatgttatactttttcttgcaagcatatgcagattgtacttcatattttaggatttatgggtactcagacttctgtcggccagttcagtgagcttcttcaattttactcatgtcttttcatatttctttcctatattttctattatttaaagtctatatcacagctcactgggttttttttgttcttttttttttttgagatggagtcttgctttgtcgcccaggctggagtgcagtgacaaaatcttggctctctgcaacctctgcctcctgggttcaagcgattctcctgcctcagcctcctgagcagctgggattacaggcgcgtaccaccacacctggctaatttttgtatttttggtagagacagggttttaccatgttggccaggatggtctccatctcctgacctcgtgatccacctgcctcagcctcccaaagccctggtcactgtgtttttgattttaattcttgtttttttttttttggagacagagtctcactctgtcgcctaggctggagtgcagtggcgcgatcttggctcactgcaacctccgcctcccagggtcaagtgattctcctgcctcagcctcctgagtagctggcattacaggcgcatgccaccacgcccggctaatttttgtatttttagtagagacggggtttcatcaggttggtcaggctggtctcaaactcctgaccttgtgatccacctgcctcagcctcccaaagtgctgtgattacaggcatgataatttaattattttattgttcaattgtttgcaaagatttaaaatttctctttctttgaataatttttgagttaggtcattttttctaacagtgaatttgaaatctttaactgatataaaagtgattcatatgtcatgtaatttttattaattaattatagacagcatctaccagggctggagtccagtagggtaatcatagctcactgcagcctcaaactcctgggctcaagcagtccttctaccttagctctccgagtagctggaactacaggtgcataccacagcacggagctaactttacattttgtgtagaggtgggatctcactttgtcgcccagactggtctggtttccaactcctggctttaagcaatcctcccacttcagcttcccaaagccctgggattacagtcatgagccacatgcctacaggcacctagccatttttttttttttggtatggaaggaaaagaatgagggaatttctggtcagtaatggaaaggaatgcccttaaaaaaggatagtggttatggtttgttgttacgggtgatgttggttcttgtcatggtgtcatatgttggtgatactgataatgtctgataatttactattatttgaggtgaggcaaataatttttcttttaaatcaatggttgttgctggaaaatgttcattagatcgagtttgtatatttttagtgtcttctctggtaacttttaaaggaaaatcttactatgatcctcaaatttgaggtgttatggatttagtgtgaattttgtttttgtgatgaattgtatactcctgaacatgtaaaaagtccagccctgtttctttttttcctgttctttctaagaaagggagtttcgtgctccaactttggcatccctagaaaactgcatgaagctttctcagatggccgttcagggacttcagcaatttaagtctccccttctgcagctccctcatattgaagaggacaatcttagacgggtttctaatcataagaaggtaattctttgctactttaaagtcagttttcagcagtttgtcctgtcacttaaaggtaacatgaataaaagttttctggaaatggttactatgcattttttagatttagaatgtcttaaatactctaaaactttctctcaggtggttctgttaacattttcttgactaggtagctgtgttttatagtattttactactgtaagtagttttattattttgggggttgttgcatttaaaaagtcaacagttagttccttatattatgttaccaaaaataaatgtactgtctactttacagtcattttattcttggcttaaggttgggcaattgtttactggttaagcatgaacaacaaaaacatttaataaatcaaataaagacagttcttatttagaatatataatctatagtataaacatgataatgaatcttaagatataacaaaaatttgtgtaaatgaaaaacttgaggaaatataagaaactgaagttacaattctagtaggagattttaaacattattttgtatatgatagataaaactagcagagaatagacattggatttgatagtatattaatgtagaattaataaatgcatgttggaaattagtatcagagttctctgtccttttaagtactcatgttccccttataaatttgattgtatgttaagtcataattaaaaacttcagaatctaaaagcagagattttacatgcctcatgatctaatctgtgtctttgaaagtgaaaaataactagcaccaaacacctggaaaattaaagaacacgctcctaagtaaccattttgccaagatggatattactgtagtaatagctatattttaagaataacaaaaatgagaatattgcatagtaaaactttgaaggtgcgtctttattgaggtttatttttacttttattaggtaaaagtaaacgtttattattaaaggtttgttaatagtaaacctattaattgctaattaaaggtttttgttattaaaattgaaaataaactgaggacatcaattgacaaagttcttggttgagtcaagattcttattttttccctccaactttgttttttctaatttaaaaaaataagcctgtattaactttataatttaaaaattcttaatttaaattttcttggagaaaaaggtcatgaaatgccatatcgttattttgtactttgaaatgcacattaatcaacacttttctaaaagttgctggattttgttgtggttaacatgtgagtaattttctttttatgaaaagctttgtgagttagggaattatgtattttcttttttttttttattcagtataaaattaaaactatccaggatttggtgagtttaaaagaatcagatcgtcacactctactgcacttccttgaagatgaaaaatatgaagaggttatggctgtccttgggagttttccatatgtgaccatggatataaaatcacagggtaagtgggaggtttctctgttgagcattgcttcccttttgatagattggttctcatttatttgactcaggattctcaaaacactgtacttaataacataacttgttattagactttgcagaactgtagtttacctgtcagatttactatgttggaaaatgatttatacctaatagtttgagaacactgatagagtcctacttttattatcctcataatgggatgaagtctgaacactctgttctgtagttcaacttttagcaatttcttaactttccaaagaatgatgaagacttccaggcataataaaagaatgagatatttgaagtatattattagtatgaaagaaatagctgcctagttctaaaattaaatttttaaaacccaacttatttatgttaattaaatgttgaaaattactgtgttttatgccacatttcatgtgtttttcttgccctacctctatattttctttgagggaaaaaaataaaggctatttttctacctatataattgctctgtgtttctatttcaatatctgaatggtcttagaatactgagagaattagagactatctgctccattctttcattgtggtggtggtctgagctttaacatttgcgaagttactattatgagaacattcttttagttaccaagaatacagggatatattaataatggtttctgtctttattttatttatttataaataatttttgagacagggtctcactctgtcgtccaggctggagtgcagtggtgcgattttggcttactgcgtcctctgcctcccgggctcaagcaatccttctacctcagcctcctgagtagctgggactacaggtgcacactaccatacctggctaattttattttttgtaattttagtagagacagcgtttcaccatgttgcccaggctggtcacgagcttctgggctcaactgctccacctgccttggcctcccgcagtgctgtgattataggtgtgagccaccgtgcctggtttgtgtctttaaagagagcttattgtctagttgaagcaataggcttaaaaataagataagggctgggcccagtggtgtcatgcctttaatcccaacactttgggaggccaaggcagggggatcacttgaacccaggagttcgagaccagcctgggcaacatagtgagaccctgtctttataaaattaaaaaaaaaacacacacacaccaagataacatatgctaagtgttaacgtgaatgacacagacattgtaccatttatttatacagcaaatattgaatgctgtgcactcctctaggtgctggggaagcagtggtaagacatagcctctgcttattgagcttgtattctaataggaattctaattgggaaaggaaggcaaacagtgcaatctggtttcagtttggctggagtgtagcatatgtgttgtgaaaacttggtttgctttggtgaggagttggggttgccttgtggggccatgagttttcagactttaaaaatactaatttaaaagctgtatttaggactgtgctgatttaataaaactgtccaaataaaaattttgggacttaaagatactttgtgatattaagaactgttaaaagtatacccttttcttttcttttcttttctttttttttttgagacagtcttgctctgttgcccaggctgaagtgcagtggcactatcttggcttactgcaacctccacctctaggttcaagtgattctcctgcctcagccctcccaagtagctgggattacaggtgtgtgccaccaccatgcccagctaatttttgtatttttagtagagacggagtttcaccatgttggccaggctggtctcgaactcccagcctcaggtgattcacccacctcagcctcccagagtgctgggattataggcgtgagccaccatgcctggccaaaagtacatgcttcttagaaaaatgaatattagaagagattttcttatagaaagtagaaatttaagagtgttcggcctcactgacaaatattaccatggatccactccatagcatcttggatagacagtttatttatatttttacagtgctgcctaattatgtaataatagtgctatagttggtgaaggaggagtagaagaaatatagaagcaggaaaggggcatctgcatgataataatgctggagatggtggatctccttccctaccttgctagaatctgtaatagaatctcctgtagtccttttcttcactttaaagcaccaaacagcaggtcagcattcatgtagttatttcacatgacctgcttgtgcacatacagctgtgcaaaatgaaaaatgtagatgaatatgtggcccagatttgatttttgataatggagacttccagggtgaagaagggataccataccctttgttgatacccagctgctgcaccttgtagcgggtaatggagatagcaattgcagattattggaggccattcttttcaactgatggtatgttagtaaatgccagaccagtatgaaaagtaaacataacaaacttaaaactgtaggtaaaaacatgtaagaagaactatcttacatataaaatctgtagaaaaaatgaattaatgatcacatttgaatggaaggtatatttgagttattttatttttatttattttgttttattaactttatagtagagtttttggggatatgtgtgggaaatatggttttaaaaattaaataattgcaaaaacacgtatttagtaccatttattgaaaaaatactttttcaaaagtgctttttagtgtaaagaggatatatttgttcttgcctttaaaaaaataagtctctttagtgtggttaggaatactagctttcattatttttttcagacagacattgatcatacaggtaaaatcttgtgaatgtaaggtttgcacagtttaatagggtgacagaaccctatttttatgtcactgtgagagaactgtgttatggtaggtctcacattatactgtgttttcagaaacctgggtttgaagcttagtgtgcgaatgcaggtgttgtgtgggtttgggtattttactttatttctgaacctcagtttcttttttttttttttgagatggggtctcactcttgccctgaagtgcagtggtacgatctgggctcactgcaacctccggctcccaggttcaagctatcctccacctcagcctcccgactagctgagactacaggcgggcaccatcacgcctggctaatttttgtattttttatagagacagggttttgtcatgttgccctgctggtctcgaattcctgagctcatgccatccgcctaccttggcctcccaaagtgatgggattacaggcatgagccaccaagcctggctaaaccttagtttctgaaagtggaaatactttgtagagctattttaaggattaaatgaattaattgttaaaagcatctactggagagccttatacagagtagtcaatcagttatttttttaacaaatttaaaatataatatgcttgaaatactaaagtgccaaactaatttgggtaagctaagttttgctgtttgcattaacatagaacttgatttttattttttgctgttttttttcttccatcttaacagtgttagatgatgaagatagcaacaacatcacagtaggatccttagttacagtgttggttaagttgacaaggcaaacaatggctgtaagtagtctatctgtatttttatgctttaagagttgtgtgtcaaggcttttatatttatttccctcattgtcaaagtcaaaactgttgtaataccaagatctaattttgcaaattctgttaactcttttgaaattttaaattaattttcatgagacagttttcacatacactaaaaaaacctggaaaataatcctttgtgtgatagtttaattctctataaaacataatcataacaaagtaatgtggatatagttcttgagctgtgaagtgctatacagaagttgttactgatgagaatttcatcacctattcctttttagtcagttctatagagaattgacttttatttttcatttcaaaatctaagaattacaataaaaataacattttttttcctgataatgtgaaacatttatgttgtctggaaaaaatttaaacaatgcagaaaagtataggaacaaattaaaactacctaaaatcccaccacttcgagatgattcgttttgaggctcatccctgtatgtagcctaatgtatgtatacctgtagagctaaatgatgtttttgtcatggatcccttctctctcccatttccttccttccttccctccctccctccttcccttcttctctccttccctcccttccttcttttttttttcttttttgacggagtttcacccttgtttcccagactggagtgcaatggcgtgatcttggctcactgcaacctcccatctcctgggttcaagtgattctcctgcctcagcctcccgagtagctgggattacaggcacacgccaccacacctggctaatttttgtgtttttagtagagatggggtttcaccatgttgaccaggctggtcttgaactcctcaactcaggtgatccacctgcctcggcctcccaaagttctgggattacaggcgtgagctaccgcactcagcccgtctctctcattttctttaggaaaaccccttgtcagcctcaaatgatcagagtgcataatcttgttgtgtgtcgtcttctgtctttctccatgctcatatttaccatctggatctttatagtgcatacgtacatatatgcacttaaatgtagattggtacttgtctcatgcttttttgttaaatccagtccaatcattttgcatatatttccttcatcttttttttgagatggagtctagctagctctgtcacccaggctggaatgcagtggtgcaatcttggctcactgcaacctctgcctcccaggttcaagtgattcttctgcctcagtctctctctagtagctggcattacaggcatgtgccaccacgcccggctaatttttgtatttttagtagagatggggtttcaccgtgttggccaggctggtcctgaaatcctgacctcaagtgatccacccaccttggtctcccaacgtgctggggttgcaggcatgagcaactgcgcccagcctattttattttttgttgagacacggtctcactgtgttacctaggcttgagtgcagtggtgcagtctcggctcactgcaacgtccgcctcctaggctcaaatgattctcccacctcagcctcctgagtagctgggaccacaggtgtgcaccaccatgtccagccaattttttgtatttttagtagaaatggggtttctccatgttgcccaggctggtctcgaatgcctgtcctcaagtgatatgtacccctcagcctcccaaagtgctgggattacaggcatgagccaccatgcctggcctaattttttttttttttttttttaatagaggtgcgggtctctgtaggctgcccagctgatctcaaactcctgggttcaaaggatcttcctgccttggcctcacaaagtgctgggattacaggcatgagccaccatgcctggctttcagtttctattatttatattttctcctgagtcaactggtagagactgtagtattttgactcaatttattcaactagtggtagattttagcttctttctctgaggtttttgagcatctgcaagaaatacatgccacatttatatcccatgcctaaaattgctggtaggaaaaacatatatatatttttttcttagagagatggaggtctcactgtgttggccaggttggtcttgaactcctgacctcaagtgatcctaccatttcagcctcctaaagtgctgggattacaggtgtgagccaccaagcctggcctgaaaatcatgttttgtagtaggatatattgaatcaaagatgttgtttttattatagcaagtgataaggaagcatttgtcatggactctaggtgagagagctgcctcctgggagaagaggaactgaaaccaatgctgaaattgggtttagaatccaaatctagactacccatatcctttggacttcccagcctgaaaaatgagcaaaaatttggtcttgaactattgacatttctggagtaattggtagaaaaaagaatggaatggaactgccctggagtaaagaaaagaattgtttttatcttcccattcttgtatgaactgtaccttggagtaatcaagtatcagaacccagctaataagtgaaaggaggaagttatgatataattagactagggagtggcaacctttttctttaaacatccagatagtaaatattttaggttttataagtcatacagtgtttgtagcaactgctgaacttacagatgggtgtggtcatgttccagtaaagctttgttttaaaaagcaggtggcagggcaggcacagtggcacagctacttgggaggttgaggtgggaggatcctttgagctcaggagttcaagaccagcctgggcaacataacaagaccactgtcttttaaaaaaaaaaaaaggcaagtggtgtggactgttcagagttgactcctgaattaggctgtttttattgtatagagcctaaaaattataactttttacttgttagctttaataattctagggagtttattaaacacagcctgcatgtcatcttctagtatagatgcttactgggacttaaatcctaaatttactggttctgtactgattctaaatggattgtatggttggtggatatagctttaggatatgtagattttcatggtgatttttttttttatagatatggggtctcgctctgttgcccatgttagtctcaaactcttggggtcaagcaatcctcctgccttggcctcccagggtgctgagattataggcatgagccaccatgctccacctgtgatgattcagttcttagtctcaggtctcaggtccaataagcagtatcactgacaatagtgaataaactaatactagtctcaagggtttttttgttgttgttatttcgcacatcacactgacatattgtcaaggttttaatgcagaaaatagtatatattctcataacattaaaatactcaacgtttgcttgctaagaataaaagtgaaattttaaacaaatatttttactgtatgtatccttactgtgtttgtaaacttgagtagactgtacttttcaaaacttgttcaagacagatgtgagatactttagaaggtatctacctgcataggcacacattcatcagctagtaattgctaaacgtctccttctttgtcaattgtagccagttaaaaatacttaataaaaatgcagtttgaaagattgctttgtttgtctgaaagataaatataggttgacagattttgtatttctcttcttgccgccccccaggaagtatttgaaaaggagcagtccatctgtgctgcagaggaacagccagcagaagatggggtaaaaacttgggtttccgaacctatttttcctagtgaaagaaatattttatttacttttccaattgacttatattgctctgggagagtaattcagtttagctatttccacctaaaaattactacaaccttcaattgaatctgttgctataacttaagagtgtgacgtgttatgattcacagcagggtgaaactaacaagaacaggacaaaaggaggatggcaacagaagagtaaaggacccaagaaaactgctaaatcaaaaaaaaagaaacctttaaaaaaaaaacctacacctgtgctattaccacagtcaaagcaacagaaacaaaagcaggcaaatggagtcgttgggaatgtaagtttattattatcgttattatcattattaagctaaaatatacaaactaaaatgttcaagtcttacgtgtacagcttcaaaagttttacataatttatgcacccgtgataccctagaaagctcccttgtgctcttctcagtcagtgagcccttcatccatctccccatccctctacctcccactattctgtctataatcgccatagattagttttgcctattcctaaaggtcatataagtgtcatattttatgtatggctcctttcattcagcattatgttcatgataatccctctgtattgtttgtagcagtagttcattctgtgtgtgtgtgtgtgtgtgtgtgtgtgtgtgtgtgtatagtatttcattgtatgaatataccacatttacctgttttgtggtggttcgacgtttggattgtttgtagttcttaacctaatatgaataaagggtgctatgcttattcttatacatggcattttgtgggcagtcattttccacctagcagtggaattgctagattataaagtaggtgcatgcttaactcgttaaaagagcctgttttccaaagttgtaccattttatgctcttacctacgtgtgagagtcttgttctacgtactcaccaacacttggttttaccagtcttttagctatttggcagatctgtagtgatatctctttatgtggtttttgtttgcatttacctaatggctaatgatgttgaacaccgtttcatatgcttgctggccatttggataacttctttttctattgggttgtttgtcttgttactgaaattgtaggaattctgtatatattctggataagagtccttacatttttactcttattggtagcttctaatgtttattattttaatgaggtcaatttcattagtctctttttttcgtcagtgaggtcatctttcatcgatggctaatgcttctgtgtcttaaaaattaagacatcctgactgttccaaagtcatagaggtatttttctgttttcttctggaaacattattaccgtagttgataaacctatcttgaattaacttttcattaatggtgcaaggtaggggatacgaaccacttataccatcaccattcattgaaaaggtcattctttcctcagtaaattgtaatggcactttgttgtaaaatagatgatgctgagctcagcaaggctactgcggccagactgcctcctctctgggcagggcatctctgaaaaaaaggcagcagccccagtcagggaattatagataaaaccccacctccctgggacagagcacctgggggaaggggaagttgtgggcacagcttcagcagacttaaacatccctacctggcagctctgaagacagcagcagatctaccagcacagcattcgagctctgataagggacagactgcctcctcaagtgggtccctgactcccatgaatcctgactgggagacatctcccacaagagacagctcatacaggagagctctggctggcatctggcgagtgcccctctgggacgaagcttccagaggaaggaacaggcagcaatctttgctggtctgcagcctccgctggtgatacccaggcaaagagggtctggagcagacctccagcaaactccagcagacctgcagcagaggggcctgttagaaggaaaactaacaaatagaaaggaatagtatcaacaccaacaaaaaggacgtccactcagagaccccatccgaaggtcactgacttcaaagaccaaaggtagataaatccacgcagatggggagaaatcagcccaaaaaggctgaaaattccaaaaaccagaatgcctcttctccaaaggatcacagctcctcaccagcaagggaacaaaactggatggagaatgaatgtgacgaactgacagaagcaggtttcagaaggtgggtaataacaaactcctccaagctaaaggagcatgttctaacccaatgcaaggaagctaagaaccttgaaaaagacgaattgctaactagaataaccagtttagagaagaacataaatgacctgatggagctggaaaacacagcacgagaacttcgtgaagcatacacaagtatcaatagccatattgatcaagcagaagaaaggatatcagagattgaagatcaactcaatgaaataaagcgagaaaacaagattagagaaaaaagagtgaaaagtaacgaacaaagcctgcaagaagtgtgggactatgtgaaaagaccaaatctatgtttgattggtatacctgaaagtgacggggagaatggaaccaaattggaaaatactcttcaggacattatccaggagaacttccccaacctagcaaggtcaacattcaaattcaggaaatacagagaacaccacaaagatattcctcgagaagagcaaccctgagacacataaccgtcagattcaccaaggctgaaatgaaggaaaaaatgttaaagggagccagagagaaagatcgggttacccacaaagggaagcccatcagactaacagcagatctcttggcagaaaccttacaagccagaagagagtggggcctgatattcaacattcttaaagaaaagaattttcaacccagaatttaatatccagccaaactaggcttcataagcaaaggagaaataaagtcctttacagacaaggaaatgcggagggattttgtcaccaccaggcctgccctttgagagctcctgaaggaagcactaaacatggaaaggaacaaccagtaccagccactgcaaaaacataccaaattgtaaagactgtcaatgctgtgaagaaactgcataaactaaggggcagaataacgagatagcatcataatggcaggatcaaattcacacataacagtattaaccttaaatgtaaatgggctaaatgccccaattaaaagacacagactgccaaattggataaagagtcaagacccatccgtatactgtattcaggagacccatctcacgtgaaaagacacacataggtttaaaataaagagatggaggaatatttaccaagcaaatggaaagcaaaaaaaagcagggtttataatcctagtctctgataaaacagactttaaaccaacaaagatcaaaagagacaatgaagggcattacataatggtaaagggatcaatgcaacaagaagagctaattatcctaaatatatatgcacccaatacaggagtacccagattcataaagcaagttcttagagatctacaaagaggcttagactcccacacaataatagtgggagactttaacaccccactgtcaatattagacagaaaattaacaaggatatccaggacttgaactcagctctggaccaagcggacctaatagacatctacagaactctccagcccaaatcgacagaatacacattcttctcagcaccacattgcacttattccaaaattgacagcataattggaagtaaaacactcctcagcaaatgtgaaagaacagaaattataacagactgtctctcagaccacagtgcaatcaaactagaactcaggattaggaaactcgctcagaactgcacaactacatggaaactgaacaacctgctcctgaatgactactgggtaaataacgaaatgaaggcagaaataaagatgttctttgaaaccaatgagaacaaagacataacgtaccagaatctccgggacacatttgaagcagtgtgtagagggaaatttatatcactaaatgcctacaagagaaagcaggaaagatctaaaatcgacaccctaacatcacaaaagaactagagaagcaagagcaaacaaattcaaaagctagcagaagacaagaaataactaagagcagaactgaaggagatagagacacaaaaaacacttaaaaaaaaatcaatgaatccaaggagctagttttttgaaaagataacaaaatagatcactagccagactaataaagaataaaagagagaagaatcaaatagatgcaataaaaaaagataaaggggatgtcaccactgatcccacagaaatacaaactaccatcagagaatgctataaacacctctacataaataaactagaaaatctagaagaaatggataaattcctgaacacatacaccctcccaggactaaatcattaagaagtcgaatccctgactagatcaataacaagctctgaaattgaggcagcaattaataccctaccaaccaaaaaaaagtccaggaccagatggtttcacggccaaattctaccagagctacaaagaggagctggtaccattccttctgaaactattccaaacaacagaaaaagagggaatcctccctaactcattttatgaggccagcatcatcctgataccaaaacctggcagagacacaacaaaaaaagaaaatttcaggcgaatatccctgatgaacattgatgcaaaaatcctcaataaaatactggcaaactgaatccagcagcacatcagaaagtttatccaccacgatcaagttggcttcatccctgggatgcaaggctggttcaacatatgcaaatcaataaatgtaatccatcacataaacagaaccaatgacaaaaaccacatgattatctcaatagatgcagaaaaggccttcaacaaaattcagcagcccttcatgctaaaaactctcaataaactaggcattgatggaacgtacctcaaaataagagctatttatgacaaacccacagccagtatcatactgaatgggcaaaaactggaagccttctctttgaaaaccagcacaagacaaggatgccctctctcaccactcctattcaacatagtattggaagttctggccagggcagtcaggcaagagaaagaaataaagagtgttcagttaggaaaagaagaagtcacattgtctttgtttgcagatgacatgattatatatttagaaaaccccatcgtctcagcccaaaatctcattaagctgataagcaacttcagctaagtcttaggatacaaaatcaatgtgcaaaaatcacaagcattcctatacaccaataacatacaaacagagagccaaatcatgagtgaattcccattcacaattgctacaaagagaataaaacacccaggaatacaacttaaaagggatgtgaaggacctcttcaaggagaactacaaaccactgctcaaggaaatgagagaggacacaaacaaatggaaaacattacatgctcatggataggaagaatcagtattgtcaaaatggccacactccccaaagtaatttatagattcaatgctatcccaatcaagctaccattgactttcttcacagaattggaaaaaactactttaaatttcatatggaaccaaaaaagagcccgcatagccaagacaatcttaagcaaaaagaacaaagctggaggcatcacgctacctgacttcaaactgtgctacaaggctacagtaaccaaaacagcatggtactcgtaccaaaacagatatatagaccaatggaacagagcagagccctcagaaataatgccacacatctacaaccatctgatctttgacaaacctgttaaaaacaagcaatggggaaaggattccctatttaataaatggtattgggaaaactggctagccatatgcagaaagcaggaactggattccttccttacatcttatacaaaaaaattttttttttagttatactttaagttttagggtacatgtgcacattgtgcgggttagttacatatgtatacgtgtgccatgctggtgcgctgcacccactaactcgtcatctagcattaggtatatttcccaatgctatccctccccccttcccccaccccacaacagtccccagagtgtgatattccccttcctgtgtccatgtgatctcattgttcaattcccacctatgagtgagaatatgcggtgtttggttttttgttcttgcaatagtttactgagaatgatgatttccaatttcatccatgtccctacaaaggacatgaactcatcattttttatggctgcatagtattccatggtgtatatgtgccacattttcttaatccagtctatcattgttggacatttgggttggttccaagtctttgctattgtgaataatgcggcaataaacatacgtgtgcatgtgtctttatagcagcatgatttatagtcctttgggtatatacccagtaatgggatggctgggtcaaatggtatttccagttctagatccctgaggaattgccacactgacttccacaatggttgaactagtttacagtcccaccaacagtgtaaaagtgttcctgtttctccacatcctctccagcagctgttgtttcctgacttttgaatgattgccattctaactacaccttatacaaaaattaactcaaggtggattaaagacttaagacttaaaaccataaaaaccctagaagaaaacctaggcaataccactcaggacataggcatgggcaaagacttcttgactaaaacactaaaagcaatggcaacaaaagccaaaatagacagatgggatctgattgaactaaagagcttctgcacagcaaaaaaaaaaaaaaaaacccaaaaaaacaaaaaactatcatcagagtgaacaggcaacccacagaatgggagaaagtttttataatctatccatctgacacagggctgatagccagaatctacaaagaacataaacagatttacaggaaaaaaacaattccatcaaaaagtgggcaaagtatatgaacaggcacttttcaaaagaagacatttatgcagccaacaaacatatgaagaaaagctcatcatcactggtcattagagaaatgcaaatcaaaaccacaatgagataccatctcacgccagttagaacagcagtcattaaaaagtcaggaaacaacagatggtggagaggatgtggagaaatagaaacacttttacactgttggtgggactgtaaactagttcaacccttgtggaagtcagtgtggcgattcctcaaggatctagaactaggaatacttgacccagcaatcccattactgggtatatacccaaaggattataaatcattttactataaagacacatacagatgtatgtttattgcggcactgttcacaataacaaagacttggaaccaacccaagtgcccatcaatgatagactggataaagaaaatgtggcacatatacaccatggaatactatgcagccataaaaaaggatgagttcatgtcctttgcagggacatggatgacgttggaaaccatcattctcagcaaactaacacaagaacagaaatccaaacaccgccatgttctcactcataagtgggagttgaacaatgagaacacatggacacagggaggggaacatcacacaccggggcatgtcgggtggtggtgggctaggggagggattgcattagtagaaatacctaatgtagatgatgggttgatgggtgcagcaaaccaccatggcatgtgtatacctatgtaacaaacctgcatgttctgcacatgtaccccagaactttaagtataattttaaaaaaaaacaacagatgatactgtaggtctgtttatggactctagttcattctattgattatttgtctattcttatgccagtgccatacagttttaattgttgtagctttatgttaagtcttaagatatggtagtgtaagtgctccaactctttattttactgatcaaaattttcttaactgttttaattcctttacatttcctgccaatttttagaataagcttaacaattttccccccaaaaagctgctgaaatttacattggtattgcattgaatccatggttcattatggggagaattgacatgttaacaatactgagtcttgttattcatgattgtggtttatcttcattaatttggatcttccctaatttttctcagcagtgttttgtaatttccagtggcagaggtatggcacatctttcgttagatttactcctatgtatttgatcctttctggtattactgtaaatgtcattaaaatttttatttggtgtttgttgctggtgtatagaaatagttgcttctaaatattgaccttgtatcaaagagtcttattggcaataattctaaccatttgtagacattttaataaagattttctacatatgcagtgttgccatctgtgaataaagacagttttacttttttctttttaatctttataccctttctttctttcttcctttctgcctcactgtgctggctagaactgtcagtgtaatactgattcagagtgatgatagtaggaaccttgtcttatttttggtcttaggaagaaagcaaacattattttaccactaaatgtgatgttaggtgtaagttttttgtagctattctttgtccggttaaggaaatgtttccttttatttccagtttgctgacaatttttatcactagcagatagtgaatttcattaaaggttttttttttttccacttttttcctttctgttgaattagattgatggatttaaaaaatttgaaaccatccctgcattcctggaacaaatatcatttggtcatagcttagtattcctttttatatttatctggattttacagtattttctttggattctcacatctatttttaagagcaaatattggtttgtcattctccttttttgtaatatccttgtcaggttttgtatcagatttatgctggcattattaatcaagctaggaagtattcccttttttgctcagaagagtttgtgtaagctttgatttgtttttttagtctctggaagaattctccagggaaaccatctgggcctggagtttttaaagggagttattcgcagagtttatttctttaatatatattctgcatttttcttattgattttagcaaattatgtttttcaaggagtttgtctatttcctcttaattattaaatttgttggcgtaacattattcataattttcttttaatgtctgttggatatagttacgcctcttgttcctaatattggtaatttttattctttttttttcttgatcattcttgcctaggggtttaatcaattttattagccttttcaaagaaccaacttttagttttaagtttctttttctgtatctctctctgctctttttttttttttttttgagacagagtcatgctctgttacccaggcagtggctcactgcaacctccgcctaccaagttcaagcgattctcctgcctgagcctcccgagtagctgagattacaggcatgtgccaccatgcccagctatttttttgtttgtttgtttgttttttgtatttttagtagggacggggtttcaccatgttggtcaggctggtctcaaactcctgaccttaaattatccacctgcctcggcctcccagagtgctgggattatagcatgagccactgcgtcccgcctgtttctgctttctttgcatttaatttgctgttcttgattcttaaagtgagctagtattttgctgaagatattgcctttacttactgcatcataccttgttagttaaagaaagtgattctgtacttccaaaggagtacttttctttatttctttttttttttgagatagggtcttgctctgtcacccagactgaagtgctgtggcatggtcatgccttactgcagccttaaactcctgggctcaaatgattctcccacctcaacctcccaactagctgggactacagacgtgtaccaccatgcctagtgatatatatatatatataattttttttttttaagggatcaggtcttgctatgttgcccatgctggtttgaactcctggcctcaagcagtcttcctgcctctgccttccaaagtgctaagattacatgcatgagtcgctgtgactggccccaaaattatacttttctataaactacctgtttccttaaataaaatatgattgatgtttttgaaagcagaaccatcttagcctttgtgttattgggctttgcaaatagaaatacttttatttgacaaattatgaagaatgaataaaataactaacaatagacagactagccagatattaaactctttagtctgactcccacatctttataagtaggaatgtttataattttaaaaaattgtatatgaatagtgaaattgtcatcgagtcagtttagttaaattgacaataagttaacttcagggattcagattgatatgttctcattgagatatgcagaatctttgtgtttgcctttcccttttaggaagctgcagtaaaggaagatgaagaagaagtttcagataagggcagtgattctgaagaagaagaaaccaatagagattcccaaagtgagaaagatgatggtagtgacagagactctgatagagagcaagatgaaaaacaaaacaaagatgatgaagcagtaagccttataggtttaaataatttaaataattggaattatatctctgatgatagctttgggttttgttgttgttgttcatttgtttgcttgctcgcttgctttctttaaataatatctgtatattttataattttattactttgaagaacgtttttaaggaatggtagtcaaggttatacagaaaaatgatttctaacaaggattggaaatcctcgttttcttaaatattaaattgttaggtagagtaggacctgggtttgaggttaggtcagttggtctcataaggggattttcagtgttggggatatctctgggaatatgagtaaggaaaggtgtttgtgaaatgcatagtgcttacttggaaggctgtgtcacaagctccagttcatgtttactgtagagaaacagtactgtggaccctgatgtcaagaggttggttaagggaaaagctaacatttatagaataccaccttgtttcatgggtgtatataagatatattaaggacaggggaagtctttacagaatttattaatatggtgtaaaagtatagcgtataggagaaaaatctcatggcattaagttgcacataatttatgggagaattatagagaagaatggggtccttagaggctcactgcaaataaactgctcggccatttcttttaggtttgttagcgttgttctttttgagtggccattgatctaaaagtaacactgtagtttgggagataaaaagggattgcctgaatagcctcagaggcaaaaggagaggccaaaaaaagaggaagaggtaaagggcaaaggataaaagtataaggggttaataacacacttgtccttgggaatggtagaaaacaaagatgtctattgttagcatttgcagggccttggctgtttttgtacttggagaattaaattgattgccaggaaactaaaatctgtcaaatacattatatccctggcctgactttgagaaagaattgacatattcctaagtatattagggtaagtagcagtgactcttagggttttgacagactaatttcttcatatgaccaaaaatacattcattaaatcaacaaatcattatttattacctgtcacatcccaaggctgtctaagattaaagataatacaaagccaaatgtgaaacagcttcaggtcttgaatgataatgtaggctagtggggcaggcagatttgtaaataaatactatagtacatatgaaattacacacatcttatgcaaggtacataaggagggagtgatcagttcagtcctgaggtagaaggaaatttatgggaggctttactcaggagttcatactttgggctttagttggtcctaaataataatgagtaggcagagaaagggagaaatcaaagtccaaacagggtttaggaggagtgaaatagtttggtaagttcagagaagtgtaggtagtttgaaatgactagaataaaaagcacaaggagggaggcagtgacaggagaccaaagagaggcaggctagggtcagataatgaacggctatgtagttgatactacagtggttagatttaatatatttaaaaaggcattgtaaggatgagcagggagatgatcagatttgtgagactgaacttgttctaatcctaagtagttaattagcattgtcaggaataatacctggaaatccttaaagtgataaaacacatactagattttaaatattttaatttttttgtttactaggagtggcaagaattacaacaaagcatacagcgaaaagagagagctctattggaaaccaaatcaaaaataacacatcctgtgtatagcctttactttcctgaggtgagttatatacaggctactgtgttccttattccattcactttctcctcagggatttgtcagttgacttttagccctctgtcgtgtgtattagttcatatgtgctaaatgtggtctatcctgagaggccatatttttaaaagggaatattacaataggtattatacttagtgaacgtgttgcttataaaagagattgttagcttcttaagtatttctgtggttttctttgcttctgtcttttctgtgccctgattactgagtgttatgtgtaatggtgatttctcattagcagattaggcagtcttcatcagacaaatgcatattttgcctttgaatacttaactattatgaatctctcacctctgccaagttttaaatcggatgaaaaaattcttaaattttctctctgaggatcctgctggcgacatggaaccattagaattgctctgaccctggtcattgttgtcccagtccatggaaatgtgtgagcccatggctgtgggaccaactgtgttcttggctctaataaataaagttccataagagcttgatcataactgagccccgggctcaggacaggtcattatagtgctatttgttgccttgtccttgtttactttgtaattgcagcctgctcaactttcgatctccttgatagcctgtgttgttcatctttcaaattaccttgggattcccttgacattttgcattagagtatgattctgtctggagtagaggtcaagaactggttcccccagttcgggaaactgttccacagactgcctcacagctttgccacagaaccttctgctcaccacttgtgtttggcaggtgatttcatgtataaatctgctttctgctcgaggatgtcaatctagagtttctggggactgcttaaggcaaattcgtaaataatttggctctcttagtaataaatgagtggctctgcacagactgttgttttgacttggagagaagtctgcccaggattccatcttaatgcacgtgctgatcttctggcatgtcctgagctttagtccatctgttaggggcattgtgcccattgcagaggtagcctgccaacaccaagcatcctgaaatgaagcaagtaaattccattcattgattggtataaaaagtgccatggggtgctcaaagctgcctagtgtgtacccatgtaacagacagtttcattttagaccatgcttagttaataagagaaacattcattcactccctcagaacattttattagtggccaagtgctgtggctcatgcctgtggtcctaggctacttgggaagctgaggttggaggatcacttgagcccaggagattgaggctgcattgaactgtgattgtgccactgaactccagcttggatgacacagtgagaccctgtctcaaaaaaaaaaaaaaaagataaaaatcattttatcagcaaaatgcctttttcaaatttaatctgcatctgcatggtaaacatttcagatcattatttatcagataaaatgtatttagggccgagtgcagtggctcatgcctgtaatcccagcactttgtggggacgaggtgggtggatcacctgaggtcaggagtttgagaccagcctggccaacatggcaaaaccccgtctctactaaaaatacaaaattggctgggcatggtgtcacatgcctgtaatcccaccactcaggaggctgaggcaggagaattgcttgaacccaggaggcggaggttgcggtaagctgagattgtgccattgcactccagcctgggcaacaagagtgaaactctgtctcaaaaataaaaaaattagccgggcgtggtggcgggtgcctataatcccagctacttgggaggctgaggcaggagaattgcttgaacctgggaggcggaggttgcagtgagccaagattgtgccattgcattccagccttggtgacagagtgagactgtctcaaacaaaacaaaacaaatgaacaaacaaaatttatttaggatctttctaacctctctacctgtctacatttccgtgtttcttacctaagtaacctaactaccaaactacccacttagtaatatttgacttacatgttagtgaaattcgtctattgtatttaatgcgttaagaatggttaggaatctcacaaaagaaaaacaattttgtctaaaatacaggtaactcatagaaatctgtttcacttttaacatgtgcatcactaggcacaggtgtagtgctgttgattgatattcactggcttcttaataaatattcttttttttttttgagctggaattttgctcttgttgcccaggctggactgcagtggcgcaatcttggctcactgcaacctccacctcctgggtgcaagtgattctcccacctcagcctctcgagtagctgggattgcaggcatgtgccaacacacccagctgatgttgtatttttagtagagacagggtttctccatgttggtcaggctggtcttaaactcccgacttcaagtgatccacccgccttggcctcccaaagtgctgggattacaggtgtgagccaccatggctggccctaataaatattcttgagtgaatctcattgtaattaaataggctgagaggttggagggaaaggcattctctaagtggggaggtaaagaagtgcataatctttaacataatcctgtgctgcttacattccctacttgttgtaatgatgtttctgacaaatgtcaaaatgacttaaaaaagaggtgatattgtacctcatgtcactaataatcataactgccacctattatactgcatgtgctaggctttgtaacatatatttttatttgtattctctcagatcatctttacaacatggccagaagtaggcactgattgttgagaagaaaatgagattttagggaagtgaaataacccaggtttctgtgtctttaaaacagatattgtcaaactgcagtctgcaggccagatctggctgccttcctgtttttgtaaatgaggctttattgtaaataaagttttattagaacacagccacacttatttttttcatgctgcaagggcagatttgagtggccgcaacagaggtgttattccactttgaggctgttatgtatttacacacatatgttatgtatacaaatatgcctacagtggtagtcctaaccctcggtttaagcagaatttaattttcttgttaagtgccactcatgtcaccgtgtacttgtcatttatttattagactttttaatgttgcagtgctttatctccgaaggtatttaaacagaagagtttttagttgtgcttagtagcgtttgaaagataaaccaaattttaatctatttttatagttaaaattttagcagcaattttagtttaaaaacataaatatgggccaggcgtggtgactcatgcctgtaatcctagcactttgggaggcctaaatgggaggatcgcttgagcccaggagttcaagaccagccagggcaacataaatgaaatcttgtttctacaaaaaatgcaaaaattagccagacgtggtgcatgcctgtagtctcagctacttgggaagctgaggtgggaggatcacttgagccccagaggcagaggttgcagtgaggtgagctgagatggtgccactgcactccagcctgggtgacagagtgagaccctgtctcaacaaaaaacaaaaccaaaaaaacccacgttttctcaaagaaactttcagtaagatgattttttaaccatttcggacaattgagagtttagaatagtctagtactattttggttaaataaatatttagaacatcctagagtttattttgttttaagctgtaaaacatttttctttaaactgttttagaaagatacttccctacccaactcttaaaacaggtgttaataagcaggtgactaaatagtgaactgaggtgtgctgtaatagagcagttgttgctgaatgcacggaggtttggtgctttcagacttcttggccttctaaaatatatatatacacacacacatatatgtatatgtatatatgtgtatatatatatatacacacatatatatatgttccttccactccaactttgtggcttttgcttattactaggtaagagtactaagattatttgctacatgctattgtaatagttgtatatatttagaataatgcttgttacttaaggttagtcagggtttttaatatgaaggccaatcaataggttttaaggagctattgaaatccccaaaattgcatacaaaatgcttttaggcaatggatctacaaatgttaagaacagcttattctttcagtaaatattcatttgaacacctattttgtaccaagcagtttgtcagtgcagaggatctctaagataagagaggccaaaattatattctttctagttctttctgattatttatacccctcttctttttttttttttttttttttgtttccaggaaaaacaagaatggtggtggctttacattgcagataggaaggagcagacattaatatccatgccatatcatgtgtgtacgctgaaagatacagaggaggtaactatcaagcaacatgatttcagtgtttaacaaggcacagctgtcaccatcatgctgcttcatatatcttttttttaaaaagtttatcatatttagcatattgtattctattcgttgcctgcattttgtaactgttctctattttggggtgagctcattggaaatttataaataattgttaaaggtaggcaacttagtcaatgttttaaaaatttgttctcagcttgttttgggagttttcactgttagtgtctaagaacatacacctttcctcctcctctccagaatttagtgatagaatttttgttcttattggattagtgttgagtattagatcttttgtcttgaaaaatctaagaactgatgatgtggatttcttgagtggaatttttgattacgtggtattcactgttaatgacatcagtaaagcagcattgtgatgaacatatttacccttgggaactgcatttttgttgttgtttttcatgttttttttatgtgtgtgttttttttctaggaagaaggttctgtctgcctgtacttggtggacaaaagcttttcaagatagccctatgatgttgatttttagtacatattttttaaccctttataatcaagtggtaaatgcatgaaataggttaataataaatttatagaggtcgaattgatgggctggaggctctgtatgtttgtaattttggtctatattgctagatatttatttctctatagaaagaatgaatgtctaaatatgcctaatacctctcagcatgtcagacattttgaatatcattgctagttggaaaggtgaaaaatagcatcttagatcttcatgttattttttcctctgatcttttttttgagacagggtctggctgtgtcacccaggctggagtgcagtggtacaatatcggctcactgcaacctccgcctcccgggctctcccacctcagcctcccaaatagctgggactacatacgtgcaccccgtaaaaattagccacgcccggctaatttttgtattttttgtagagacagggtttacccatgttgcctaggctggtctcaaactcctgagctcaagagatccgcctgctttggcctcccaaagtgccgggattacaggcatgagccactgtgcctggcctctctgatcttttaagttttaaaacctattgaaaagttaacaagcatggtatcatgaaacctccctagatccccacccgtattcaccagttgtttacatttagctgttacttgttttatctttcactgtatatgtatgtacaaaacatgcacgcgtgtgtattttcccctgaaccatttgaggtacttgtagacatcatgacatgacacccctaactacttgacatgtatcccttaagaaccagggccttgggctgggtgcagtggcttacacctgtaattccagcattttgggaggccaaggcgggcagatcacttgagcccaggaattcagcagcagtctgggcaacgtggtgagaccctgtctcttaaaaaaaacaaaaacaaaaacaaaatccaggaccttctccataggcctactacaatgattatactcaggaaatttaacattgatgtggcataattatctaatacgcagtctgtattcagatttcctcaacgattccactaatgtctgttacagtttttggttttatttttaaactcaggatctaatcaaggatcacacattgtagctgggtgtggtgacttgtgcctgtagtcccagcctaactcaggaggctgaggcaggaggatcacttgagcccatgaggttgaagctgcaatgagccatgatcatgcccctgtacttcagcctgggcaacagagtgacatgtctcgaaagaaagaaaaaaagagatttttacattgtatttggttgtcatgcctctttagtgttgaatactttcttgttcttgttcttttttttttttttttttttgagacagagtctcactgtgtcgcccaggctggagtgcagtggcatgatctcggctcactgcaagctccgcctcccgggttcacgccattctcctgcctcagcctcctgagtagctgggattacagacgcccgccactgcacccagctaattttttatatttttttagtagagacggggtttcactgtgttagccatgatggtctcaatctcctgaccttgtgatccgcccgccttggcctcccaaagtgctgggattacaggcgtgagccaccgtgcccggcttccttgttcttttttaatctttgcatgccgctgacatttttcaagaatccaggcaaggtgttttgtagaatatcatttaatacgaatttgtctcgttggttactcattattcatctttgtgtttttggcaagcaaactatgttggtgatgtagttcttaggtcagaagtacagtatatgactttgccctatgttggtgatattaattaaggttgctcatttagttatggtttttctctattgtaaaggtatttttctccccctctaatctgtggggtgatatttaggccctgtgtgaatgtcctattctccaacagtgttttacccaatcgttttaaacatatgttgatgattcttttctgaatcaatttttactctgctcattctattcagtgtagtttttatttctctgaagagtgaaacttaaccttcagtgtgtttgagttgtctttttaatgtgtctgtttgtgaccattgttcacttttgttgagtcttaaaaagttgttttgggatctttttttaatgttaagaaatcagccctttgtgatatgtgttgcaagtatttctccccagtttgttgtactattctggttgtttctaccagatagaaatataaatacctatttgtttatccattttcttacttattttttgtagtatgatttaaagaatttttttttaatagtttctaggtttgtgttatagttaggccaaactgagattaatttaagaaaaaaagattccttcatgattttttctagtttttttaaaactggcatattttaatatttaatcttgactgtaaaatctggattttggagattggagcagatcactagagcagatcaccagagaatacaaatgtcatttttaaaaaattgttcttttgtccaagtggaatagaaactttttaagagtttgttactatttgtatttgaagtttatgatttgatgataaataaaatatcttcttgacctttggcattgggcgtttattctagaaataagaaaatttggcaggaagtatctcctatctagtgaagtctgttgttttattccaacatttcatttacttatgcttttatacctgcttaatttcttcaagatgatagcatagaatttggttgctttaagtactgctttcttgaattgtggagagacaaattaacctcatcagttctgcataatttgatttcctctttgggaggtatttataatatgtaacatacatttcgcttttttttattattgtttataaggactttagtaacatttgttaggactttctgtatcatctgcagaaaaaacctggctgttaaatactgtggtctaggaattttagggagtgagctgtttcctccccataatacagatttttaagtgctgattttatcttctaggtagagctgaagtttcctgcaccaggcaagcctggaaattatcagtatactgtgtttctgagatcagactcctatatgggtttggatcagattaaaccattgaaggtaagaatagtgactcttcaataaataagagttttctgtataaatgtttaatatactaggaaaacatttctagttttgaaatgtagagttatggaaggaaaaagaagtcatctcatgctttatatatgatatacttgatggactactctttcaataataaacttaaggttttaggtttttaaggagtgtaacagtttagaacattgaatataaattactttagggatgcattttaatgtgctgtaactttataaggcctcagcaaatgggttcttttttctttagaaaggcactttttttttttaaaccacagattctatttggagtgtatattaatttctgaaactaatttatttttgtcatcttagagcatacacttctgtaagtatcatttgcagcacactctgatctttgtttaccaattcacttgagctttttataaaaggtgtcctattgtattagagagatggtgctaaaagtattattgcattataaagggtaaaagtagccagtaaatgcgaacctcttttttgttccatgagggttccatatttcttttattaactgtagaattttacatcacaagtctagagactgcaaaatgtctcgggtttttcttccttaaagcagaaggcttctgttaagatatgactcagtgttcttgctcaagaatcacaattattttatgccatagaaatacattcataaatagtataacatacagaatcaaaatatcaaactgtattagaaatttaactacatttacatattgttaaatttacttgttttatttctgggatgaagtgtctgttctaaatgaatgagttgaatttagaattgtgtccataaaaaactatttctttataattgctgtggtcaaagaaaaccttttgtttaccaagatttcttccattatttctccccaaatttctgatgtctacatttaattcttctttctagttggaagttcatgaggctaagcctgtgccagaaaatcacccacagtgggatacagcaatagagggggatgaagaccaggaggacagtgagggctttgaagatagctttgaggaagaagaggaggaagaagaagatgatgactaagcagtactctgaatggaccacagtgtttgcacatatttgcaattttttgctgttttggaagtgtatcataaaccagaaacagtacagaactgatgttgagggaggtgtagtttttttactctagaaatgggtgcataatataactaggcagtggcggtgccttggtacaacctgaaaaatgttaaggcttattgaaacctttcaagtaggggatggtacatttatttcatctgcaaatgataataaatcctttgttattataactgtccagaagtgtgggctatgtattatctgatcagtctatggtcccagtaaaagtaaagatgcaggaaacacagtctgtaaatgagcgacttttctttgttcagctttagttttagcaaacaccacaaatatgttttaagtaacatcgctcaagtttaagtaacatcgctcaagttgataatctcttgataagctctgttgttgacattttgcagtgatacaacagctccactcatagatttaaacttttatttttacttatcttggtcataagttggcattctctcacattccacatgatatagagggctacgttttggaattttccttttcttaattgcccagagttatcagacagattataaaaatggcttttaatggcttaaaccatttctaaacctctatcttagcagatcaatgcaggatctaattcttttgataagttctagctctaaaagtgatagtgggactgtatgttttctgatactggtggcttatgttattaaaccttttttaaaaaaggttcactctaaaagctgaactacatccttagttttcagtctacttgactctatcaggagctttttaaggaaagtaagtataacatgcaaaggaagctttttttgtattcattttggactcctgtcaataaaaatagaagtttgttgactcgttttatgtttcaatggtgtgtgtctttttactatcaggacataaatagggcaatccacttctttatttttcaactaaagattgaatagtattgtacattactgctaaagtgactgctatttctgtatactgtagaaaaacccaggagtgagagggatttcccctcatagtacaactggaaggatagtgcttgtaaagagtagagatgtgtacatgatgaatcattgagggagggtggatatttttattcctagatatggaggaaacataagtctgtagtattataaaactgattgtaataattctttcctatcaaaatctccataggtcaaaatattgttggaatactaaaatttgcaaccttgtttactttaaaaggttgccactttcagtgcagaatactaccggcatcttgttactgcaatagttggaaataaaatgtgaaaattagcaaaaccatgcatggtttttttggttctaaatttaagatgtaatatttcctataaaagggtgaaagcagtttctttctctataacctcaatcaccagtttagtgagagcctttcttggcaggcaggaggcagtgtcaccgaggatttttttcatttacttcattgtacaagtaggagggtgggtttaattttcaaatcaggttctgctgtgaagcaccagtgtcttgaggcagctactgattacctaagtgtggtggcagggggtaagccagctggtgtcaagtgaaaggagggattagagaaaacaggtgtggcacaaaggcaaggaaactgagcagacaagacagaacaatgtgtagaatgcatatttcctagttttcttgaaagatttcaagaaaagttgttttttttttctagtggctactttgccttaaagaggctttataagttcattcacacagctggcttctctggttttaagattctggagaggatgataacctagtaacaccgcagtgcttaaaaaaaaaaaaaaaactaccatcaccagaaaattccaccagtttgttttccttttctctttgtgtgatgtgtatgtacttcccaactaagtaaaataaaatttcctctagtgagtgctttaggtaacctctttccatatggcagtagtgaaagaactgagccttcagttgatagttcttctctctccagcaagtcgctaaactccacatcccttcgtttttcctctggaatgagaataacaaactatcctagtttgcatttaatctaatggaaacttgagcaaagtttcaattttcttcctataaagaaactgacattttgtcaacaattgatgagcctatagatcatacagtgtataggaagtgaaattgaaacagttaaattatgtgatatttttctctaattggtaaagtacctattaaaatacagctgttcatgaggagacttaccacaattcaaagtgtagcagttgtgtattttagcattataatatttgattgaggccctgaggtgttaatatctcaatctcagagttagatgttcatgtcctttttgaattttttaaacatttttcataattttttttttaagttagggagcacattgagtgaagttctctgtgtagaacaataccttctgctctgcttctcccagctttcactgagggctggaaaaggacaggcctgtccagctgtactgtcccactgtgtatggggaagctcaggctctggtggaagcagggggcgtggatgtcaaacaactgatgtggaaacagggagggagagatataatgaggctctctaggcatgttatttttgaccacaagttttgttcagtttgcttcagccaatccaaaccatatactagagtgttctgtagtcacaattcttatttcaaatgtaattcagcaccttacataatttttgagaggttgtcattcatcacatatttactgagtttctatgtgccaggctctgtgactggatactggagctatcaaaatgaaaaaaatagtgttaagaactcactcgctggtgttagagcaggtagatgagtggcaatccatttaaatccatttgccttggctattatttggaatgcctttttttttttttagtctatctactgtaggcagaagaattatttctttaggggctagctgtttattttgctggcctttttttctctctttctctttttcttcttaagacggagtctcgctctgtcctccaggctggaggagtgcagtggcacgatctcagctcactgcaacctccgcctcccagcttcaagcgattcttctgcctcagcctcctgagtagctgggactgcaggtgcatgccaccacacccagctaattttttaatttttagtagagatgggattttgccacgttgtccagcctggtctcgaactcctggcctcaagtgatcagccctcctcagcctcccaaagtgctggcattacaggcatgagtcactgcgcccagcctgttgggtttttttggaaaaaaaccaaaaacaacaaatcatcatcctttcctttaaaatgttttttttttttaagaaacaattttcccacaaacggtctgatttaactccatgaaatcctctatttagactgccttaaagtgaaataactgttggtgaaccataacgacattttaccagctgtgtagtgattagtccaaatatgtctcaagaagttagcaccaagcattctcatccatttaaacttgatgctagggctattttgcaaaacttaaaaagatgcgatcttgtacatatttctgtaacctgagctgaaaacccaaataacaatcattgacatactttagggctattgtttcaggtgggggtgtatacatcccaggggcgtggagatgatcaatccattgaggaagtattaagatgattatttgtatttaatctcatccttttaaatttctatttttgtgtgttttataatgtacataatatattgtacaattgtacacttctattatttataaataaacatttattggtgcattaattttttttttttctgatttgggtccatgatcaaaacatttgggcaccactgctttgtggtattgatagggtgacatttgacactcaccacctgagatcacagagtgatatactctggagttggtgggttggcattcactgtgtgcagccctactgtagctgccaagagcaaagtgagacttttatgagatagagctgagtaggtctggaggtgggattgataggcaaggggagggttctgcacaacggttgtctgtggagtgcaggtggtgcaggtatggagcagcagtgctggggacgacttgctgggactttgagcaaatcacagcctgttgctggtcctggcaatcagtgactgctgcaaatggaaggtgagtgtgggaaggactggccactctgttcagcacgaggttgtttagcgttaacctatcagcctgggtacacaaagggagctgtagccctcataccttacccgaaacacctgaggtttacactttaacatctggataatagcagcaatggacttcagtgtgaacagattccattgagttaacttcaagctatttctctgtattttccagcctcgttccagtagagggcgatagggctgtaattttctttaacaaagaatggtgtgtttcgtttcagactaaaagccacgattaaagaaatgctttgtaatttatttgtatctgcaccttctgggatttcctccctctcttttgatcttttatgtttccccctaacctttttcttctttacatgtgtcctttgttatttatttattatttttttagaggcagggtcatgctctgtcgctcaggctggagtacagtggtgcaatcatagctcactgcagcctcaactcctgggatcaagtgattctcctatgtcagccccctccgaagtagctgggaccacgggcactaacctggctcattgtatttatttatttagagacaggggtcttgctatgttgcccaggctggcctcgaactcctaacttcaacccttggccacccaaagtattggcactataggcatgaaccaccgcacctggctgtgtgtcctttaacccattaaatttactgtctagaaacattaagtccctttgcaaccaactccaaaagacaatccatatgtattcattgtgctggaattccaaattgcatttgtttgcttgagagaggtggacaatcaaataggacatggtaattccttaactctacaaaatctaacctgtttgcctgataggtgtcaactattaagagtccagagtttttacatgcaagctaacaagttaacctgccagtgtcatggatgccgacaaaacacagaagactccaaagacacaggcacagcaggtggcatgagcttcatgttccccatctgttcctgttgtcttccaagttcccacggaggcgatgtggagtggccaggcagatgctgttcatatcacagctgaggaactccaagcttgggagacctaaccctgtcaagcctgcaagcaaccctgtcttgatcttatcctggacagcaaacaaactcaccctctttctgggagggagacactgccttccaaggctgtttgccatacagacacccttgaaaagatagtctagaacaaaagcctgtgtgcctttgatcacaggtgtgcagagacatgagagactcatggaaaactgtctctcaacagctggaattcaatacatataggacctgtatttacaaagagatattatagaacactgattttcaaagggaatgaggtctattttgtgaaaactaggaccacttaggcagtttccttgagaataatatacatttaaactccttggaaatgttttattgtcaaagatagttttatgttgcaactgaagataatttacttacccgtgcaccaactaaaaaatatccagaattttctaagttgaatccagtccattgtgacagtgcaaaacagggtatctacaagaaggaacactatacctattctacatggtaaccataagagattttgattatcgctttctgcactccttccccaaaccttccacccctccccacaaaatacaaaacccatacccttcctttctggacaaactgaacattttcctccaaggaagtctggttccttgtagaatagttgccatttctttagtgttctttttccaatatgctgcccaaacttagggaggccttagacctttggttgaaataactgaggaatctttgaaatactattttgaacagtcttcctggtaggtagttgtcctttggggggagatgtgttttaaactacaaaagttcatttagaaatgatacacagtaggggggatccaattcattgatgggtattttgattaaaaaagtaaggcacgtgacaaaaattcaatgagagacttaaaaaatccttatcttccaaccaggtctgacgattcccaagcagacatcgtcattcagtagtgttcgtgggatcgtggtaaactccctcattcatatgcattagcctgcttctgtatctttgtccaattagtctgtgtgctttataatcacatccaacgtttctgcagcttttttatttcccaattctctgccaggttcttgggactccagtcattggctaggctctatgtcactttccaagttcctcccaaagcttactgttcctcttcttgacctgacagcatctattaaacagggagagagccaggagaggtggctcaagttgaaagatggcaaggcaccccctttcaagtatcttagagtcactgctcttcctgcagccagctcctggttcagaactcagtagtcactctttttcccacgatcccaataaaatcttgccccacctacccatccctactcacaaaacactgatctgggtctattatcatggaaattataaagattaatgtgattagcagcaaagtgcttttgagaatgggggatgaaactgtagtgttatgatcctcagcattatttctttatacactgaaaacccccacatctttcaagtctgctgacttaatgacagggtatcgcactaaatgtcaggagtgacacttcaggaacagcacactgtagacacagtttatgttcgataatactaaaactgggttttgagtagaattttgaatgtttcagtgtgttaaaaggagttctttttagagtgagaaatcttaaaaaaaaaaaaaaaaacaagcctttctctatgtcactcagtatgatttctaaagttttccttgcatttgcatctgattgaaccaagtccctcctccctaatcccctccacagcctaatagaagcagagctggaacgtagggatagaaacaaaacccctgactttagtcttgagtatgctacccatggaggtcgactacatggggtagactactgcctccatgggcaacattatcatgggaaaggaatgaaagcatgtatgtaagtgctgcatacttgtatttatggggcacccatgctacagctctgatttggagcaaattgcattccctgttgtgcccacagagggtcagacattgatacgaaggggggatagagaaacaaagaaccagagacgaggagtgacttggcactgctggtgaactggagctgggaccctgggatcttggatcttcccctgcagcgtgctgcaccctgttccacaaccctcattctccatctttccattttggaaggtcaggaaggaaaccaacacacacacacacacacacacacacacacacacacacacacacacacacacacgcagcccttattaaagtggaagctggccagatcaggtctagtgtgaccacctgctctatcatagcccaccacagccactaatgttcttggagaatgggcccatggttatacttgagtcagatccctccctctatctcagaacccccatgctgtgttgaaatgagatcccattgtgccaagatatgtgggcttccaggttaggtgacttcatcttagccaaaagggtgaagggggaccaggcatggtggcatgcacctatagttccagcactttgggaggctgaggtgggaggatcacttgagcccaggaggtcgaggctcccatgagctgtgtttgcaccactgcactgcagcctggacaacagagctagactctgtctttaacacacacacacacacacacacgcgcgcgcgcgcgcgcaaagggacctttaagatccatcccaatctaaagtggtgcagcttatgcttgctgaagaaaagtgattcaaagtgttacagttctaggtaactgccttgacagaagcaatacattcttccccagccttgaatgtgattacctagaggtagagcagggcttgatcccctgggtgtccaatctttgaccttacgaggccaagatggtggcatagactgcccagtctgtcttccttgcatctattcaccctcttttttctactgagtggggattctaaaggatctatttgaggttctaattctaaaccttagcaggcttctcactgggccaaatatgtgtttcttggagaatttctttgattgtatttaaatattactttttacgtcaggactgagggcggaagctgagggaaaatgaagacatccgttctgtgaagaatggatttctagaaatgactattaggtttaacttcgagcactctaaaatttcttcttgcaaatcttttctgctgccttccagttactaaaatgcatcccagcaatatagcaacacacaataaaatgaaaacactttggaattttccaggacagtgcttacagcctgcctgaattttttgcatttgcttctgtttcccaccagtgtgggaactctgaaagttgctgaagtctaactcgctggatggcatatatttattgaattgaaatttgagcaggcattctgagctagcagaatgaatatttgaaggttagattcctcctattgctgccaataagcctttcccattcagtctaaatagtctactatttattcacatgtgcacccatggtggaagagttgatggacaaggacttcattacagttacttcttggatgtcacctctggagacagaaatttgctgggaagtgctcttatcctaagaacaggcaaagtttctgcttcaaagagcaactggatcattgcccagtgtctggggtataacctgtggctttctgcctgggcaaggcaacctagcctagtgacccagttggcatcatgataatttctccagcctactgtgtgcaagtcatccaacacctctgaagctgaaatccctgacccctgagagccagcatatctctgctgctgagcaattaaggaggatacagagctggggcagggtgggggaggagcctgtggtacaggtgaacacttgtgctcaaattagcatataaaccacagcaaaattcagggatattggtgaaagaactgatggtctttctctgatttctctaaacctagaggaccatttacagacagcatttttgctgtgagaccacagacccactccagcatgactagattcctgctgattgcagaaaaatcaacctgaagttaatattcttaggcctttttatttggcccatctaagtgggattaaaagagaatgagaattaataaaaccaatatataaaaaatacaaagtgaacataatggtcaatggtgaaagactgagagctttttctctaaggtcaggaacaaggcaaggatgcccactttcaccatttctattcaacatagtactggaaattctagccagagcaattaggtgagaaaaagaaagaaatggcatccaagttggaaagagagaagtaaattatctctgttcacagatgttatcaccttatgtgcagaaaaacctaatgattccacacacaaaaagaaaaaactgttagacccaatacatgattcagcaaagtagcaggatacaaagtcaacacataaaaattcagttgcatttctatacattaacaatgaaaatctgaaaaggaaattacaaaaattattgatatggtttggctgtatccccacccaaatctcatcttgaattgtagctcccataattcccacgtgttgtaggaaggacccagtggaagataattgaatcatgggggcagtttcccctatcctgttcttgtgatagtgagtaagtctcatgagatctgatggttttataagagatttcctctttctcttggctctcattctctcttgcctgctgccatgtaagatgtgcctttcaccttccaccatgattgtgaggcctccccagccacgtggaactgtgagtccattaaacctctttttcttcaaaattaaacctctttttctgtaaaaattacccagtctcaggtatgtctttactagcagcatggaaatggactaacgtgattatatttacagtaacatcaaaaagaatggtgggtggatcacttgaggtcaggagcttgagaccagcctggccaatatggtgaaaccccatctctattaaaaatacaaaaattagccggatgtggtcgtgggcacctgtaatgccagctacttgggggactgaggcaggagaattgcttgaacgcaggagatggaggttgcagtgagccaagattgtgccactgcactccagcctgggcaatagagcaagaccctatctaaaaaaaaaaataataataataaaaaaagaataaaatacttaggaatcaatcaaagaggtgaaatacttatacaatgaaatctacaaaacattgctgaaaaaaattgggttgaaagacaaaattattaagatgtcaatactatcaaaagtaatctacatattcaatgcaatccctatcaaaatctagtaacctttttgtaggagtagaaaaaatcatcttaaaattcatatggaatttcaaggaaccctgaacagccaaaacaatcttgaaaatgaagaacaaagctgggggattcacgttcctgatttcaaaacgaaatacaaagctacataataaaaac

SEQ ID NO: 707 - DNA, 3456 bp, Homo sapiens
cagggggagggaaaactgagcggggcgggaactatctcctctcgcgagagctggcgacggcggcggcagcggcagaggtggcggcggcgtgtccgtgagagtggcgtgggggcggggaggagaggcggcggcggcagtgtccaagctacgccactcgggccggggcgttgggagcgggagtgcagagcgtggtcgtggcggcggcggtgagaagagcgaggcggaggagggggtgccatggccgggcagcagttccagtacgatgacagtgggaacaccttcttctacttcctcacctccttcgtggggctcatcgtgatcccggcgacatactacctctggccccgagatcagaatgccgagcaaattcgattaaagaatatcagaaaagtatatggaaggtgtatgtggtatcgtttacggttattaaaaccccagccaaatattattcctacagtaaagaaaatagttctgcttgcaggatgggcattgttcttattccttgcatataaagtttccaaaacagaccgagaataccaagaatacaatccttatgaagtattaaatttggatcctggagccacagtagcagaaattaaaaaacaatatcgtttgctgtcacttaaatatcatccagataaaggaggtgatgaggttatgttcatgaggatagcaaaagcttatgctgctttaacggatgaagagtcccggaaaaattgggaagaatttggaaatccagatgggcctcaagccacaagctttggaattgccctgccagcttggatagttgaccagaaaaactcaattctggttttacttgtatatggattggcatttatggttatccttccagttgttgtgggctcttggtggtatcgctcaatacgctatagtggagaccagattctaatacgcacaacacagatttatacatactttgtttataaaacccgaaatatggatatgaaacgtcttatcatggttttggctggagcttctgaatttgatcctcagtataataaagatgccacaagcagaccaacggataatattctaataccacagctaatcagagaaattggcagcattaatttaaagaagaatgagcctccacttacctgcccatatagcctgaaggccagagttcttttactgtctcatcttgctagaatgaaaattcctgagacccttgaagaagatcagcaattcatgctaaaaaagtgtcctgccctacttcaagaaatggttaatgtaatctgccaactaatagtaatggcccggaaccgtgaagaaagggagtttcgtgctccaactttggcatccctagaaaactgcatgaagctttctcagatggccgttcagggacttcagcaatttaagtctccccttctgcagctccctcatattgaagaggacaatcttagacgggtttctaatcataagaagtataaaattaaaactatccaggatttggtgagtttaaaagaatcagatcgtcacactctactgcacttccttgaagatgaaaaatatgaagaggttatggctgtccttgggagttttccatatgtgaccatggatataaaatcacaggtgttagatgatgaagatagcaacaacatcacagtaggatccttagttacagtgttggttaagttgacaaggcaaacaatggctgaagtatttgaaaaggagcagtccatctgtgctgcagaggaacagccagcagaagatgggcagggtgaaactaacaagaacaggacaaaaggaggatggcaacagaagagtaaaggacccaagaaaactgctaaatcaaaaaaaaagaaacctttaaaaaaaaaacctacacctgtgctattaccacagtcaaagcaacagaaacaaaagcaggcaaatggagtcgttgggaatgaagctgcagtaaaggaagatgaagaagaagtttcagataagggcagtgattctgaagaagaagaaaccaatagagattcccaaagtgagaaagatgatggtagtgacagagactctgatagagagcaagatgaaaaacaaaacaaagatgatgaagcagagtggcaagaattacaacaaagcatacagcgaaaagagagagctctattggaaaccaaatcaaaaataacacatcctgtgtatagcctttactttcctgaggaaaaacaagaatggtggtggctttacattgcagataggaaggagcagacattaatatccatgccatatcatgtgtgtacgctgaaagatacagaggaggtagagctgaagtttcctgcaccaggcaagcctggaaattatcagtatactgtgtttctgagatcagactcctatatgggtttggatcagattaaaccattgaagttggaagttcatgaggctaagcctgtgccagaaaatcacccacagtgggatacagcaatagagggggatgaagaccaggaggacagtgagggctttgaagatagctttgaggaagaagaggaggaagaagaagatgatgactaagcagtactctgaatggaccacagtgtttgcacatatttgcaattttttgctgttttggaagtgtatcataaaccagaaacagtacagaactgatgttgagggaggtgtagtttttttactctagaaatgggtgcataatataactaggcagtggcggtgccttggtacaacctgaaaaatgttaaggcttattgaaacctttcaagtaggggatggtacatttatttcatctgcaaatgataataaatcctttgttattataactgtccagaagtgtgggctatgtattatctgatcagtctatggtcccagtaaaagtaaagatgcaggaaacacagtctgtaaatgagcgacttttctttgttcagctttagttttagcaaacaccacaaatatgttttaagtaacatcgctcaagtttaagtaacatcgctcaagttgataatctcttgataagctctgttgttgacattttgcagtgatacaacagctccactcatagatttaaacttttatttttacttatcttggtcataagttggcattctctcacattccacatgatatagagggctacgttttggaattttccttttcttaattgcccagagttatcagacagattataaaaatggcttttaatggcttaaaccatttctaaacctctatcttagcagatcaatgcaggatctaattcttttgataagttctagctctaaaagtgatagtgggactgtatgttttctgatactggtggcttatgttattaaaccttttttaaaaaaggttcactctaaaagctgaactacatccttagttttcagtctacttgactctatcaggagctttttaaggaaagtaagtataacatgcaaaggaagctttttttgtattcattttggactcctgtcaataaaaatagaagtttgttgactc

SEQ ID NO: 708 - protein, 760 aa, Homo sapiens
MAGQQFQYDDSGNTFFYFLTSFVGLIVIPATYYLWPRDQNAEQIRLKNIRKVYGRCMWYRLRLLKPQPNIIPTVKKIVLLAGWALFLFLAYKVSKTDREYQEYNPYEVLNLDPGATVAEIKKQYRLLSLKYHPDKGGDEVMFMRIAKAYAALTDEESRKNWEEFGNPDGPQATSFGIALPAWIVDQKNSILVLLVYGLAFMVILPVVVGSWWYRSIRYSGDQILIRTTQIYTYFVYKTRNMDMKRLIMVLAGASEFDPQYNKDATSRPTDNILIPQLIREIGSINLKKNEPPLTCPYSLKARVLLLSHLARMKIPETLEEDQQFMLKKCPALLQEMVNVICQLIVMARNREEREFRAPTLASLENCMKLSQMAVQGLQQFKSPLLQLPHIEEDNLRRVSNHKKYKIKTIQDLVSLKESDRHTLLHFLEDEKYEEVMAVLGSFPYVTMDIKSQVLDDEDSNNITVGSLVTVLVKLTRQTMAEVFEKEQSICAAEEQPAEDGQGETNKNRTKGGWQQKSKGPKKTAKSKKKKPLKKKPTPVLLPQSKQQKQKQANGVVGNEAAVKEDEEEVSDKGSDSEEEETNRDSQSEKDDGSDRDSDREQDEKQNKDDEAEWQELQQSIQRKERALLETKSKITHPVYSLYFPEEKQEWWWLYIADRKEQTLISMPYHVCTLKDTEEVELKFPAPGKPGNYQYTVFLRSDSYMGLDQIKPLKLEVHEAKPVPENHPQWDTAIEGDEDQEDSEGFEDSFEEEEEEEEDDD

SEQ ID NO: 709 - DNA, 31312 bp, Mus musculus
gcccatgtcctcctgactcatcccatgtcaccatgactctgcaggaccccacctgtcctgggtatgccctctaggctgtctgaaggagctttgcttagtaagcaaaacggcaaggctaggaggaagtgggtgtggttaccagtcctctctctggaagctctgacgtagccttccagggacaaggccatggtggccctgtgggcacaaagccttgtccagctggaatgttcctgagaaaggaatccgctggactgtgagtgctccctagttctcaggcctcactccaaatggtccatccccaagatcagccagatcaggcctcagacaatcccatcttccctaaactgctccatcagcctctagaacattcttccacttgaccagctttctatgcctgcccctaagtgagccatctccgtccatagatactgcccagctcatgcttggcatccctgacagtatcattaccagtgcccttcttcctgcagcagctgtgagaaacattctagaactttcaaactcatcttagtcactgttctgttgctgcaatggaacaccatgaccaatgtggattagagtctaaagggtgagtccatgaccatcatggcagggaacatggcagcaggcaggcagacaggcaggcatggtgctggagcaggagacgaggctgacagctgattctcttactgtcaaaataagagtcaggttgggggagactgagcctggcctgggctttgaaatccccaaacccactgtaatagtaattcttgtggggaggttgtacaccctcccttgtccgcagataactgctagctgattttacacccactctagtccattttagcctcaataaagacacagagacctgatatgttattaagctgggtagggtgtgagctattctaacactctaaatctgcctgtttcccggccacatgattctttaccttccacccgagtcttaccttgcttgctctggtccatgtgtgacttcatggagacttccttggcaacctgctcatggcaattcctcatggtctctccacaccttcctgtcctctctctctctctccccttctccccctcttgcttctctactccccccccccaccatttccctctccctctcttccttctcttccctcccccatctccccctctcccctctctggaattccctgacaggtcagaagtcaggccctactcccttctgcccagctaattaactgattcagctctttattaaccaatcaaaaggtggtggagaagaatgtttacaaaacactgagacagacaatgtttcataaaaataacaataccaaatccagcctgtaactcaactctcctggtccaaaaatcagcatttgaataatacaaagacaacctttatacaaagcacaaaaccatcctccaacagcacaccacaatgattcaccacctcctccagcatggccacacctcctaatcccaaacagttccaccaactggagagcaagcattcaagtatatgagcctgtggggaccattctcattcaaaccgctcagtctccaaactcacctgtggcttcctgaatagagaaccatcaaccttgctttaggcagcaccccctcccccagtactgtctgtcatatgggcttcaactccatctccttcattgttatttgagaactcaaagcagcttcctgcctcaggacctttgcacacactatgtcctctacctgggatgtgcttggttcctgtgtacttttcctctctctcagtttagtggcactcctgtgtccaggcccgtcacaggcacagaagctccccaccggagttgttgtgtgttggtagtagtggttagtagttgttctcctcctcctccttctcctcctccctctcctcctcctcctcctcctccttcttcttcttttgtttcgtttttcaaggtttctccgtatagccctggctgttctggaactcactctgtagaccaggctgacctcgaactcagaaatccacctgcctctgcctcccaagtgctgggattaaaggcgtgagccaccactgcccggcccaagttcttcttaacagcacattcacttcgtgtttgaattccttctctaacatgtaccagaaaacttctaattttaatcttaaaaaaaaaacagtgagtactctttttttaaagatgtatgtatgtatgtatgtatgtatgtgtgtgtatgtgtgtgtgctttatctgcatgtacacctgcacacaagaaaagggcatcagatcccattatagatggctgtgagccacgatgtggttgctgggaattgaacttaggacctccagaagagcagacagtgctcttcactgctgagccatttctccagccccctaattttaattttttaagtttacatgtgtgtgcatgagtgtgcatgtgtgtagatgtgtgcaggagaccacaggttgacatcaatcactttcaaccttgtttttgttgtttcattttcccctttatttctagtttatgtgtgttgatgttgaactgcgcatatttctgtgcagtgtatgcatgcagtgcccatagtagccagaagaaggtgttggatcctcctgggactggagttacaatggatggaagctgccaagagggtgctgggaaccaaactcagggtctctcagagagcagtgagtgctcctagccactgagctgcctctccagctctgaactcctcattcttggggtcttcaggatatgacagggaggctgagccctaataccttccaccagggctctcccctctctgtttgagacctggatgttcccagtggtccttctgctgttgggcatgcccacagctctctcccagccgtttctccagatgtaagaggctgaggcagaatctctaccctctggcaggtttctggactcgttcttagtttttagtgtttggatggcaatttactcttaatactttttctgtttagtccttaggatggaacttaggcaagcatattctcactaagtgcccgcctctgagccaggcctcaaagtcaacatgtattcatgaattcattgagacagggtctcactatgtagcgctggatggcctgtaactccctatcccttaaagtagcacagatatgctctcctctgtgttccaaatgctgggattaaaggtcccagtatttaactttatttataggcaaggtttaatgtactccaggctgatctgaaacttagtaagtacccaagactggccctttaactcctgatcctcctgcccaggtctccttggtgctaggatgtgtccactgcacccagaaccctatttctaaaacaccctgctaagttatttgcctttcaccaaacccaaagctccatgcggagccccctctcaggaagctctcaggctgggagagcaaaccgtccacatcctaaccagaccacagaaggagcttcagatccagagccctggtggtacatgtgtgtctccttgtgcaaatagtaggtacctaatgtgggactcattttccctcccctcagtgacccccttgctgcagcacagggactggctcccttctactccggaaacaggtgtctttcctgctactgtggctgggactcagtgataagacccaagggccccttggatataggaaggcagagtgcaggaagagggctccagggatgggcttcctgtcagggtaggagggaagtaagacccagagctcatccctgaagaacaaagctcatgtcctctgctacaggccctgggttgctcattcccacctatggaaatggaaaaataacagaagctgggcgtggtgggccctgtcgctcactccacagggatggtggcggcaggaggaccagttgacctatgaagtttatggccagcctgggctacatgagactctgtctcaaaatagctactatctggggtagtggtggcctatgcctttattcccagtactcaggaggcagaagcaggaggatctttgtgaggtaaaggccagtctgggctgcatgaggccctgtctcctcaaggcctatgatgcctgttcctcaggaaatgtgtcaaggattctgatctgagcatggaagggaagatgggagacctcttctgctcaatctccttcaatggctcatccaggaccgcttgatccacatggccccagttactcactctatgctaaagcactttctacctcaggacacacatacacacgcacgcacgcacatgcacacacacaagcacacacacacatgcatgcacacactcatgcacacacacacatgcatgcacacactcatgcacacacacaagcacacacatacatacgcatacacgtgcacatgcactcacacgcacacacacaagcacacacacacatgcatgcacacactcatgcgcacacacacaagcacacacatacatacgcacacacgtgcacatgcactcacacgcacacacacaagcacacacacacacatacgcatgcatacacacaagcacacacacacatgcacacacacacaagcacacacacatgcacacacaagcacacacacacacagggccacatgcactttcctccccaccttccttcttcctttcctgcctcccccttttccttctctctcccctttctgcccttgcttgggggcatacctgtcatcccaacactttggaggttgggacaggagcatcctaagtcccagacagactgaggctgttccacaataccagccatggggaggccaggtgtccagcaggtgaaggagcttgcctggattccacgacctgactctgagtccgcagcctgtgtgctggaaggacagaagggactcttgttcctgttgctctctgccctccacagaccctacgcagcatgtcagcagtgcacaccccaccctcaaattaaataaatacatattttaaaatctttttaaaagcaaacagcaagaaccgaaccacaaaaacaaaggccaggagaggtcatggaagggacttggggaaggggggggggcatttcgtggaaggcggggcttaggggttcttcttgtcttgcttggaccacaggcaaatagtttggtcacctctctgaggccccgggaagccttagttaggtctggagccggagaactggaacatgggtctctttggaggggctagtctggggaaactcctgcaggctgtgggtcacccgccctgcttggaggcagtaggagctggggctagtccccctctgtccctctgcagactggcaggaggctgccaggctgagtcaccaggctgccggggaaacattcggcgcccagaggccccgcgtgggctgtcatgcagcgggaacgcggcccccggagcccctccaaacctccttccccactcgctgttcccacagctgctccgcagaaggatcgtgggaggtggggagcaggcaagagcccaggcaagaccagcagcacggacttccagcaaggtgcagcctctgtgtatcggggagactctgcccagaatggggaaactgaggctctgagaaaggtaggggctgcccaagtccgcattctctgcatgcagagttgaaaccctgcctcacttgtacttctggtcacgtctccctctgtctctgactccaaagtttcccatggctccctagtaccctcagaacaaacccacacacctcccgtggccctgcaaggccctgctcagctctgcagcttttcctcagggttcttcctcaactcctggttactggcttactggcctctggccatttcagcttccacgttgtccctacctcgagaactttgtacgtgctgtatcctctgctcctatctatctctcaatgcagtgacaactttaagactcatggatggtcacacagatagccccctgggagtcaggattcaaacccaggcccagctgacactctcccctttccagagcgccctgcaaggtcacgttgtggtttgtgtttgattattgtttgtttgtttgtttgtttgtttgtttagtggcagggactctctatgtagctcaggctggctttgagctcacagcaatgcccttgcctcagcctcctgagtgctaggataaggagcatgagcaaagctaccttagaaactctttcaggcccactgctcagtgaagctggctgcccctcagcttccgaggttccactgcctgggtgccaaagacccttgggctgccttctctcatcccggctcagatagattcccagagtccctcccagagtggctgccatttctccggcccactttctgcccttcacaggcacggatatcagagcctacaaggacatattagccaaaaataatcctgcgacctactcctgaaaatgggccggccccaccggccacctggctctcaggaggccatcagcacatgtggtaaatgaggataattagatctgtgggaacaagttcggtccagcaccgcctcttcttgctcctgcatgtggtccctctgctccctctggctcttttcttgtgtgagcaggctgggctccacagcttcctgcatcctgtcactgaaccagactgcctgagagagaagtcccaagtttgtgaaatcactaacacactccaccttccccacagctgccacgggcctgccctatgctaccggagcacactcagactgggcagtcaagagttgcacagagacacctcctggggtcagacttgacacagaaaagaaagaaagaactccttggaaatgaaggtgttggaagcaggcttctgagagatgactaggagttttcaaggaggaaagggtctgaaatctggcctttcagaccagagaagagaaagcttgtgagttccacacaaggttgtacccatttaaaaattaaattaaactaattacattttgagacagggtcttactatgtatctcttctgactgtgatggaacttactctatagactggactagcctcaaactcacagagctcccactgcctgtcttccaagtgctgggattaaaggcatgtgccaccaccacctagctaagaaattatttttatttaaaaatttaattgtgaccaggtggtggcacaccagcacttgggaggcagaggcagtaggatctctgagtttgaggccagcctggtctacagagtgagtccaatgttaggagacctgttttctaaggaagagatttgtgccaggttggcttgctgtaggtgctgggacaaagcttcataagaggggaacagtggggctgtcaagatggctcagagggtaagagcactgactgctcttctgaagatcctgagttcaaatcccagcaaccacatggtggctcacaaccacctgtaatgaaacctgacaccctcttctggtgtgtctgaagatagctacagtgtacttacatataacaataaataaatcttaaaaaaaaaaaaaaagaggggaacaatgtcgaagcaacacactaaatggacaatggagagagaccctgactagaagccattgctcacgcccagcctcttcagtgctcagggagctgtcctggctcctgttggttcctcctgtggacaggaggctcattccttcactgttcctcagctctcagggtcaggagccacatcagtcaaatagggacacccaagatccttggaagacagtcactggggtccttgcagccattaacctgtcactcaggagacagaagggctgtgggtgctgcctgggtcctccagcccctcaccttgcctcagtccattgtgaaagataaacctccacatagaggaaaccccacctaccgttggcttgctccagtctagcccaggttcagtgaggaactctttttttgtcttttgtttgttttttgagacaggatctcttttcaggcctggaacttgcaggctggcctttaaacccacagagatccacttgccactgccttctgagtgctcagctccgctgtttgtatttgatgtagtatctcatggatcccaggctggcccagacctcactctgtagcagaggatgaccttgaactctctacctcccaggtcctgggaagatgggcacctgccaagccttgtttcagaactttcagctctcacattccttcctgtgcccacacatagcacaaagcctgcttaggcccttagccacccccactcccacccccactgcccaataaccacatgtcttagctctgcagccagctcagagcctgacagaccaggaccggcttccagcctgctgccctgagctcagatacttaaaaaaaaaatgttgctaataaggagaaagtcagtctgaacacagcagacggtattgtctttgttcccagtgttcacatgctctgtggctccgagcctaagagcaaagacagatagtttccctgtgcacatgcctctcaaagttaggcgcagttggagaggaccttgttttccccagctgcaaataaatatcaaggaggctggtagctcaggggctcctacctgcctgtgactcagaaatgaatggaaatacctctacatataatatatatatcagagcatccatgagcagaaggccaggagccccaggaagtctagtttgggctgtcagaggcagggaacagaaccacacagcctggaaggtcaaggagtgacaaacatccttggagaggagcacattcctgggagggcgagggagagaaactcgcctggcctgagaatatcttcactgaaagttagccacctgctcagatcccagcagacaccagagggcttgagaagagaaaaaaatatatatctgacataagaaatgcaaagctgagaaccacagactctgattcggacacagccatttgtccccagaacacggaaacccttgcagaaatttctagaaaagtgcagcaagggatttgccacagggctagggacccactggcagataggtgatcccctgaaggatcctcggcgggctgctgtggctgtggacagaggcaggactcagcctacagagctgcagggagtttgtccatttcattggaagacaacactaagaggacacttggatcctaagactctgtaacaataacctagttactcccagaatttatttttgaaagtcagggtctcactatgtggccctagatggcttagaactcactatatagaccaatctagcctagaattcacagagatttgcctgcttgttcttttcgtgggaattaggatggagcccagggcaccacagacgcttgacgagggcgttacacactgatttgcagtcccacccccaccttcgttttggggagctgggctcaagctgtcttcatgcttcagttgctgagggtccaggaactttttcttttcgaagaagccacatgaagactcagggccacccttggtaggaggcaggaaagcgaagggtcgttgtccacccattttccgtgtttctccctatctctgggtcaccagatcacactccaggacttctgcctctgtcttcacaccctggcccgctaccacccatctaacacccacacttttgtcttctcagccttcagcccatcagtccaatgctctgccccaaggccgatccagacagaccctcctcttccacccctctccccaccccgctgtctttgtccgcagtcaccttctgtctctctccgctgccctcctggatccctcccctctgtccagtactctgcctgatcctaggcccctgcccttaatccctctgatcccagccccagactttatgggcccctccccctccttcaaaagccacgccctccccacttccttcagttgcctcccactgggtccccccttcagaagttcctcctcttgacctcctggtgccctccccttcctctgccctttcaccccgcccaactcccccctccatgtccgccctcctcttcttccctctcggggtcccctccctcttccccgccctccgtagctggccagcagggggcgctgggcagaggcggggcggcgcggggactggccgcgatgggaccggaggcggcgcagacaaaggcgcgggcggcgcggggcgcgcggagggcgcgggccggaggctgcagcgacgacgacgcggggtgagccagacagggggaccccagcttccgaggcacaatcagggagtcgggggcgcaggaaacgcagacggtttccaaagttgcggactgtgaggcggggcccaggagctgcggggtgcaggctgaggggttgggatcctggggtgccggctagggggccggctcaggtgctggctggggcgcggggcgcgtcttcaccgggttcctcagccgaggtccgggtgttggggacgccgcatcgcgaggctccgccacttagaagttgcgggtcagcggctcccgtagttgccctcacgagctgccctggagggagtgggaaccggtgccaaatgggaagccggcgtggggctcctggcagggtccccgccgcgcgcgatcgcggttctccgccccgcgcctctgctccaaggcgcgtgactactcagtgagtaacttttcctgatggtggcaagtccaggcaggagtggtccgaccggaagggcctgggttcggggacccctttcccccaatctccgccagttccattagcgtctctgactggacaacccccctaccctccctctgtatgggaacttaggtttcgcagcttcccaagacagcttggaggggccctgacctcagaccccgggtcttgacctcccgcacccgcaggaccctccttctcctccaatctccttagttgaaatttgggggacttaggagaatgacaggtgcaagcgttcataggaggctggggagctccgttctcccggtcctgttccctgttcacatggtggggactaggatgaaccgctgtgtgcaatgcgtgcttgtgtgtgtgtgtgtgcctgtgcgttgagacatggtcccactctgtagcccaggttggcttcaaagtctcctcattctccccagtgctggtgccaccataccaggctttcattttttccttttaagtaagctccctggagactcagacacagagttatctgggctaagtggtcctttctctctctctcctctctctctctctctctctctctctctctctctctctctctctctctctctctctctctctctctctctctctctctctctctctcctctctctctctctccctccctccctccctccctccctcccttccttcctagagttatttattttatttatacaagtacactgtagctgtcttcagacacatcagaacagggcatccaatcccattacagatggctatgagccactatgtggttgctgggaattgaactcaggacctctggaagagcagtcagtgctcttacccactgaaccatctctccagccccgaagtggtccatttgtgggatcagcgaggtcctgatttccctgttaggtccctggaagcactccacttttactccttgagatggggttatccctccatgatgaccagggaggccttgaactcctgagatgcatgatctaaccgccttggcttacagatagataaaaccacagggcctcaccacggatccagctttgtcccacattttgatgcaaggccctctgggaggagaggggggctgttggatgggaggggatgaataagatgttccactcggttgatcttgacctcatgttcagttcctgtgggaggacacttgcccagtggtgggtaacctggacagtgagtataatcctgcgtgccaacaaccaggctattctccaagccatatcctacctacccttgcagtttggtggcactgtatcacctctctggtgacactagagatctagagatcactcagtccagttgtgggggcttctcccaaaagcagggccttttgtttatgcctacagctcagttgatagagagcttgcatgggatgcaggatgctctgggctccatcctcagcaccacatgaaccaagaatgatggcacaagctgccgtcccagcatttaggaggtggaggccagaggatcaagagttcaaggttgctgttggctgcaaagtgatttcaaggccagtctgggctgggactgaggaagtgggtgtctgaccagcagctgctcctttcctgcctcgctggttttgtgaagtcacctggaggacccacttggcctgagtatccttggagccttactcacaatcttcttctttccctaggggacaaacaagtgactcctgtcacccctctgggtgccccttagaggccatccagcccaacctgaccaatgtccacagccaggtgagcactcacccactctggtctggccttgcccctgggtggcatcagactcctgcagagtttctgtccctgctgtagggaacagccaatcttcagcacccgggcgcacgtattccagatcgaccccactacaaagcggaactggatccccgccggcaagcacgcacttaccgtgtcctatttctatgatgcaacccgaaatgtgtaccgcatcatcagcatcgggggtgccaaggtctgagcaggggtttgggggcaggtgtgcagccaccagccaggctgggtgacttgggaatcaacgatcctttcccagacctaacgtcttccagaaataactcagtggtggggtctccgagaagggacaagagttctactgcagcccttcactgggggattctaggcaggggctccacctgtatgccttccgatagctcctcactgggggatcctaggtagggattagctactaagacagatgcctagagttccttttttaatttttaactccagtgtgtagtcttcaacttgaatgctccttctccagcagtctgtcaggctagttgctcctggcgctcattatcttctgacctggaatcttgcttcccccacctctaggccatcatcaacagcactgtcactcccaacatgaccttcaccaaaacctctcagaagttcgggcaatgggcagacagtcgagccaacactgtctacggcctaggctttgcctctgaacagcagctgacccaggtgggcagagacatgggcagtggttggcatctgtgttcctcagggtgggctgatgggtgacaggccttcttgagtgccctgggtgctgtggtcatttgccaacttgcttcaacccctcaaacctctcagcagctttgggtggaagcctggactgggcacatcccctgcccccgctgcacctctctccaacttctaacatcactacttagtaatgaggccattatctttttcagatatatttgtatgcgtttgtgtgcatttgcatgcatttgtatgtgcacaggccatgtgtgtgctgatacctccagaggtcagagggggacatcagatctcctggagcaggaggaacgggccatggttaaggctcctgacataggtgctgggagctgaactcacgtcttttagaagcattcttagctactgaggcatctctctagctcctcaaatttttttaattaaaaaaaaaaagattccttttttatttgctttggtgtaaatgtgtatgggtgtgcctatggagacagaggactgggctggctatctgtctattatttgggctctaagaatggagcaccttggctctcactgggccacaatgtagccgcaaatttgttttgctttgttttggttttctatgtagctctacatagaaatggaatacatggaattcactctgtagaccaggctggcctcgaactcagagatccacctgcttctgcctcctaagtgctaggactaagactgtgtgccaccatggccagcttttgatttttttgttgttgttatttaatattttttatgtatgtaagtcttttgcttccatgtatctatgtgtacttgcatgtgtatgcactgtgccggtggaggccagtagagggcgccagatcccctagagatggaattacagacagttgagtgacgccatgtgagtgctgggaacagaccctgggtcctctagaagagcggcccgtgctcctaatcactgagccagagccatctctccagacccctattattttttattttatttggggccgggggtggggtggggtggcgagggagtgtttctagacagggtttttcctgtgtttctctggttgtcctgaaacttgctttgtagaccaggatggctttggactcagagatccacctgcctctgtctcctgagtactgggattgaaggcctgtgccaccacacctgcctggctttgtttttgctttgttttgtcttttaagttttaggcagggtttcactgtcactctccacagtccttctgccactagagtgctagctcacaggtgtgtgccaccacccctgattagttgtttatttaaggtctctctggcctctagcaatcctatgtcagacttcctggtgactagaattagcccttgcctggttaaaaagtaatactttccgggcctggagagctggctttgtgattaagagcactggctgctcttgcagaagacccaggttcaattcccatggtgactcacagccatctgtgtcttcaattccaggacatttgacacctctggctcccaagggtaccaggcacaaacgtggtgcccagggagacatgcaggaaaaacatggctacatgtcaaataaaagaagttttttaaaaattattttctttttctatttttcatttttgtgggtagtgggggtcttactctatagccctggctggtctagaacttgctatgtagacaaggctggtctcagactcacattataactgaggctaaccttgaatttctaatctgcctgtctgagcctcaggggcttacggggcagcagcacaccgaagggtgcagcttaaacactgtgggggtgggagatggatcaggggctaagagcaagtgctgctcttgcaggcagtgagttcagtttccagcccccacatggcgggcccactaccttctgtaaccccatggaggggattcgatgcctctggtttctgggggcacttatatacacaattaacagtaataaaaataaatttataaacaagttttcttttaaagtttctattctattgatttcttgtttctgggctgtgcctgtgtaggtccccatgtgcagtgggagtctgtaggttccaaggaccaaatttatgtcctcaggctcatatcaagcatatggtatggagccagctcactagcctcctggtttttgtttttttgttttggtttttcaagccagggttcactgtgtagtttttgctgtcctggaatttgctgtgtagatcaggctggcaccaaactcagagatcctcctgcctctgcctcctcagtgctgggattaaaggtgtgcaccactgatgcctggctttatttatttatttatttatttatttatttatttatttttgtttttttgagacagggtttctctgtgtagccctggctgtcctggaacgcattctgtagaccaggctggcctcgaactcagaaattcgcctgcctctgcctcccaagtgctgggattaaaggcatacatcaccatgcccagctttttttgcttttttaaaaaaaatttatgtatatacatgtcgtgcctgtgtgtatgtgcgtgcagatgccctgcagaggccattggatccctggagctggtcacaggcagttgtgtgttagttgcctgaggtgttgtgtgaccttatgtagctcctcaatgacagcagtctgctctcctaactgtggagtgcggctccagacatctcacggtctttataagaaacaaaaattatgttaaagtgagaaaaaaaaaccccgcattatcataaactcggaaccagcattagctgtcagctgacagccttgggagaaagggatgccagaagacgcagcctctcgctgcctgtggatgtctttcctgtgttaggacatactggcaggtgtgaaggacagatgggcaactagcctcaggctggccactcagcccaacagaacagaaagtcccagaaagtgtggctcagaacttttttggggggtgccgggggggggaggtttgagacagggtttctctgtgtagccctggctgtcctggaactcactctgtagaccaggctggcctcgaactcagaaatctgcccgcctctgcctcccaagtgctgggattaaaggcgtgcaccaccaccgcccagcagctcagaactttttaatgtcacctctgtaatttgctaaacccccctctatgtgtcatcctgacacctgagatgcccacagggttgactcttctcaggatgacaggacaggtgcaggttgggagtgtgatgtgagacatggaaaatgctttctgactatccccctgcctcacccccagtttgctgagaagtttcaggaggtgaaagaagctgccaggctggctcgagagaaatctcaagatggtggagaattcactagtactggcctggcccttgcctcccatcaggtaggtgttcctgcaccccatgtcttacagtaccccatgactaccacacccctgaggcagccatatatgcttctgatatcaggggccatgcactgtattagtgtctaaggatggctggtggcctaaccacatttatgcacgtgtgcacacatgtgcgtgtgcctgggtgcacatgtggagctctgaggataacttgtgggcgtcagttctcttctttcagcggggcatcaggcttggtgactagcccttccgctggcccatgcctcaattttacctgagggagagcagttccaagtgttcagatccctgtttctgtaggctgttctgatttggccctgagggacaccaggcaggtgggggacaggattccctatccagaggttctggggagatatggagcaccagtgaggaaagagacacactggtcatcgggggtcagttcagactccctgacctcaataccccagtggcttcaatcaactttacttcctaccatgaccttgactgaagcaaatgcccaccgtgacccagtcctggctcccatgcacaggttcctccaagccccttggtcagcaccaatggtccaggcgaggaaaagctgttccgtagccagagtgcggacacccctggccccaccgagcgggaacggttgaagaagatgctgtcagaagggtgagtggtgtagttggtggagcctgcatgaagccagatgggcatggcaggggcctaaggggtgtcttgtgttcagactgaactttcgggtggtttctagtgtcagggtcttttgttttgttttgttttttgttttttcgagacagggtttctctgtgtagctctggctgtcctggaactcactctgtagcccaggctggcctcgaactcagaaattcgcctgcctctgcctcccaagtgctgggattaaaggcatgcgccaccactgcccagcaagtgtcagggtcttgattgtcactaaaggagtgtgatagggtaggacatccccaggatagaccattaggatggtttttctggggtcagggtcctgcaagaggtaagggacgtgggcagtaggatgggcgtggtcatcgaggtgagacctgtgggggatgtaggaaactacagacctgggagaggttcctgcctcttctggaaaggaggctgcactttcctcatcattcatacccccatctcttttgaccatgggcctgacccctctccccaccccccattgctttcatggcaatctggagggcagggataggcttccaaatatttttggaggtagggtcctgttatatatcccagaactcattatacatagcctaggctgacattgttcctaaggggattctcctgtctcggcctctgatgagccacaactccacatgtggtttcatggtcccactccctggcttagtgttgctttggccctgcttagtccaggatagcctcctccagatgccactgtcctgaccatgcacacccccagcccggtgtcttccctccagctctgtaggggaggtccagtgggaggcagagttcttcgcgcttcaggacagcaaccagaggttggcgggagcccttcgggaggccaacgcagcggccactcagtggaggcaacaactggaggtccaacgtgcagaggctgaactcttgaggcagcgggtgaggacccctcaccccacatcccttctacccatcagtccccagcaggccatttcttgctgtaaaatgatttgaaactgtgagagcttcataggggtcatcaggcccttcatgtcccagaggatggtaggaccactgggttgcatgtgtgcaggtagcagagctggaggcccaggtggctgtagagccagtccgggcaggagagaaagaagcaaccagccagtcggtggagcagctggaggctcgggtgcagaccaaggaccaggtgagccaggggcaagcttagggatcgtgtcgtactctcctcgggaatccagggcctctgaggacacctgggacaccttcttctccaggagatccagactttgaagaatcagagcactggcacccgagaggctccagacactgccgagcgcgaagagacacagcagcaagttcaggttggctgcaggacctcagctgtaagagtgaccccctggggtagaacaggtcccatctgcctgcgagtggaatagggctgtctacttaaagttgctaagcaacctcatacttagtcttcccacatctgagcagtctaaggtcccagggaaacttccagagacctcagccaagagtatctggagcatctccaggaatgtcctggggagatgaccctgttgtcttcgagggcgggagcagattgtgcaaaggcccaggaccccagaatcattggccctcctggtcacaggactgtattcccagggagagaatctacaggaagcctgttctatgcatttatatgtcacccaggtaccacctatcatgggtttttgtgtatagtgtatgtgcatacatacatcccatgtgggtacagatgcgcatgcatgtgtatggaagctggagctgctgtcttcctcagtttctttgcacaccatcctttgagactatcttactaccagaatggctgggtgctgagtcaatcaacagtgggaccctgctctcccaccctgaggttacagctgctggcagtggctgtgggcattagattatgtgtgggtgaaaggcaactgaaattcagggccctcaggtaaccatctctttagttccactgcccacttcattaaaagtgcttggctccagagcatgctattaagcattcttccctccttctatcatgtgggtactggggattaaaccttcatcttggggtttttgtttttcatactgactgtgtctctagcagcagcttcccgagtgctgggttaaaggcctgtgagacatgcagtgcatgtagctttaagatttagttacatgtgtggtattgtacaccagtgcttggaagtgaactcaggtcttctggagaagttcatactcttacccactgacccatctctacagtccatcttgtttttagaaacagggtctctagccaggcagtggcagtgcatgcccttaatccctgcacttaggtggcagaggcaggatttctgagtttgaagccagcctggtctacagagtgagttccagggctacacaaagaaaccctatctccaaaaaaaaaaaatcaaaaaaaaaataaaagaataggaagaaacagtgtctcttactggcctggggatgcttaggttgtccagtatgctctaggaatcctgcctgtcttcccagcagtgggattacaaatgcttgccagccatgctttgtatgtagctattggattccaaactcagtacttcacactttaatggcactttactgacccggtgagagccatgggccacatcagccataactggcaaccagagcttccaccccaccccgtcttccccgtgtaggacctggagacccggaatgcagagctggagcagcagctgcggtcgatggagtgcaacctggaggaggcgcgggccgagcgggagcgcgcacgggcggaggtgggccgggctgcgcagctgctggatgttcggctgtttgagctcagcgagctgcgtgaaggcctggcacgcctggcagaggcagcaccctagtctgccatggagtgtctgcggcctcaaggcgccctggcaggggccaggggaccccagctgtctctgagctttgcactgtgtagagttttctagaatccttgggcagtgcttctacccaggttacatttctacgtgtggcgttgctgtccctggctgctgctgccctgcgccccagggacactgcgagggaaggctgcactagtcatccccatggggcaacagaggctttgggatcctgagacctgaaggccctgtactcatcccaccccattctcaagtcagactgacaacttcaaagagtgtttactgaagtcaggggccaccagcaccaggtttacagctcagtcctgagcctcagcctgggctggctcttggggccgagatctgggaggacgcgaccgtcggacagtgctccctgctttctgccgccgaagtgtctgccccactttctccttgaagcgtcggttttgttgcttgatcttggccagctcagctttgcgtttggcctccaggtctgggtcctgcggaagggagctgagaatgtaactgggcagcttcccagggactggctcccccacccctacccgaccccaggtcccacccacccttactggccacactcttatgcctgtccctgcatacccatgcctccctatactaccttcccctccaggatcatctgtttccgcttgttgatctctttcttttcatcaaaatgcgaagcctccagtttctaggggtggggaggggaacaggtcagtcaggcctggggcaggaagccccgcccacctcaccccactccaccctaccctgacaggctggccacacttactatttcgcactcccttcgcactacgttgacctgcgtgaggatttgtagaacctcagcctcctccaccaccagctctgccagctgctgctctgcagggacaggaaacactgagttgggctgggagtgcaaccagccctctgcacccccagctctggatgtctggatccaaccaaatgtggactgatgatatttagaaaaagcaaaatgctgccaagcttggcagcacatgcttgtcatcacagcactgggaggttggaggcagggggatcactcgttccagctgagttccaggccagctctgtagagcaagaatctgtctcaaattaatgactgaataaacaaatgaacaagtaaatgaagtgagatctggctccctgagaggctgagacaggctctgcattgtgagcacaggtcttcaggccactgtgagttaaactgaaagagcttctacaaggagctccagatggcccgccttggtggctgtttaacgtaggttgtagggcctgcctgagaactcatgtccttgtcaacctccaaaccacacagggaccttcagggttggcgtcctgtgtgcagggtgcattttcagggtgagtactggaatagatatcccagggtaaggtaagctagggagaggaattcatctcccaggcttggacaggacccaccctggaccctacccacttactgatctgctcctcgatggcatgcaacaggtggatatcatactgcgtcaccagtgtgatggcttgcccctgcctccctgtggggacacatttgtcatagaacctgggccccatcaacaggcttgtcccagctgatcagctccagggacctctgcagaggcaagaaatcagtgaagaggactagggctgcccctagggtgggctctgcatatgacaggcagaggggacactgggaagctgagagacagtagggagcaggtctgctaagctgccctttatgagggccgacagcaagctgcttttcctttatggctggaggccagcttagtcctctactgctctttcttcagtggtgaccaagctgaaggagactgtcggctgatagggctcatgacccacagcagccagcttctcagtgcttattatttgttaagacagggtcactctcagacttcccaaaacccacaggggcaggatagcaggtccagtctggccccatcaattcaggcacgagggaatatcaaagcagatgcctcccctggcccctgggtcagcatctcagtgaggcatcaggctggggatggaagccaggacactggaaagctgttcccactgagtggtagacccagttctccagtgcctcccactgcagctggaacctcccgtacctggctctgctcacctgcacgggctgtgcggccaacccgatggatgtagatcttgggaagcccaggggtgttgtggttgatgaccacctgcacggtggggatgtccaggcccctggaggtacagagcattcagctggagtccatgtagggaaaccaaggcttacactcagcttccccacacccagcttcttggtctcattgcttgtgccatggtggtctcaccttgaggccacgtcagtggcaataagaatccgatagatgctggacttgaatttggccagggccgcaaagcgctctttctgtgccataggtgagaaaaggtttgtgagcagatggagtaagcctggggacagggctgagaccagaccagggaggaaggtggtcccagagccaaaggggacaacaggatgacatggggaggggagcggtatcacagtgttgtgatgtcttcttttgtgtttttttttggggggtggggcagggctgtgctaggcatgctaacacacactttaatcccagcatttgggaagcagagtcagccagatctctatgattttgaggacagcctggtctacatagggagctccaagacaaacagggctacatagagaggccctgtctcaaagtaccaaagacaaaagaaagcaaaatcaaaccaaatgaataaacaaaaaaaaccccacaaatcaaaaccaacaaactcccccaaacaaacaaaaaccaaaccaaacaaccccaccaaaaccaaagacagggtctctattagcctaaactggtcttgaacttcctatgtagtcaaggctggccttgaacttctgctcttcctgcctcacctcctgagtgacagaccactatgcccagttaacagggttggggatggaacccagggtctcatccatgctaggcaaggactctcccaaatgaaccacagccctctaaaattgaacattactctaccgactgaaccacatcctcagcctctgagttgtgacatttgagaccacagagaggctatggctgtggtccatcacctgcttcatcatggagtgcagtgccactgtggggaagttgaactttcgaagcatcatacaaaggatctggcaggtcctggtgggaaaggatgggtgtgagtgcccagcacggagacatcacctgaacaaacgaacaaatgaacacccggccgaggagaggtagggatgcttggtctgctgcctgtgagcctctcaaagccagaaccaacaagcagcagccctgaccatggtactctgacttccaaagtagagctatcaagttgctgatcccctctcctatggtggacagaggcccctcctctgccctctacactgttgggagacagccaacagctcttatttttttcttgtttgagtcagggcctcactgtgtagccctggctggccgggaagagctctccatgcctcctgggtattgtgatcacagcagcgccactgggcctagcccagtttcaccttcacatgtggtaaggtgggccagagcctctagcataggggaaggccagagcctgccactcacttgcaggtattggtgaagatgatgatggagcagtcctccagctggtcctggaaggtctggactaggtgaaccaggtaggcgtccttcaccttctccggtaccaacaaatagcgctgatcaagctgctccactgtgcggactctggaggtggaagggcagagcattctacctcaggttcttctgcctcaactctttggggtaaccctcacccacagctgtgggactcacgtggcctgtgcctcccaaaagaagggctcgttggtggccaggccctgcagctccttgagtgtgtcagtcagcgtggcactgaacagcagcgtttgccttcgtgctggaacggctgccaggatggtctccaggtctgtggtgaagtcggtgcaaccctgctccagcagcctgtcggcctcatccatcacctgcacccgagcagcaggagagatcttcaaccctggagctgcagatgctcagtaaaagccccaagcatagcctacctgcctttcagacactgtgaaatgggttcctgaacactgtcctcagcctcaagtccgggtcacctactgtgcaaggctccagcaggtcctctgggacagcccacctaatgccttgtctctaccgggttttttgttctgtataacacagagtcttgctgtacagtactgactgtcctggaactatgcagactaggctggcttcaaactcctaaagctccttctacctctgtattctgagtgtcagcacacccagctggcccttgtctttatttctagccctttgctcaaccatctgtgataccagtgtcaggaacgggtaccagctgagcacagtcatgcacatgtgtatacagagctccaggacagccagggctcctccatagagatcccatgtctcatagaacagcagaggagaagagagagaattgacacaaggtggccccccagcccagtctctagcctcaggagcacagctggctcaccaggaattggattttcttcatgttgaaagtgttggaactgcgcaggtggtcagccaggcgcccaggggtggcaatcactacatgtggcttccgagagagctccagcgcctgagccaccatgtctgaagtggagggagaggtgagactgagtgggagggatgagcaggaacccccaaggcccaccgcagcctctcagcccccatacccattccaccaacaatgatgcagtccttcagacccagaggcttccccagcacccggaactgctcagcgatctggtaggccagctctctgtggatgacaagagccagcgggatgaatgggtgcctgtgcctatctcccatcccctctctttcctccaggctcctcctggcctcctcaaaaccaattctaaggagactggcaacatgtctcagcaggcaagatacaagctcacatctggagttccctctccaggacccacatggtggaaggaaagctggttccacatgattccttcagctggtcctctgccctccacatgagcacagtggcacatgcatacaaacatctcaggacaaactgctcactgccgaggcatgagggcctgggttcagatgcttagcatctctgtaaaagctcagtgcacagcagccatatctataacctcagtggggatgaggaagggcactgaggcaggaggatacacagcctacaattaatgagacagtaagagaccatgtctcaaaaaataggatgggagaggctgggtgttggtggcgcacctttaatcccagcactcgggagacaaaggcaggctataaaaaggcagttttattataagagttcattctctgctctaattgttgtctccaaggcttactgcctgtctgctaacctaggcctagtcctgtacaatctttttttttcttttcttttcttttcttttcttttctttttttcttttcttttcttttcttttcttttcttttcttttttttcgagacagggtttctctgtatagccctggctgtcctggaactcactttttagactaggctggcctcgaactcagaaatccgcctgcccggctgcctctgtacaatcttacctaggcctaaaatgttttcagcctctgaggctcactgctgagtaagctcaccctttctagttctttccagctctaacttctcttcacactgactgattcaaactaacacacactcacactatgaggcccccccccccccccccccgcttctcctgaattgccccgctcggcctcatagtaattctgtaattctggcaatctgttctaatcttctggctcctgattctttggctcggtctgtcttcacctgtgtagagttgttctctccctgcaacctgcctctgcacaactgtcccaggagaactgcctcctcctctctgcactgcccctcacgtagcttcccattcctcttctcctgagagttggccatgtgctactctgtcaaatctcactgtctgccactcaattagacatcactttcaaacatgggtacttccttctacaaactaactttacttacattgtttgggattaaagcagtgtactaagggcatgtctctgattagacatcagaggcattaaagatgtgtgctaaagctgagccacaccacaactaaagacaagttaaataacacaatcttagggttcacagtgtgatcaaacatcctgcaacagcaggcagatctttgtgaattggaggccagcttggtccacagagtgaggtccaggagagccacagttacacaaagaaaccctgcctagaaaatccaaaaggaaataaatagaagacgggggtggagagacagctcagcaactgagacctcttccaggggtcctgagtttaatttccagcactcacatggcagcttacaactgtctctcacaggactcaacaccttcttctgtccatggcatataaataatcaaacctttggcagggtgtggtggtacccacttttaatcccagcactcaggaggccgaggcagaaggatctctgtgagtcagtgccagcctggtccacagagggagctccaggacagcaggctctgggggatgagtggtgggggaaaggagttaaaaaataaaacacagtggggggagggtatgagggacttttgggatagcattggaaatgtaaatgaggaaaatacctaataaaaaatatacataaaaataaataaaacacagcgggagaaatggagggtgcctgatgttaaccctgacccacatgtaaacacaatcgcaatctcatcctctgtgtgatatttgagacctatattcaagatgctgacagcatcctttctgttccctgctgctggcctctcctatgcacaatggaacctatatacctacaatagctttttttttttttttggttttttgagacagggtttctctgtgtagccctggctgtcctggacctcactctgtagagcaggctggcctcaaactcagatctctgcctgcctctgcctctcaagtgctgggattaaaggcgtgtgccaccacagcccagctacaatatcttttaaacacatttattacatttctttatctatatgggtgtgcacatgcatgatgtggcgctccaatggaggtcagaggccaatctgtggaagtcacttctttcctttcaccctgaaggtgagtccctgggggctgaacttaggcttataggcaaatggctctgcctgctaagcaatcttactggcccaaggatatcattttgtttccctagctgttagacttggtagctccctcttgagtgctaggaatgtttcacacacaccattagccctgcttgattctgcaaccctacaagagaggaatgattcttaccccatttcacacaagagcaaagtgcaactcggacaggtcaagaaagcacatgtggagctgggcgtggtggcgcacacctttaatcccagcacttgggaggcagaggcaggcggatttctgagttcaaggccagcctggtctacaggacagccagggctacacagagaccctgtctcgaaaaaccaaaaaaaaaaaaaaagaaagcacatgtggctgagtggggaggctcacctggtgggtgtcagaaccaagcagaagatgccataagggtcctcagacagcttctgcaagatgggaagcacaaaggctgctgtcttgccacttcctgtttttgcacagcccaagcagtcccgacctaggcagatggcaaagcagcatcagtgtggagcaagggccatgattggtcccttgggcattccctcattattgtaagaaatagatgggtatggtctgcttttagtacgaggtgagcttacagttcactagagctacagatgagttggaggcactgggtccttctctcccctagttagtctaagactcggagagttacaggtgctctgctatgtgactgagcccatgattagaaaggaagggcagccaggcagtagtggcgcacacctttaatttcagcacttgggaggcagaggcaggcagatttctgagttcaaggccagcctgttctacagagtgagttccaggacagccagggctatacagagaaaccctgtctcaaaaaaacaaaaaaacaagggaaaaaaaaaagaaagaaaagagaatagaagagaggcagcctcaagacccaaactattcattagagaagacttggggccccaatggaccaatgggatggggaatttggggaggggaaaagccctgcaggtctatggaagaaaaggtcaggaatttcccatatttggggaaaggcttcaaaaacttgcttgaaatcaccacaccagctatttttgccttttctctatgctggtacccctttctccagaattgaatatttaaaactgtttcatttccactagtcccttgaacgtgttattatctaatttccaacaattattataattgcttgtttgaaacaaattttcaggtagcccaggctggtctgcaacttgctaccaaactgaggatcaccttgaactcctgatcctcttgcttccacctgctcagtattgagatgactgagagtcaccacgtccggctccaaggacgcctctttaatggcaaaagtgaactgggtcgaagagcactgacacaaacacggagcattggtttttacctggagtttgacggcttctacgtcaaagccagctctaccctttttttttttcagtgccatgttttagtcattcaccgatctctccctatgctcgggtgctacgaaaacttaagaggtgccacccatcacctgtgtgataatgaacacgagtcggtcgcagcgtaaatgtcaatgctgcgggtcagggtccccgaaacactcaatgctgtcctgattcctgggacccaagtggggctaaggaagagcgggcaaagaaaggcattaaaagaaaggcgagaactcaccttccaggatggccggaatgcacccgagctgcaccggcgtgggctgcttcaaccccagctgtcgacactgttctaccagccacgacgacaacccgatttcagcgaaccccgccatgctccagacccgggcagagaacctagaaatgagtgcttccggcgcgtgaatgctacgtcacgtccaccccggcgcagtccggcctggaaaagttgtgagaggacgttggcggaggaatgtgacgtcacggagagaccctctccagatccttcaaccaatccgagctttgaccgcttttcagtgttttggttctgaaggccttgtgtttgttgacggaatccgaactatagttctcgggaggctttgcaaggtttctttttcatcgcctctgatttgtcccatagaactacgtttcccagagttcctgacgacggggacctgcttccggcctacgtgtcccagaagaaggttggttagaggtgcggtgacatggctcctccggttcctggcgcggtctctggcggctccggagaggtagatgagctgttcgacgtgaagaacgctttctacatcggcagctaccagcagtgcatcaacgaggctcagcgcgtgaaggtgggcagcgtgcggagcagcttccggcgcgctctgaggttctggtccgaggactcggtttctcttataattagggatggttttcaatttactctgtaaccgaggctaaccttgaggtcctgcgcctccagtcttcacccctccagtgctaggatgacaggtgtgcacccctgtgccaagcttccaactttctggtggttgattgacaggggctcactttatagcccaggctgacctgaagtcagggtaatggtgaggtgacaggtgtgcgccactagctccatcataaaacctcttactgtttcgtttttaaaccccccccgccccccttttttaagtgtctaaagtcaggcatcatggtgcacgccttctattccagcacttgggaggctgatctctgtaagtttagggtcagcctgatcttcataagcagttctaggtcagttcgggtaatactgtaatctgtcttaataatagtcctaaaccggaggtagcttggtgtgccttaaatcccagcacccagaggcagaggcagtcaagtctctgagttttggaccactctgatctacatagcgacttccaggacagccagggtgctacagaaaaaccccgtcttgaactgtaccctcctcgcctcccccactccccccaaaagggaagtttggttataaaagaagacagtctcctttagcccaggctggcctcagactccccatgttgctgaagagcactgaattcctgatggccatgcctgctctctggagtgctgggatcatagtgtgcacagccaaagcacagcttcgatgcaaatgctccacaggctaaatccttgccctggttttgttttatgttttaagcagcttcatatagcccaggctgtccctagatgtagcagtcttgtctcagcctcccagatgcaggatgacaggcctgtgccacaatgctcagcttgtctttagttcattaaagatgtgacccgtgtttgcaacagcctgtgtgtgttgttgacagaatcacctgtcactcattcttcactgtgcactcgtggaaaacagcattcctgctgggctcagtaagggatggagttggtggaactacaggctttctaggtatagtagccttggcaacagaggcagcacagagagccaggaaatggcagaatgggtgtagaaagtggtggtcttagacttgcctgttttgaatgtgaaacagagtcagggctgtgatgggctggggcatggctcaggtaaactatgtggaggcttgtccttaccaggctaaaaagctgttttgttaaggttctggacaagaggcaagaagatccaacttgttctcagctatgtagtgagtttgaggccagcctagtctgcatgaaaccctgtctccaaaactcccaaaataataaaatcaaagccaaa

SEQ ID NO: 710 - DNA, 2354 bp, Mus musculus
ggcgcgggcggcgcggggcgcgcggagggcgcgggccggaggctgcagcgacgacgacgcggggggacaaacaagtgactcctgtcacccctctgggtgccccttagaggccatccagcccaacctgaccaatgtccacagccagatcgaccccactacaaagcggaactggatccccgccggcaagcacgcacttaccgtgtcctatttctatgatgcaacccgaaatgtgtaccgcatcatcagcatcgggggtgccaaggccatcatcaacagcactgtcactcccaacatgaccttcaccaaaacctctcagaagttcgggcaatgggcagacagtcgagccaacactgtctacggcctaggctttgcctctgaacagcagctgacccagtttgctgagaagtttcaggaggtgaaagaagctgccaggctggctcgagagaaatctcaagatggtggagaattcactagtactggcctggcccttgcctcccatcaggttcctccaagccccttggtcagcaccaatggtccaggcgaggaaaagctgttccgtagccagagtgcggacacccctggccccaccgagcgggaacggttgaagaagatgctgtcagaaggctctgtaggggaggtccagtgggaggcagagttcttcgcgcttcaggacagcaaccagaggttggcgggagcccttcgggaggccaacgcagcggccactcagtggaggcaacaactggaggtccaacgtgcagaggctgaactcttgaggcagcgggtagcagagctggaggcccaggtggctgtagagccagtccgggcaggagagaaagaagcaaccagccagtcggtggagcagctggaggctcgggtgcagaccaaggaccaggagatccagactttgaagaatcagagcactggcacccgagaggctccagacactgccgagcgcgaagagacacagcagcaagttcaggacctggagacccggaatgcagagctggagcagcagctgcggtcgatggagtgcaacctggaggaggcgcgggccgagcgggagcgcgcacgggcggaggtgggccgggctgcgcagctgctggatgttcggctgtttgagctcagcgagctgcgtgaaggcctggcacgcctggcagaggcagcaccctagtctgccatggagtgtctgcggcctcaaggcgccctggcaggggccaggggaccccagctgtctctgagctttgcactgtgtagagttttctagaatccttgggcagtgcttctacccaggttacatttctacgtgtggcgttgctgtccctggctgctgctgccctgcgccccagggacactgcgagggaaggctgcactagtcatccccatggggcaacagaggctttgggatcctgagacctgaaggccctgtactcatcccaccccattctcaagtcagactgacaacttcaaagagtgtttactgaagtcaggggccaccagcaccaggtttacagctcagtcctgagcctcagcctgggctggctcttggggccgagatctgggaggacgcgaccgtcggacagtgctccctgctttctgccgccgaagtgtctgccccactttctccttgaagcgtcggttttgttgcttgatcttggccagctcagctttgcgtttggcctccaggtctgggtcctgcggaagggagctgagaatgtaactgggcagcttcccagggactggctcccccacccctacccgaccccaggtcccacccacccttactggccacactcttatgcctgtccctgcatacccatgcctccctatactaccttcccctccaggatcatctgtttccgcttgttgatctctttcttttcatcaaaatgcgaagcctccagtttctaggggtggggaggggaacaggtcagtcaggcctggggcaggaagccccgcccacctcaccccactccaccctaccctgacaggctggccacacttactatttcgcactcccttcgcactacgttgacctgcgtgaggatttgtagaacctcagcctcctccaccaccagctctgccagctgctgctctgcagggacaggaaacactgagttgggctgggagtgcaaccagccctctgcacccccagctctggatgtctggatccaaccaaatgtggactgatgatatttagaaaaagcaaaatgctgccaagcttggcagcacatgcttgtcatcacagcactgggaggttggaggcagggggatcactcgttccagctgagttccaggccagctctgtagagcaagaatctgtctcaaattaatgactgaataaacaaatgaacaag

SEQ ID NO: 711 - protein, 385 aa, Mus musculus
ARARARRARAGGCSDDDAGGQTSDSCHPSGCPLEAIQPNLTNVHSQIDPTTKRNWIPAGKHALTVSYFYDATRNVYRIISIGGAKAIINSTVTPNMTFTKTSQKFGQWADSRANTVYGLGFASEQQLTQFAEKFQEVKEAARLAREKSQDGGEFTSTGLASHQVPPSPLVSTNGPGEEKLFRSQSADTPGPTERERLKKMLSEGSVGEVQWEAEFFALQDSNQRLAGALREANAAATQWRQQLEVQRAEAELLRQRVAELEAQVAVEPVRAGEKEATSQSVEQLEARVQTKDQEIQTLKNQSTGTREAPDTAEREETQQQVQDLETRNAELEQQLRSMECNLEEARAERERARAEVGRAAQLLDVRLFELSELREGLARLAEAAP

SEQ ID NO: 712 - DNA, 31926 bp, Homo sapiens
gtctcgctctgttgcccaggctggagtgcagtggcgtgatctcggctcactgcaagctccacctcccaggttcacgccattctcctgcctcagcttcccaagtagctgggactacaggcgcctgccaccacgctcggctaattttttgtatttttagtagaaacggggtttcatcgtgttagtcaggatggcctcgatctcctgacctcgtgatccacccgcctcggcttcccaaagtgctgagattacaggcgtgagccgccatgcccggcctttttttttttttttttaagatgaagtctcactcggtcacccaagctggagtgcaatggcgtgatcttggctcactgcaacctctgcctcccgggttcaagggttcaagtgattatcctgccgcagcctcccgagtagctgggactacaggcgtgtgccaccacactgagctaatttttgtatttttagtatagacagggtttcaccatgttggtcaggctggtcttgaactcctgatctcaggtgattcacccacctcggcctcccaaagtgctgggagtataggcatgagctaccatgcctggttatttttttctttttcttttttttttttttttttgagacggagtcttgctctgtcacccaggctggagtgcagtggcacgatctcggctcactgcaagctccacctctcgggttcacatcattctcctgcctcagcctccccagtagctggggctacaggcgcctgtcaccatgcctggctaattttttgtatttttagtagagacggggtttcaccgtgttagccaggatggtctttatctcctgaccttgtgatctgcccacctcggcctcccaaagtgctgggattacaggtatgagccaccatggccggcccatttttttgtatttttgtagagatggggtttcaccatgttggccaggctggtcttgaactcctgacctcaggtgagcagcctgcctccgcctcccaaagagctgggattacaggcatgagctaccacctccagccttctgctgacttttactttggggaactgacaagctccctgagcctcagttttctcttctatgaaatgggttagctaggtgcagtggcttatgcctgtaatctccgcactgtgggaggctaaggcaggaggattgcttgagcccaggagttagagagcagcttggacaacataggaagaccccatctctacaaaatattaaaaaattagccaggcttggtggctcacacctctaatcccagtgactcgggaggctgaggcaggagaatcgcttgagcccaagaggctgaggctgcagtgagctgagatcgcaccactgcactccagcctgggcggcagagttagaccttgtctctcaaaaaataaaaattaatgccgggcgtggtggctcatgcctgtaatctcagcactttggaaggccgaggcgggcggatcacgaggtcaggaaatcgagaccattgtggctaacacagtgaaaccccgtctctactaaaaatacaaaaaaaatttagccgggtgtggtggcacgtgcctgtagtcccagctactcaggaggcggaggcacgagaattgcttgaacctgtcagatggaggttgcagtgagccgagatcgcgccactgcactccagcctgggtggcagagtgagactctgtctcaaaaaaaataaataaataaaaataaataaatacataaataatttggttacatgtcaggcccatggggtccagacttggaccttgccttcctcccccagagcccctgctgtgcactcctatactggataacagtggagcccctgagaggcctgggtcctgggcctggactccagttagcccccagtctgggagggaggcagggccagacacagacgcatcctcgtcctgggggtcaggattgtcagagttgtggggagggctggaaggcttcctggaggagatggccttagagctggcatttcaggccatacgtgggacccagtacaagtgctctgaagtggggctgagcagcttgaccaatgggcaatgaggagcttgagcctctctctgaggtgtccaggagagccacggaagatgctggagcaaggaggtgggcagcatcgccagttagaggggtcccttggtgtgtgttggtgggggggatcctagagggcatagccagggcacaggtggccaaaccagagaccccggcctgtgcctggggactaggaatactctccctctggcagacccagggaagaggctgtagcatgtgagtcacctggctgctgtgagaacattcggcgcgcggcagccccacgtgggctgtcaccaagcaggaacacggcccccagaggccctctgagctgccttccccacgggcttctgctctctgttcccacagctgctcccccaaggccacagaaggagcgtgggatggggggacaggcggggaggaggccgtgtaggctgcacagccagcatttgggagctccagggtagagtggggcttccccggcagagggctcactgtgttctggggctgccctagtctcaggactctgctcagggtggggaaactgaggctcagagaatggtagggtctgcgaccattctgcacatggacagacacctcgttctttcctaagagctgaaaccctgcccagggcctgcagtgtcaatgtgaccactccctctctctctggctccaaactccccatggctccccagtgccttcagaatgaaacccacacaactcaccaagacccacaaggctctgctcagttcctgtgaccccctaggtctcagcagtcccataagcttttctcccacttactccactctagacacctgtctaatgtaccagcaacatgtcctgcctggccccacctcagggcctttgcccatgctccgacccccagtgcctaaagcaccctttttaaattacacctgtttcatccctcaggaaaggtgcaaagagttcatgaaaggttatatgcccaggaacacacagcaagctggtgggacttgggatatgaaaccaggcccatctgactacccccactcccaccccctggcagcccctttcccggccatggtatcacatcaaaaacagacctgggccgggcgtggtgtctcacgcctgtaatcccagcaatttgggaggcccaggcaggcggatcacttgaagttaggtgttcaagaccagcctggccaacatggtgaaactccatctctactaaaaatgaaaaaattagttgggtgtggcggcacgcacctgtagtcccagctactcgggaggctgaggcagcagaattgcttgaacctgagagggggagattgcagtgagccgagattgtgccactgcactctggcctggatgacagcgagactctgtctcaaaacaaaacaaaaagacttcaaaccaatccaccatggagctggctgattctcaacccctccagatttttttttttttttttttttgagacaagagtctcgctctcccgcccaggctagagtacagtggcgcgatctcggctcactgcaacctctgcctcccaagttcaagcgattctcttgcctcagcctcctgagtagctgggactacaggaatgcaccaccacgcccggctaattttttatatttttaatagagacagggtttcaccacattggccaggctggtgttgaactcctgacctcgtgatccacctgcctcagcctcccaaagtgctgggattacaggtgtgagccatcgtgcctggccatgcccctccagatcttgccacctctggctaggtgccaaagactctcaggccttgggcccaaggccccctgttcagggagctccaaggccagccgacccccaattcccgcagtgcctcccctgatgtggcctcaatttctccgccccactttctgcccttcaagcgctgctgatggcggaggcttcaaggacgccacagccaaaaataatcgggccccgacctacctccggaaattggggcagccccgcccagccacctggcacccaggaggtaattagtgcatgtggcaaattagggtaattaggtctgcgggaactgaacctcgggtccaggtttgctgctcagaggggcctcaagcactgcctcctcccatccccaactcactctggtcctaggtcctcaaatccataaaccagtgctggcgaccccaactccacgaccctttcttgcctgggcctgagggagcctggctccattgcttcatggggggttgttgaatgaattaactttagccgtgggcagaagtcaagttctgaatttaaggcagggtctccttcaagtgatgcaaaatcaccaatagtactgagtcatcaaactccccctttgcctgacccccatgcgtccacactatgctggaagatgacaaactctagggaaacatgggccctggtctcagcccttgagagacactcaggctgggggagtcaaagctgcacacagacactcccaggagtcagggctgggccagaaagagggaagagggctggaaaaggtctagaggtagaggagagagcttcttggggaggagagcattgaaggtgaggctttgagggatgaataggagtttgcaaagaggctaatgtctggaggttggcccaaccagctatggcttggggaatgaagagaaggaagagggaggtagctggagggggcacctgagaggccaggagctaaagatttagaggatgtcatgccaggttggacccatttctgtccttgagagttcaggcctggttggagtcctctaacttctgaaaaagaaaagagtaagaggttggttcaggatcaaaaccacataccaaaaataaatatgatgtttataacagcaagcatttattaagcacctacaatcacgttctcttcacataacaactcattggaggccagatgcagtggcttacatctgttatcccagccctttgagaggctgaggcaggcagatctcttgagtccaggagttggagaccagcctgggcaacatagtgacaccccatctctacaaaaaatacaaaaattagccaggcgtagtggtgtgcacctgtagtctcagccactcaggagtctgaggtggaaggattgcttgaacccagaaagttgaggctgcagtgagccatgattgagccactgcactacagcctgggcaacagagtgaggccctgtctcaaaaaaaaaaaaaaaagaaaagaaaagaaaagaaagaaaaagggtgggcgtggtggctcacatctgtaatcccaatagtttgggaggccaaggcgggtggatcacttgagtccaggagttggagaccagcctggccaacatggtgaaacccctgtctctactaaaaacacaaaaatttagccggctgtggtggcgtgcgcctgtaatcccagctactagggaggccgaggcagaagaattgcttgaacctggaaggcagagattgcagcaagccgagattgcgccactgcactccagcctgggtgacagagcaagattctgtctcaaaagaaaaaaagaaaagaaaaagaaagaactcattggatccctacagtaaacctcagaagtgaacaccattcgtatgcccattttatggatggggaacctgaggcacaaagaagggaaagtgacttcttcagggtggcactgctggtaagcagcagggctgggattcactccctggctcacgtgattccgaaagccaagtcgaaagctggaacctggggatctcctactcctgaaagtgctcatagaaagctgtcacaggggccaagggcggtggctcacgtctgtaatcccagcactttgggaggccaaggcgggcggatcacgaagtcaggagattgagaccctcctggccaacatggtgaaatcctgtctctactaaaaaaaaaaatacaaaaattagctgggtgtggtggcgagtgcctgtaatcccagctactcgggaggctgaggcagaagaatagcttgaacccaggaattgaaggttgcagtgagccgagattgtgccactgcactccagcctggcgacagagtgagactccatctccaaaaaaaaagaaagctgtcacaggtcaggcttgttctaggtgcagggacaaatccatgtaagaggtgaacagtaaccaaatcatgccataaacaataaacagacctgaagtagtcaccaagaccttcactgggaggtgggcacccagctttcgggaagagcaggtggactgtccctgctctggtggcacagaaagtctctggagaggagagactgtttagcctcactccaaaggctaggtcagatctaactaggcagagaccagagcctgagccataaaagccattctgcaaatgcagttttcttagtgctgaatgagctgttcaggctcccgcttggtttcccctttaaggtgggaagctcattctcccacaccatttttcagccccaaaggaaagttgctttcctagtcagacaccttggggtggcctctgcctgccctgcaaggacatctcaagtctgttccttccttccttcctccctcccccccacccttttttgtttttgtttttgagacagagtctccttctgtcacccaggctggagtacagtcacctgatctcagttcactgcaacctctgcctcctgagttcaagcaattctcctgcctcagcctcccgagtagctgggattacaggtgtgcaccatcacgtccggctaatttttgtattttcagtagagacggggtttcaccatgttttgaccaggctggtcccaaactcctgacctcaggtgatctgcctgcctcagcctctcaaagtgctaggattacaggcatgagccactgcacccagcccagttctttagaagagaggcctccagacctaggaagaagagggcccagactggggtgggggcagcagctcagggcagccctcgttagagacgaggtctcactatgttgcccaggctggtctcgaactcctgagctcaagcgatcctccagcctcggcctctcaaagtgctgggatgacaggcatgagcccagcccctttctgtgactcttatgttacctgtttattatatgaccaggtctaggtgctcctctagggctggcccatccatcctgaagcctcagtctgacccagcataagagtgactattcatcccagcagggaaactgagacacagactctgttttcccagctgcagcaaagagtggcagggcctttgcccacgaacctaatggcaggcaccccagaggacagctgctgatattgactaaatccttcatgtttctccctctactagaagccctgcaagcatcggcccattttccaggtgagaaaactgaggcccacactgaggaagccagtgcctcagtgtagacttggctagtccagcttcaggttggggctgctcaaggccagccctgtcccagcccctcccagagaccggagagggtgttcaggaaagcaactcaacccttcactgtctctttcactgttgctttctgcccacacaaagggcaaagtctgcctgggcccctcgcccagccgcccctgtaaaatagccacagggccccacttgtgcacttggcaaactctaagcagcttccagaagccttggccatgccagcacctttcccagatacttttttattttttccattattttgttggtaataaggaaaagtcattttttgcacagaacagacggtattttctttgctccccacaatgttcaagcatttcgtggcttccggcctgagaacagagccaaatccttcccttgtgcagatgcctcgtgaagttagaagcagccagggaaaccgagtctgtgcctcagtttcccctgtgggatgaacagtcgctcttgtgctgggtcagactggggcttcaggatggatgggccagccctagaggagcacccagacctggtcatgtaataaacaggtaacataagagtcacagaaagggtctgggctcacacctgtcatcccagcactttgggaggccgaggtgggaggatcacttgagcttaggagtttgagaccagcctgggcaacatagtgagacctcgtctctaaaaataaactttaaaaaagaaaaaaaaaagagtcacagggattgggacaggggagggcaagatcccttccaaggccagggtagtcagagaggcttcctggaggaggagacagggtggtggcgctgagcctggaaggacaaggcagaagagatgcctgcagcgagggcattccaggtggaaggaacagtttgggcaaaggcctggatgggggaagactcagatcttggcgcaggagtcaatctccaaaaacaacctgacctggaattcacctaaaggtaatttgaatgtaatgtaaccgccagctcagatatactattcttcttagaaggaaacagaaataaaggaacagggaaaggagacaggagcagaggtcttggagatgaaaagcaaaagcctctctgaagttgtcaaaacactcaagtgtcggccaggtgtggtggctcacgtctgtaatcccaggactttgggaagccgaggggggcagatcacttgaggtcaggagttcgagaccagactggccaacatggtgaaaccccatctctactaaaaatacaaaaatcagccaggtgtggtggcatgcacctgtagtcccaactactcgggaggctgaggcaggagaattgcttgaatctgggaggcagaggctgcagtaagccgagattgtgccactgcactccagcctgggcaacagagtgagactttgtctcaaaaaaaagaaaagaaaagaaaagaaaaactcaaatgtaagatcagagctttagggcgccacaggccttggttccagggagctgcaggacctctgtccacaaacgaaccaacggcgccgcaccgtgtgattttggagacggtgccagagagggggcggcaccaggattgacaagtgggacacatgggcttggggctggggaggtggatcctagttcaactccggaaggatgctctcctggcaagtgtgggaagggggtgctccctgtgaccagaggtgacaaacgcaggccagtggaggctgaggggatgcaaccatgcgttggagacatttcctcagcctttggattttggaaccctcaaacaacagcaaagataaccttaatccaaccattgtgggcatttttaccatcgtcttgggagggacagaggtggacagacgtccctgcttagggatgggacgggcaggggaacagaggcttctctctctttgtcttgcttcccgttccctcccgaagttgatctcttccgtttcctggcaacacccattgagcacttactgtatgcagaccctgagacccactgccccctccccaacctcactgggccacccatgtcagcccgggagggacctgacctccctcacaggcccaaagttatgacctcaggtagtggggacagaggcagctgtctcctgagaaggtgacaggagggtgaggtcacatcgctgtccgtgcaactctctccatctgcttcctatctctccgcctgtctcccccgtgtctctgtttctgggtctctttctcatcccagatgtccctctccgtctgtctctctgtccccaccctctgctcccaacccgaccccacgcaacccccccccccactccccctccaccgcccctaaccccctccctcaatcctccgtcccttccccagtcccggcccccgcccctcccccttatcccctcccccataccctctcccagtgcaaaaagccggcagggggcgcagcggggcggccttggcggcccggggaggcggggcgggcggcggccgcgtcgggaccggccgcgatgggaccggaggcggcgcgggcggcggcggcgcagacaaaggcacgggcggcgtggagggcggcgcggagggcgcgggcccgggagccagggagcgagcggggcgcccggcagcgcggagtcagcgccgcgggggccgcacccgactcgcgcctggacactcgcggggcgccgacctggcagggtgagcccggcctgccgagcctgcgctgggagcgcgggggcctcgaagtcccagggccaaggggagggcgtgggggttccccagaagtttcggacccgggactgggagcggcgcgaggggtccccaagttccagggctggagggagcgcgggggtcccgaagttctggattcagggtctgagaggggactgcgtgggaggttcccaaagttctggacccggcgttggaggaggctgcgaagaggtccccaaagctgcggacctggggtggggtactggggtgggaggggtccggacgtcccggacccagggactggaggggtggcagggggtcctcgaagtttaggagtctaggacaacgcggaggaccggggtcccggacccagttagaggaggagtcacgaagggagtccccggagttaccgacctggggttggaggaggcagaagaggtgtcccccgaagttctggacccagagacagggggcgtcgcgggaatctcggaagttccagggtcagagcccgcgtcccggagttggggcgtgcactgggtgtcctgcctcgggtggggatgggatcctgaattaatattaacccccccgtcccccgcactcgggtgcatgggatggggcctcatccaccggccagattggggatcccgggcaccgggcggtgtcggacccccctccgggagccccgtggccggcggcatccgaggcgcatgactagttggtgagtaactttccccaaacgctgcaagtcgcagcaggagctgccggaccggaagggcctgggttccggggacccctgtgttccccaactcccacccggcgcaggacccgcccccagtccaggccagagctgccgccccacccccactcaggggctccggtttcagaccctgtgaccaggacagcagctgcccaggacaggatagggggggcatcccccctttgaccacagaggccgctgggccagggcctcccctcccccacctgtcttccccctcctccaaactcctccttggtcccctgcagattcggggttgctgaatggcccaatggggaggttggggagccctggtctcccagtgtggattctgctctgccctcatggtgggcattgggattggctgtttgtctacatcttgtctttttaacttggctgggggctccctggggatttggactctggacttcaaggtgtgcttctgccctagggtgggagctgctgggggtggggtccctctgcagggtgtagtggggaactggtctcctggtactacacacctctcaacgccccattttttggtggagagccccgctctggccagtcatgggtgaatgtggtggaaagaactcagcagagatttggcctccacagctcagcctgggatggaggggacttcacgggggtgcaataaccaggacaatgagaaatttacatctggatgtcagcggccaccaggctcctctcagagggccatctcctgtacagggtgttgtgggggcttcccctagacaaagaaagatggggtctgcttgctctgagttatctataataattatcttacctttttgtttctttttataatttctttcttttttgagacagggtctcactctcttgtccaggctggagtgcagtggcctgaccatagctcactgcactgcagccttgacctcctgggctcaagtgatcctcccacctcagcctccccagtagctgggacggcaggcacatgccaccacacccagctaattgtttaaatttttggtagagatggggtctcgccatgttgctcaggatggtctcgaactcctgggctcaaaggatcctcctgactcagcctcccaaagcaccaggtgtactttgggcctctcctgcctttttgattgaaagttccatgacgggcacacctggtgatgggtcctgagatggaacctgcttggcctccctcagcctggcctgagggacactcatagtccctcctctctccctaggggccaaaccagtgctcctgccacctctctggctgccccctagagcctgcccatcccagcctgaccaatgtccacagccaggtgagctcccacctcccccagcctggccctgagctttctaagtgggggtgcctggcccccaccaaacaccctctccccacgcagggagcagccaatcttcagcacacgggcgcacgtgttccaaattgacccagccaccaagcgaaactggatcccagcgggcaagcacgcactcactgtctcctatttctacgatgccacccgcaatgtgtaccgcatcatcagcatcggaggcgccaaggtcagggtggggtctgggtggggcagaggcaccaggagtcctggtgacaaccttgggtctggtggctggcttgctgtgtgcccaagggacaggaaaccctaagccttcccaggccctagtctctatctcctgaaagggttcagagtaaagaccttcaagaccctaatacaaggtaatacctggggggtttcatgtttgttagtatctgtcccatctaccttgaactttgttccccgaccctaggccatcatcaacagcactgtcactcccaacatgaccttcaccaaaacttcccagaagttcgggcagtgggccgacagtcgcgccaacacagtctacggcctgggctttgcctctgaacagcatctgacacaggtgggccgggtgagggggagagtggagggaaccgatgagactgggcccaagtcttctcctgggctcactctgggatcttgggcaggtcccctatcttcccatctgcaggatgggattgtaggatgagttgagactgaagcccctttaagcttccccggtttgattcctagttcatttttctgttttttttttgagataggctgcagtgatcttggctcacgcaacctccgcctcccgggttcaagcgattctcctgcctcagcctcctgagtagctgggactacaggagtccgccaccacgcccagctaattttttgtattttattagagacagggtttcaccatgttggccaggctggtctcgaactcctgacctgaaatgatctgcctgcctcggcctcccaaagtgctgcaattacaggcatgagccactgtacctgctcttgagtcctagttctactgcctgtagctctaattttggacacaccctgctcctctttgggacatcaaatgggtggctgggctgggctgggcactttcccacatgccccagcaataccttcatcctcacctccctgcaccctgtgccgtctctatacttccattattatctttatccgtggttttgttgatgatgagtgctttcacgaagatcttcttcttttttttttttttttttttggagataatgccttgctctgtcccccaggctggagtgcagtggcacgatctcggctcactgcaacctccacctcccgggttcaagcgattctcctgcctcagcctctggagtagctgggattacaggtgcccaccacctcgcccagctaatttttgtatttttagtggagatgggattttgttggccagggtggtcttgaactcctgacctcagatgatccacctgcctcggcctcccaaagtgctgggattacaggcatgagctaccacaccaggctttctttgttttcttctagaaggtttagaatttacctttcttctttttttttccctccctccctcccttctttttttttttttttttaacaagatcttgctctgctgtccaggctggagtgaagcagtgcaatcatggctcactgcagcctcaaactcctgggcacaagggatcctcccacctcagcctcctgactagctgagactataggcgtatgccaccatgcctagctaatatctttaatcttattttttttagagataggatctcactatgttgtccaggctgttcttgactcctggcctcaagcgagcctctcactttggcctcctaaagtgctgggattacaggcttgagccactgcacccagacaatttacttttttttttttttttgagacggagtctcgctctgtcgcacaggctggagtgcagtggcgcgatcttggctcactgcaagctctgcctcccaggttcacaccattcttctgattcttctgcctcagcctccctagtagctgggactacaggcgcctgccaccacgccctgctaattttttttgtatttttaatagagacgggggtttcaccgtgttagccaggatggtctcgatctcctgacctcgtgatccacccaccttggcctcccaaagtgctgggattacaggtgtgagccaccgcgcccggccccaacaatttacctttctaatttaggtcttttttttttttttggagacagagtctagctctgttgccaggctggagtgcagtggcccgatctcggctcactgcaacctcttctctccaggttcaagcaattctcctgcctcagcttcccaagtagttgggattacagacacaccacacctggctaatttttgtatttttacaaaatttttgtttttttaatttttgtattcttagcagagacagggtttcactatgttggccaggctggtctcaaactcctgacttcaggtaatccgcctgcctcaggctcccaaagtgatgggattacaggtgtgagccactgcacccagcctaaaaaatcatttatttatttatttatttatttatttttttgagacagagtttcactcttgtcccccaggctggagtgcaatggtgcgatctcggctcaccgcaacttccgcctccccggttcaagcaattctccttcctcagcctcccaagtagctgggattacagtcatgtgccaccatgcctggctgattttgtatttttagtagacatggggtttcaccatgttggtcagcctgctcttgaactcctgacctcatgatccacctgcctcggcctcccaaagtgctgggattacaagcgtgagccaccacacatggccttatctatttattttgagacagagttttgctctgtcacccaggctggagtgcaatggcacaatctcagctcactgcaacctccacctcctgggctcaagcaattctcctgcctcagcctcccaagtactaggattacaggcgcccaccaccatgcctggctaatttttgtgtttttagtagagatggggtttcaccatgttggccaggctggtttcgaactcctgacctcaaatgatccgcccgccttggtctcccaaagtgctgggattacaggtgtgagccaccgcacccggcctaaaaaattatttttaaactaaggaaatttattttaaaaccggggtggtggggggaaacatatcctatcctaactggaaaactggtattgctttgtcataaataggtggtaaatgtaaacatgtaaacatttaatacaacaaaaacaagaatgagatgattactttctcattgacttctgatgtctctcagagcctgagacctaatctctttgttataaaggaataataacaggtgttaaagacagattagcacccacctgaggctctctttgttgaaatagccctgataaagattaaaagggaccccacatgttggctcatacctgtcattctcacactttgggaggccgaggtgggtggatcacggggtcaggagttcgagaccagcatggccaatatggtgaaaccccatctgtactaaatacaaaaattagctgggcgtggtggcacgggcctgtagtcctagctactcgggaggttgaggcagaagactcgcttgaacctgggaggcagaggttgcagtgagctgagatggtgccactgcactccagccagggtgacaaagcgagattctgtccccccccaaaaaaaaaaaaaaaaaaggctgggtgctgtgcctgtaatcccaccactttgggaggctgaggcaggcggatcacttcaagccgggaatttaagatcagcctggccaacatggtaaaaccacatctctactaaaaatatgaaaattagccaggcatgctggtgcatgcctgtaatcccagctactcatgaggctgaagcagaggctgccgtgagccaagatcatgtcactgcactccagcctgggcaacagagcaagactccatctcaaaaaaaaaaaaaacaaaaaacaggaaaagggccattctggggaacatggctagaccccgtctctagaaaaaattagccgggcatgatggcacacacctgtagtcccagctccttggtggaggggtaaggtggaagggtcacttgagccagggaggtcaaggctgcagtgagccgagatcatgccactgtactgcagcctgggtgacaaagtgagaccctttcctaaaaagaggacatgggaattcctttccctttctcaatgtggcccaatgtatttaaatgccacctctgtgatctgatgccacctgcccacccaccatggtacatcatttttcaaagtttctctccttcttccaaggtgtgtgataaggggatgggtacggttcgaaagtggcggggctgtcactgagtgatggtgacctgtttgggaggatgggctggggttttactgtcttttcctccccactcccttagtttgccgagaagttccaggaagtgaaggaagcagccaggctggccagggagaaatctcaggatggcggggagctcaccagtccagccctggggctcgcctcccaccaggtcagcactccctactcccctatgcctgcctgggcacctgtgagtcagccaggcgctcaactgatattgggggaccttgatattgggagaccggggcactctgctggtcgtcaagacccaatgcttccagatgacctaaggttagacccacagcagggaccacagaggagtggtgtggagtgtgtcatagagggtctggaccttgcctggggccggtggggtacacccagtaggtcccagtagcaaaaccagctcagatggcaggatggaagactagaaattgaaatggctaagtgtggccgggtgcggtggctcacgcctgtaatcccagcaatttgggaggctgaggagggaggatgacttgaggccaagagttcgagaccagcctggccaacatggtgatactccacctctgctaaaaaatacaaaaattagccaggcgtggtggcatgcgcctgtagtcccagctactcgggaggctgaggcaggagaatcgcttgaacccaggagatggaggttgcagtgagccgagatcgtgccactgcactccagcctgggtgacagagtgtgactctgtctcaaaaaaaaaaagaaagaaagaaatggctaagtgtgaggcagaacaacgaactgtccctgcgtgttttcccacattaatttattcagcattatttattgagcacctgctgtgtaccaggccgagggctgtgcacaggggttggagagatgaaaaaaagcatgagcctccagctgctgcctgcactgggctgcggtggcgctggcctctcgcagggcacccgccagcttgtctaccctcagagccagtggtccaggcagtggggttgctcacgaaacacgaattcggcctgggcagggcttcctgctgaaatcctaaacgtgatgttgaagttcggcctcagggaagggaacagcagggaggtgtccgattgtacccctcccctaccttacaggttctaagtatcttggtttagactaacctgcatcagacttgctcctgggggtggtgaaagcccaggaaggcaaggtcgagggcgtgggcatggaactcccagcttaggggccacagggagccatggagggtgggtgaggtggggagggacacacttggatcctgtgctgtgaaggacctgcttagggtgcataggtcaattgcacccccgatgtgacgaccccagtcacatcagccttgatcccagctgatgtggggtcgtgacctattcttttccccgtgcctaggtgcccccgagccctctcgtcagtgccaacggccccggcgaggaaaaactgttccgcagccagagcgctgatgcccccggccccacagagcgcgagcggctaaagaagatgttgtctgaggggtgaggggcgggacttgggggcgtggcaggggcgggggtaggggtgggggacgaggaggcggttcttggaagccaagggagtgccaggacggcgggatctaactgtggactcaagacctggggaaggggatgaggatctgaatgctgccccatccagagccgaccccgcccctaccctgcgttggccacgcccctctgttttgaccccatccctgtctcttctcgctgctaacctcgccccgtcgatgcctctctggtcttaggataaccaccctgaccacgcccccatcggctgactctccccaacctcccatccctccctcaacattcccacagtgtcactgggcggactccacgtgcccccttctttgactcggtcctcgacaagaccccgcttctgcgggactgccccatccccaagctcagcaatcagtgtcgccacatccccagccctgcgtggccctgactccgtgccctagcccaaagccacccctcctctggccccgccccctagcccagcatcgcccgtgactccgcctcagcccagcgccacccaccctggccccgccccctaaccgagcattgccgctgactccgcccccagcccagtgccactccacccctgccccgccccctagtccaacttcgcgcacgactccgcaccctcgccagccttcgccctgacctaagcccagagctatcccacccctggccccgccccctagcccagcatcgcccgactccgccccccagccccgtgtcacccactgccgaccctcgtgtctctgcagctccgtgggcgaggtacagtgggaggccgagtttttcgcactgcaggacagcaacaacaagctggcaggcgccctgcgagaggccaacgccgccgcagcccagtggaggcagcagctggaggctcagcgtgcagaggccgagcggctgcggcagcgggtgagggcacccctccctccgagagacccccacctggcccgggcaactgtggagaccgcgcctcggcagttcccatctgccctgggttcatggactagctgtgtgacctcagcaggtcactgacccagcctcagtttcttgctctgtaaaatgggtttgagacaatgccagcctcagagggtgatcagacactaaagtccaagctgtgcagaggggggtggtggcaccaaccaagggagatgggtgctcggtcctgggcgtggccagacaggaggcagattccctagaggttgggcgagcaagggagagtgcaggcgggggcgtcaggggctgctattcctgccctacaggtggctgagctggaggctcaggcagcttcagaggtgacccccaccggtgagaaggaggggctgggccagggccagtcgctggaacagctggaagctctggtgcaaaccaaggaccaggtgagtgccaagtgtggttcctgggcctcgccttccctcacctcctgtgggaaagccaggacccccgcaacagaccctgggaactcttctcctctaggagattcagaccctgaagagtcagactggggggccccgcgaggccctggaggctgccgagcgtgaggagactcagcagaaggtgcaggtgtgtgtgggcacaaggaggtggggtgacggtgggtgacagtcacctcaacagacactcaggacaatatctacctaagatgataaagtattgggaggcccagtcctgtggaaggcctgatgcccagcaggtgccgcgtgaacagtggctgttggtacagtttcatatccatctatgggttcaacaagcaatgcttgagttcctgctgtattcccatgccagaccccgtcaattcctcctgttctcagcctgagatcacagagcctgcattggaactaggtctggcttggcttggctttatttttttttaattctttgagatggagtctcgctctgttgcccaggctggagtgcaatggcacgatctcagctcactgcaacctccacctcccgggttgaagcaattctcctgcctcagcctcctgagtagctgggattacaggcgcccgccactacacccagctaattttttgtatttttagtagagacagggtttcaccatgttggccaggctggtctcaactcctgatctcatgatttgcccgcctcggcctcccaaagtgctgggattacagacatgcgccaccgtgcccgggcattttttgtgtttttagtagagatggggtttcctcatgttggccagactggtctcgaactcctgaccgtgagcaatctgccctcagcctcccaaagtgctgggattataggcttgagtcaccacgactggccttggcttggcttttgctaaaggctttatctgagaaatgttcagggggtacttttttttttttttgagacggagtctcactctgttgcccaggctggagtgcagtggcgcaagctccgcctcccaggttcactccattctcctgcctcagcctcccgagtagctggaactacaggtgctcgccaccatgcccggctaattttttgtattttttggtagagacggggtttcaccatgttagccaggatagtctcgatctcttgaccttatgatccactcgcctcggcctcccaaagtgctgggattataggcgtaaaccactgcgcccagccttttttttttttttttgagatggagtctcactctgtcacccaggctggagtgcagtggcgcgatctcggctcactgcaagctccgccttctgagctcaagcgattctcctgcctcagcctccagagtagctgggactacaggtgtgcaccaccatgcccagctaatttttgtatttttagtagagatggagttttaccatgttggccaagctggtcttgaactcctgacctcaggggatccacctgcctccgcctcccaaagttctgggattacaggtgtaagccatcactgggcgtggtggtgtatgcctgtaatcccagctacttgggaggctgaggcaggagaattgcttgaacctgggaggcggaggttgtagtgagccgagatcacgccattgcactccagcctgggcgacaagagcgaaactccttctcaaaaacaaacaaacaaacaaaagaaatgagggcagaagctaggcccctgtggggtgtgcattttattcctggtgtgttgggcgccctaggatggctctgggcagaagagggacatgaaggtggtcagactctggatgcctcgggcaggactggtgatttgttggggcccccaaccctgcccaccctttcctggcaggacctggagacccgcaatgcggagttggagcaccagctgcgggcgatggagcgcagcctggaggaggcacgggcagagcgggagcgggcgcgggctgaggtgggccgggcagcgcagctgctggacgtcaggctgtttgagctgagtgagctgcgtgagggcctggcccgcctggctgaggctgcgccctgagccggggctggttttctatgaacgattccggcctgggatgcgggccaggctgcaggcggcatagttgggcccattcgtcctggaaagggactggggggtcccaacttagccctgggtgggccgggccgggctgggctggggtgggccccagtcggctctggttgttggcagctttggggctgtttttgagcttctcattgtgtagaatttctagatcccccgattacatttctaagcgtggctgtgtgtgtgtggtatgtgggtatctgggcacttaacatgtcgccggcgcctttccctgcgtctttttgggtgcccctgaatccatgtagcagttataagccgcttgcagatgaggggtgaggcttggagtccgaggggggtccaggccacacagccaggaagctggctctggtgtctctctgcctgtccccttgggcttagcccacattgtctggccaaatttggactttcatggccccttcactctggccacaaaccccagatgtggccaggtgggtggccagggaagcttatagctgcacccattcggcacaggactgacctcaccaaagcctcacagctgcctctggagagcagggcagttgctatgcccattctccagatgaggaaactggaagcccagagaaggggcttcagggcccaaaatcccatggccattcgagcagctggtgtctgcaaaactttgggcctgcctggtggaaatggacatggtgttctgggcagacacctgagaaacaacagcggctgcaccccacctctcctgtccccctgctcttcgaaagtcagactgaggaagtcaaaagacccgtttattaagcacctcctgtatgcggcacccctggggggtgaccttgggttggggtcacaacctcccggtcatgttctttcttcccctgcagcctgaatcttggccagggctcagggaagggaccagccagtggtttcggggcagaggagcagggcccgcacaacacgagcgcccacgggttctgctgtggggcactgggtaggcccccgggaagggctgctgcccccaaggaaggttcctccgaccctcagctccatggacgagtcaaggactgggcagatggccgtgtggggctcagaccaggccctgggaggggactgggcctgagtgggacccagacggtgtcctgggtggacgccccttgtggccagccctgccagccttctgtcgcttcagcgtctcctccaccttctccttgaagcgccggttcttctgcttgatcttggccagctcagccttgcgcttggcctccaggtcagggtcctggcacagggaggaccaggggatggctgagctggcggcccccgccagggaacctggccacccaccccctacctgcgggctcggccctcaccttcccctccaggatcagctgcttccgtttgttgatctccttcttttcgtcaaagtgggccgcctccagtttctggtggagggaagtggggtaaggagatgctggtcacgggggccccacctggaagggagcacccccggccctggagagcactttagttcctgcccgcctctgacactcacgatctcacactctcttcgcaccacgttgacctgtgtgaggatctgtagcacctcggcctcttccacggagaactcctccagcttcttctctgtggggacagcaaagccgggggtgggggtggggaggagacgtgacatggagagggagttcagccaagtagtgagttccccatgctgtggggtatgcaaggccatctggggccatatcaggtaagggtcagctgagcaagatcagggatttctgaggtaaggaaggtatggaccgctgtctttcagagtctcacggtcacccaagctggagtgcagtggcactatctcggctcactgcaacatccgcctcccgggttcaagtaattctcatgcctcagcctccccccgccattttttttcggtgttagcagcattatgagtttaaccatgaatattaatttcttgcaaacagtgtcctttaaagtccagatatttctttctttttttttgaagacagggtcttactctgtcgcccatgctggagcgtggtggctcaatcaggtcactgtagcctccgctcaagcaatcttccaacctcagcctcttgagtagttggaactacgggcgtgtgctgctagtttctatattttttggagaggcagggtttctccacattgcccaggctgatctcaaactcctgggctcaagtgatccacccaccttggcctcccaaagtgctgggattacaggtgtgagccaccgtgcccggccttaaagtccagatgtttctctttttttttttttttttttttttgagacagagtctcactgtcacccaggctggagcgtaatggcgcgaccttggctcactgcaacctttgcctcccgggttcaagtaattctcatgcctcaccctcccaagtagctgcaattacaggcgtgcgccaccacacctggctaatttttgtatttttagtagagacggggtttcaccatgttgcccaggttggtcttgaactcctgggctcaagtgatccgcccacctcggcctctcaaagtgctaggattacaagtgtgagccactgtgcctggccaagtccagatgtttctaaatttcaggacagtctatgcagtgatcagagataccttaggaagtgtctctgtcttggctgcatatgaaaccattcccaggggtttttagcaggccaggccctgtcaatggggcctctgacatctcagggaccttccatacatctcagtctaagaaacccaagtcccctcctgactgatgtggctttcagctgctggcgacaactatggggagtttgtttcaataaatgggcaaaagaacttcttttgggggtgcctagggaaggaagccccagcctaaatctgctcacgggagcaggccggctggtgtctgacgggaaaatgggtctcaccccgaggtgcccacctctgcccaccccacccctccttctctaccacccaccccaaccccactcactgatctgctcctcgatggcgtgcaccaggtggatgtcgtactgtgtcaccagcgtgatggcctgaccctgccgccctgtggggatgtgccggttatctgctatgtgctgggcgtcaggacatggggcgaataaaggtagatcctgacagctacacagctcaggggtcctggagatgctgaacaagggcttgggcttgggagggatcagcccagagtgtctgggcttgaccccaagcaggaccactgtgtggaggacgggtcgctggggagaggcaggtctgccagtctggccttacacagcagttagttactgcccgatttccctttttggcttggctgccagggaacccagtctaagtaatgccagccattagccctgacgggcctcagcccaagatctctgcttgctgttttctgtgacgttgactagggccgaaactgcactgatggtggacaaggtccgtgaccctcatggcagccccacgaggacgtcaccattctcattatccaccatgtgaggtctagggagtggaagtgacctgcccagcaccacagggtcaggatagaaggtccaggcccagtccgaccccagcaaccacatctttcctggcttcagaactgacagcatctcatggacaccatgcccctccctgacgaggcagcagcaagtagtgggggccggagctgtgtgtgcaccctcccagggggcagccccacactgctcagttcatcacctggcttgggtgaaggcagcacctgacttgcatttgctttattttacaattttattttatttacttattttagtttattattattttttgagacagagtcttacactgttgctcaggctggagtgcaattgtgcgatctccactcattgcaacctccgcttcccgggttcaagcaattctcctgcctcagcctcccgagtagctgggattacaggcaccctccaccacgcctggctaatttttttgtatttttagtaagacagtgtttcactatgttggccaggctggtctcgaactcctgacctcgtgatccacccacctcggcctcccaaagtgctaagattacaggcgtgagccaccgcacctggcctattttattttatttttttggagacagagttttgctctttttgcccaggctggggtgcaatggtgcattctcagcttgccgcaacctcccgggttcaagtgatcttcttgcctcagcctcccgagtagctgggattcacctttgctttagaaaggacaactccccaacttgcaaacatggccctgagtagctctcatctgtgggctgcaccctacccacgtcctaccacctgaatttgctgggcaggctggagggacagaggcccaaggctcggcctccccctccactgctcacctgcacgggccgtccggccgactcggtggatgtagatcttggggagcccgggggtgttgtggttgatgaccacctgtaccgtagggatgtccaggcccctggaggcagaggtggctggtcagctccactgtccatgtggggaaaccgaggcaaggactcacccagggtcactcagcagggatgctagggctgcctgacatgcctgaggccagccttctcatctgtggggccttgtagtaaaagagggagtgcccttggcaggagactgggggctgctcaccgggaggccacgtctgttgcgatcaggatccggtagatgctggacttgaacttggctagggcggcaaagcgttctttctgcacagggttgggaagaaaattgggaatgcatgaaggcagggttttctgtgtgaggcctcgggacagggtggaggccgggacagtccccagccgtccattgaggaaggtggccatgagaagtcagaccgggacaaatgaatgacggctaaaagagatgcggtcagggagggcctcttgagctgcgatattctgggaccagaagagaccaggtggcaggaagaaggcgcccggcagaaggaaggatcggggccaatgtctgaggcggggaaggtatcccagggtgaggctggcgggccccagggtggcctcacctgcttcatcatggagtgcagagccacggtggggaagctgaatttgcgcagcatcatgcacagaatctggcaggtcctggcgggaaggatgtgcctgtcaacccctccagctctcaggttctgggaaggtgttcctgcccccacccgcccctgagacacctagcacagtggcctcatgcagcttagaaaggagaggcagcaggccaggcacggtggctcatgcctgtaatcccagcactttgggagactgaggcgggtggatcacttgaggccaggagttcaagaccagcctgcccaacatggcaaaaccccatctgtactaaaaacacaaaaattagccgggcatgatggtgtatgactgtagcctcagctactcaggaggctgaggcaggagaattgtttgaacccaggagacagaggttgcagtgagccgagattgcgccattgcactccagcctgggggacagcgtgagactctcaaaaaaaaaaaaaaaaaaaagaggcaggatgagggttgacagacggcttgcctgcctgatgtcctctctgctgatccctccctggagctggaactgacaagagttggccctgggactgcagggctggaaggctggaaactgacttgctaggggtggtcactgttaccaagaaggccaagaaggagccagcagaggaaaacagaggagaaagaggggcacagggagaaaggatggggaccatcacataagctgctggatcctgccacgcctgacagccaccctgcagccaaacttttctctctttttccctgagacagtctcactttgtcccccaggatggagtgcagtggcgtgatctcggctcactgtaacctccacctaccgggttcaagtgattctcccgcctcaccttccccagtagctgggactacaggtgctcgccaccatgcctggctaatttttgtatttttagtcgagatgaagtttcaccacgttgggcaggctggtctcgaactcctgacctcaggtgatccgcctacctcggcctcccaaagtgctgggattacaggtgtgagtcactgcacccagtcccaacttttctcttctgggaggtaacgcatttaaagcgccttgatttctgcccttctatcctggctcatgctggaagagcctccagcttctcaatgaccttcccaaacaattcaatgaagatatgaactgccctccccaggggtctctgtctgtgcagacgcacaccaggcctgttagttgtcacaacttcctctgagatgggactaaaggcccaggaaagctcagtgacacccccagaacacagcaaatgggctgctcaaacagctgcttgcaggggtttcctggcccttccatcaacggctgggctgaggaaccccaaaggccggctgcaccttcagattgagggaccttggctccttgagggaagcccccatgacctccaggctgagcagaggctggggagtgctgagactggctgtgtgtcccagaccaaagacgtcgggccacctcctcctttgaagggcggtgggaggggagaggcgggccccgctcacttgcacgtgttggtgaagatgataatggaccagtcctcgtgctcatcctggaagcgctggatcaggtggaccaggtaggcgtccttgaccttctcaggcaccagcaggtagcgctggtccagctgctccacggtgctcaccctggggatggacagatagaccgccacgcctcagtgtccctgtctgtaggatggggctgccctccccacgctgtctgggctgtggactcacggggcctgtgcttcccagaagaagggctggttggtggccagaccctgcagctcccggagtgtgtcggtcagcgtggcgctgaacagcagtgtctgcctgcgggccggcacagccgccaggatggcctccaggtccacggtgaagtcagtgcagccctgttccagcagccggtctgcctcatccatcacctgccgtgccaatgggggcaggggtgagggtgccgtccatggccccgggtcttggccacccctgaagcaggcctctttgagaggcatggacatggaccctaggccctggagtaccctccttccaagggaggcctgcccctcacccaagtctcagcaaggccctacccccgaataacattgctaggactgggccccctcttgttggtccttgaacggtccttgtcactgttcctagcgttttactggacagtctaacggacatacgtttcctaaatggatgagatggtgccccaggctctgacattgggcctggaggctccgagcccagctcctgaggtctgcaggggcggggcgaactcaccaggaagcggatcttctttatactaaaagtgttggagctgcgcaggtgatctgccaggcgccccggcgtggcgatgaccacgtgtggtttccgagagagctccagcgcctgggccaccatgtctgggggacagagcatgagaggcagggctgggcaggtggtccaaagctgctagggtcccatgctggggcttcccccgcctcccagctcccgtacccatgccaccgacgatgatgcagtctttcagccctagaggcttccccaggacccggaactgctctgcgatctggtaggccagctccctgtgggtgtgaaggggccaggctgggtcaggtagtggttctggacctgccccccattcccctctccatccccagggttcctccctgagcccccaggctcctgacttgcccagtcctgttcacaaaggctctgatgctgagccttggaggccattgtggcccctgccccctcgccaggctcagcctggaacatccctccttcaccagcccgacccaagctgacctcagcatctcttcctatcccaaacctgtgccttcccccagttcgcctttcagcaatggcctcaccaccagccagttgccccagccagagggtctcaagcatcagcctcctttctgcccccaaccaactctgtcctggcctctccctggctcatgacctttcctgctcacacacccccagaatcaattctaaccctccgcctggcattcaaggcctttctcaaactggctccaatatgcccaggtcccagtaccctttctgctgcctgcctctttctttctttcttttttttttttttgagacagagttttgctcttgttgcccaggctggagtgcaatggcacgatcttggctcaccgcaacctccgcctcctgggttcaagcgattctcctgcctcggcctcccgagtagctgggattacggcatgcgctaccatgcccagctaattttttgtatttttagtagagacggggtttctccatgttggtcaggctggtctcaaactcctggcctcaagtgatccgctcacctggagctcccaaagtgctgggattacaggtgtgagccactgcaccggggccatcttgtttaattctgcaggacccctaagaagcgggtagcaagattttcatgctcatctcacacgtgggaaaagggcgctcagagagggaaaggtgcttgcccaagagagcacagctggttaacccatacccaggaggcctgctgggggcttacctggtgggtgtcaggacgaggcagaagatgccatagggatcctcagacagcttctgcaagatgggaaggacaaacgctgctgtcttcccactgcctgtcttagcacagcccaagcagtctcgacctgggttggggacaaagcagcatcaacaccctccatgtgtggacagctgggtttcagagaccttgcccaggacacactgccagtgagtggcaggctggactggaacccatatccatttgacccgagatgcccacagcttcctaccacctcgttctaactccgtccaggagcacgtgaatttggggaatccagaattcccttccctcatatgcatcttgtgctccctgttgaccccttcatttgtttatttaatccctgacttatcacatcttaggcttcctgtgggcctctctttaatggcgaaactgggttgggctagaggagcagagagaagaccttctcctagaggagcaatcacaggaccaaggagtcctggatctaccagcaattttgacagcctcaacttctatttgtaaaataaagatagcagtaccaggtctgcaggattttgcgatactatcggactagtcatccatcaaaccctccctgtgctgagactatgaaaatttcagagattacatcacttgcgtacgaacacaaagcgagtcagtcatgcaacctaaatgccaacactgtccagtcgtcctccggaaccccggatctcctgtaacgcccgaggttgcccctcgcctcgtgggaccggaataagcaaaggttgcgagaagggaaaggagtcgagaggagcggagaggcctcttggggaaggccctgggccatactcaccctccaggatggcggggatgcagccgagctgcacgggcgtgggctgcttcaaacccagctgccgacattgttccacgagccacgatgacagcccgagctccgcgaagcctgccatccttgtggccgcttgtaggggccccttgtaggggcccgtgtgatccgcgcttccggcgcgcgccgacgacgtcacgagaaaaatcttcctgtttattggatctgcctcctgcgtggtcccaccctctccagctccctcagcctattcccagcctcgaccgcatccttatcatgtttccccggatcccattggcttgcagaaacacactacaattcccgagatgctctccgtgacgcacttacgccttccgcccccttgcatattattgtggagcttcccattggcttacttcgccgccgctcggaaaaagtaaactacatttcctagcgtgcccgtgtcttgcttccggctgacgtgtctttcaggaagaggagctggtgagaagacagcgaaatggcgcctccggcccccggcccggcctccggcggctccggggaggtagacgagctgttcgacgtaaagaacgccttctacatcggcagctaccagcagtgcataaacgaggcgcagcgggtgaaggtgcggccgcgcagggg

SEQ ID NO: 713 - DNA, 1461 bp, Homo sapiens
cgcccggcagcgcggagtcagcgccgcgggggccgcacccgactcgcgcctggacactcgcggggcgccgacctggcagggggccaaaccagtgctcctgccacctctctggctgccccctagagcctgcccatcccagcctgaccaatgtccacagccagggagcagccaatcttcagcacacgggcgcacgtgttccaaattgacccagccaccaagcgaaactggatcccagcgggcaagcacgcactcactgtctcctatttctacgatgccacccgcaatgtgtaccgcatcatcagcatcggaggcgccaaggccatcatcaacagcactgtcactcccaacatgaccttcaccaaaacttcccagaagttcgggcagtgggccgacagtcgcgccaacacagtctacggcctgggctttgcctctgaacagcatctgacacagtttgccgagaagttccaggaagtgaaggaagcagccaggctggccagggagaaatctcaggatggcggggagctcaccagtccagccctggggctcgcctcccaccaggtgcccccgagccctctcgtcagtgccaacggccccggcgaggaaaaactgttccgcagccagagcgctgatgcccccggccccacagagcgcgagcggctaaagaagatgttgtctgagggctccgtgggcgaggtacagtgggaggccgagtttttcgcactgcaggacagcaacaacaagctggcaggcgccctgcgagaggccaacgccgccgcagcccagtggaggcagcagctggaggctcagcgtgcagaggccgagcggctgcggcagcgggtggctgagctggaggctcaggcagcttcagaggtgacccccaccggtgagaaggaggggctgggccagggccagtcgctggaacagctggaagctctggtgcaaaccaaggaccaggagattcagaccctgaagagtcagactggggggccccgcgaggccctggaggctgccgagcgtgaggagactcagcagaaggtgcagacccgcaatgcggagttggagcaccagctgcgggcgatggagcgcagcctggaggaggcacgggcagagcgggagcgggcgcgggctgaggtgggccgggcagcgcagctgctggacgtcaggctgtttgagctgagtgagctgcgtgagggcctggcccgcctggctgaggctgcgccctgagccggggctggttttctatgaacgattccggcctgggatgcgggccaggctgcaggcggcatagttgggcccattcgtcctggaaagggactggggggtcccaacttagccctgggtgggccgggccgggctgggctggggtgggccccagtcggctctggttgttggcagctttggggctgtttttgagcttctcattgtgtagaatttctagatcccccgattacatttctaagc

SEQ ID NO: 714 - protein, 358 aa, Homo sapiens [sequence omitted]

SEQ ID NO: 715 - DNA, 48643 bp, Mus musculus
tggtcaggttgtagtgtgaagtgggacgctgaaggcctatctgatgtttctcaaagcaatgggaagccataggagggtgcttaaaaaaagggatccagttttatggtgatgtggaggggctattgatattaagtaaagtacctgaaagtgtgagaattggggggacaggtatacatcatgtggaggaccctcaggcctggtaggaggagagaatgatcactgccaggtgctggggtagagagcccaggaacatccttgtcatatgcactagaagatgggatcaaccttgtagctcaagtgtgcctcaaaagagagctatgttgggtaaggacagcagagagaggcctctgaaaacacaaagtggctgttgtatctgggggaaaggtcattctctctagatgactccaaaatctccagctggtttcttactcagaggtacctgggccaggacagtatggaatacaaggttctgtggggagaaaaaaaagaactaataaactttatagcctttgttttcaaatagcctgtagtcttcctgtgcctttcttgtgggagtaccattgtaactagctcaggcaggacatacagagaagatgactccaatctgggtgaatctgcttgaaatgagacaaactctttggggatgtcagttccttatgagatgtggggaaatgcttgacttcaatcctggaataggggctctttcttcagaagagattcagagtggactggcttgtccgttatactgagtgggaaaacccaagcctggtgaggtgccttttccaaagatgctgaaggggaggtagaggccatctctgcccaatcatgtgtctgaggggttagttaataaaagaacttccaaagaggctgtttccggtctactctttacatggctctctcagagtgcaggacctgtaggtgtcttcatttgaactatcttgtcctgactatccctaaaaaatggcaacccgcttcctaagagaacaccttgtggcgaggtagaccatgtaccccatatgtttgtctgttttgctgccttcttggagatggcatctctaactgaactatttttgttggggttttcttttgtaaaaacctcagggtggtgggtagccttttgtgtgaaccatatggatgccccttattcttcccataattcttccccttacagtctaacataagggcaaagaaaatatttgcacatggatacatacatatttctatttggttgacagacttaagtgttaatttcactaggccagaaggtcatactttgggggtttttttggtttttggtttttttgagacagggtttctctgtatagatagccctggatgtcctggaactcactctatagatcaggctggcctcgaactcagaaatccacctgcctctgcctcccgagtgctgggattaaaggtgtgtgccaccatggcccggcctctttggttcatttttgatgcagggtttcgatgtgtaacagccctggctatcctggaactcagtaagtagaccaagtaggttttgaattcagaaatctccctgcctttacctcttgagtgctgtgaatgaaaggcatgcaccaccaccacctggctttttgggaagggttccatatatttttctgttctgttgtttattactatttttgaaagcatttcatgtagtccaggtaggcatcctactggctatagaagggatgaccataaactcctgatccacctgcctccacttctgagtgctgggattataggctatttaagtgggcggcactgagatcaaatccaggactttgtgcatgctaggcaagcattctaccaactgagctatgttctccacctttttttttttctttttttttttttttttttttcctgtagataggatgttgctagtaaactctggctagaagtcactttatagatcagactgacttcaaacttactgagattcacccacctaagcctacccatgtttgactcttattttttgttaatattaacatcagcaaatacttgaacccaaagttttttgtggaggatactaaaatattaacacataggctaggtatatagctggtagaatgcttgcctttgcatggacaaagccttaggtttgagttacagtgccacaaagatgttaacccattcagttcttgccctgaaggcttagaccagcatccaggaaaggggaaacctgatgagattgaaacctgacagtcaaggaaagctcaacccagtatagtgaatcagccctgtgaccccagcactcagaaaggaggctgaggcaggaggattgctgtaagtttgaaagcagcctgggctatataggtttccaatacaatctaggctatagggtgaggcaatctcaaaagagaaaagataaataaaaagggaaggcttcttgaaggaaagggcacttcaagttgggaagaatgactaagcttggtgagagataacaggctggaccacagctgaagccactgtgtaggtgctgaaactgaactctggtcctctgctctgagagaacagcaagtgctgttaacactgagctatccctctagtcctctcttttttctacttaacagggagagaggactggagagatggctcagcagttaagagcactggctgctctttcagaggtcctgagttcaattcccagagaccacatggtggcttacaaccacctataaggggatctgatacccttttctggcctgcagatgtatatgaagcagaacactcatacattaaatacatatattttaaaaaaaggcgggggagagaaggaggtgagtaaaggtagccattattccatatatcctctttacaatgtactttaaaatgtatttaggagtgttatgtgtcaggctggagagatggctcggaggctaagagcattgactgctcttccagaggttctgtattcaactcccaacaaccacacggtggcccacaacaatctaatgcattcagttccctcttctggtatatctaaaggcagctacactgtactcatatacataaaatgaacaaatatatctttaaaaaaaatttttaaaaaagagtgtatgtgtctgtgtgcaagtagctgccatgtgagtgcaggtacccttagaggcctgaagtcatatcccctggagctggaattactggaggtttgccatagaccctctgggtccctttgcgtggaagagtctctgaggcaggtgggcaaggcgttggcaagtgacagacagaccaacatgtgagattgtgtagaatctgaatgtaatgtcacaaagtgaacaccagtcttatatagtacagaaaatacaaagggtagcaggcaaggtacattgaagttaccaggtacaaaacaaaggaatgacttcaaaaggatttacagaaaccaggtagatgtttacagtaaagataaagcagtcctgcctatggtcagcttagagacaggtaaggatttcacactctagtgctatacctttgaaccttgtgaaggctagcaccaggaggttctgctcttggaagacctcatgaataatgtaatattacaacccccctaattcctaggccttgctaaattcttatatgagtgtaacttttaagtaactaggaatctccatttgtcagaagaatttaccaacttgcttctaatatgcaatgtagcctgtactgaagatttctatctcagtgggattctctggctctttcttggtagtcccttgtttgagtgagatttgctactgtccttagtagaccagctctgagttgtaatgcttaattagttactgaataggttaacttccttactgcattcttataggattctaagctctcaggcttctgggaccttggaacactggggagatttaactataacagaatttttccatacaccagactaactcaggaatagggtatgagtatatgggtaaatgagaacgccaaagctccaggaggtgagtttccttgaaattcttttcctcgtgagtgctttcagactttcagcctgtcaagcagacttgaccgtagggcgtggcagaggttaagagtggcctgatatgagtgctgggaactgaggggaactgaacctggatcctctgtaagaacatctgtagctggtctttgctagtttgtgggttcttctttttcccaccctttatccccacaggtttcactccctaaaactagataggagagaaaacaaggatggggggaaaggaaagaggaagagatccctgaatctaatttctttcttttcatttcttctttgaccacagctactaccaaacaacaagccttcctaaatgaccaacaaccacccaccacatttctcaaggctctccaatttatgtactagctgaaaagttcccaggattccaaatgtcacacagttgcagaaatctgcagctggcaagaccatgcttctggtagagcataggtcagctgccgtgggcaatctgaagcagccttacatcccacacctgggttacaatggaagaaccttcttagactaattttgtattttttaaagaaaccaaaatcccaaaattctcagaaatgtcactacaaacatcaagtgctcttaacctctgggccatctctgctgccctcgatgtacgttagtttccataatctcatttgagcctcacaacccacgaacacaagtagggctgcatcactagctgtgtttacaccttaattgcagtgctttagagaagggatataaaataaagggtggaagaagatcctccacagaaccactgtccattcaccatgcagacagtaaaccaacatggacactgccatacctggcaagcactatgtttaaggtaggagcttatggctccttccatgtgcccctttgctcctgctagctggcccagatctcagaaatggagtggattatcagttacttaggtcataatctaattgcagcaatggttccaaatgtggtttggttgttggagcaagtcagtgcatcccctaatcaatgtgtggttagcgatatgatttgccctccacagcttctagtcaagaccatcaagaactgtttattcatgatcctcctgcctctacctcctggttcagaggttaagagcactgactgctgtcccaagggacgtgggttcaattcccagtacccacgtggcagctcataactgtctgtaggacattctaggggattatactcccacacagaaataatgtaggcaaaacacacaaaaatgaaaaaaaaaaagggggggggctggtgagatggctcagcaggtaagagcattgactgctcttccagaggtcctgagttcaaatcccagaaaccacatggtggctcacaactacctataacgagatctgacaccctcttctggtgtgtctgaagacagctatagtgtacttaggtataataataaatatttttttaaaaaaagaacagtttgctccttgcaactgtcagaactgaaaggttcattctcaactcttttcaacccctgtacctgtcacagccttatctccaagataccttgttcttttctgtcccacactggtctatcacactggtaacaggctgattggaattagcaaccattccagctaccttgatgagaaacatgtgctgaaaggggaacttcctccacaagacttctagggtcctactggtccagggcagtggctctcaaccttccgagtgctgtgacccttttaatgcagttcctcaggctgtggtgatccccaaccataaaattacttttgttgctacttcataactgtaactttgctactgttgtgaattgtaatgtaagtctctgtgttttcctatggtcttagtgagctctgtgaaagggccatttgacacacaggttgagaaccactggtcgtagagtgtagcaagctatccctttctttcacatttttattatttttgtgtgagggtggtacacgcaccatatgaagttagaggataactttcaggagtcagttttctcctttcaccttttgggtcctgggcattgaattcatgtcactgggcttggtaggaggtgtccatagccaacaagccatctgttttgttttgtttgttttgtttttcaagggtttctgtgtaaccctggctgtcctggaacttgctttgtcgaccaggctggcctcaaacttacatagattcacctgcctctgccttccaggttttgggactaaagtgcacttttggacaacatctggcctctccaagtcatcctgatggcctaatctacccctttcaaggtgaaggacaggttactgtggtccactcctaccactaaaaaagaggcacactgcctagtaagtttggatttggagatagcatacacttcattggattctttgattcattttcttttttttttttttttttttttttttttaaagatttatttatttattatatgtaagtacactgtagctgtctttagacactccagaagagggcatcagatcttgttacagatggttgtgagccaccatgtggttgctgggatttgaactccagaccttcaaaagagcagtcgggtgctcttacccactgagccatctcaccagcccctgattcattttctgaacactcaacaagttatggttctgagtaggtccccaaacagaaggtggcattctcaaaagtctgcctgcccagcaagccacctggtcactactatttcatatgcatgtgtgttttacctgcaggtatgtatgtgtaccgtgtgcatgcctgctccccaaggaagccagaggagggtgtcagatcccctggataggggtgacaggtgtgagctaccatgtgggtgctgggaactgaacctggaagagcagcctgtgcttttatttgctgagcccctctccagcctctcactttgtgactgtttaattttgtgtgtctgtatgagaatatgccacatgtatacgagtgccccagaaaccatcagatggcattagatctcctggagctggagttacaggttgtaagccgcctaatatggtgaaaatgaactctggaagaccagcaagcattctttttttttgggaggggggagtgtttgtttctgttttttggttttttcaagacagggtttctctgtatagtcctggctgtcctggaactcacgctgtagaccaggctggccttgaactcagaaatccgcctgcctctgcctcccacgtgctgggattaaaggtgtgcgccaccatcacctggcaaattatccagtcttaatgaagccctcgatgctatgttctagaggtaaatacactcatgatttgctagttgcagtttctgtgttctgacctcaactgtaaaaatcttgactcctcataacactctattttcctagaaaacatcaaagctgatgatgtgggaggttttcagagaagacaactatgtccttccagaagacaattcctacatcctgctttataaggcagatagcatccccaaaccattcacaggtttggggttggcacagacctcactggctcgggaagcagttagcagtgaagtacaaccctctcattgctcaagaggccggtactatttcctattgcttacacatttctctcaagaagaaataaacacattatcaatctctactctaaattctgcctggatggagcaggagaagcctaaatttcagtcaccagaaattatccttccctttgaacctttggagaaaaatttgttttagtacaaatatctaagatggcacacaatagtgagggtatccgtaaaattctaaatcctctgtaaggaagtttcttgctgacaggcagggagagactgctgcctcccactggcagcagagtagactagaaaggtccttctaggcagcttagagagtagactttgttcactgtcccattcaattctcagcttctaggcggtgctctccaaacgctttgctttgcatcttttgcagcagggtctccctgtatcccagaatggccgaggacaggaagcagtcctcctgagtgctggggttggttacaggcaggagccaccacaccagacctctctgatattttaaagctcgttctgtgtgaaaaggcatgagtgggcactgcaggaatgtgcccagctccagatggaatggcaagtctctccagtataattatgcacaagtccccctccccagccccagtttccttgtttgaagaaactgctttgggagctgtctgcaggttctccttgttagaaacgcttagggtcaaaaagaaaaagactgccactccaattgaagtgtctagacaaggcaacctaggaagtgcacttggtttttcttctaactcagatggtagctgtgtcttttcccatcggctgagggccaagctcacgatcttgctttgtacaccagactgtcctcatactcacagagagccaatctgcctttgcctctggagtgctggttaggtttgtgccaccatgccctgctaagattcttaagttaaaaaaaaaaaaaagaaagaaagaatttactgtaaagcttcttgtgttaatagcaaacatgggaagagtaagaccactgacccaaatcagcatggttaaattaattcatgtatgagggctgcctccctctaaggtggggttccagagatcagccttggatgtgaggaagacaaggcttttataggtcagtggtagggagtttccaaacgggggatttggtgggtaaaatgggccgggtcacagaggcacactgtaagcataacaagttagttttacaagggtccctaaaacaaaggcacggttgcaaggtaggcctaacaaggtagtcataggtggttgtatagccttttgaaatagaggtagggttgcaagatggttatacacaacttttaaaaaacaaagaaatgactacgattctaggaagagacagtacagaactatttgtggttaaggttataggtggggcatagctcaatccttgagaaacaggtttaatcataaaaaggagtgaactggcttgtctttactatctgtaagatgacttttaagactaaaatggaggcagactgattcttcacttaaggggcagctattatttccatcttataactggacagagaatttttatttatttatttatttatttatttgagacacactgttgctcaggctggcaattttatttatttatttatttatttatttatttatttatttgagacacactgttgctcaggctggcaattttatttatttatttatttatttatttatttgagacacactgttgctcaggctggcaatgctcctgcctcagcctctggagtgctgggattacagacatgagccaccaggccctggcttagaatactgatgtatcctgagactccatgtagtaaccattaggttacatacacgtggccagacaggttttgggaaacctggttactctcctaccttgttgcctcctccgagtcagagactgctcaggcctaacgcattttcagagagcaacgggtcacccgccctcgagttctctgcaaggtgttcttcggccctaaggatggaccacccgtactctctcggagccggaacccagaaccgcgtccctgccgcagatacttaggagggctcggggaatcagggcaagggggaccaaggaagctgcccctgggctgtgataggtgcggggtcacgtagggcgtgcaccgcccctcccgggactgtagagaacagggaaacaggccgggcctctcaggacaacggaacgccaccgcacctgaccgtgcctctcctccggaccgggtgagacgtccctaaatggctgcaccgccgggtccgagggtcactctccaggcgcccttgacaggccctcccgccacgccacctagcttgctaccaggcagcccggagcaagggcggaggagcactttggcttagccaatgagcgcccagggttctgagatgcgcccaatcagagtgcgggcaggacaaacaggttaggttgcgcgcactcggcgcgagaggcggacacaggcgcacgggaccgcttctgctgtggcctgggacggccaccgctttgcttcccgcgccctggccgcgggggccccgcgagttcccgccgtacacacagacgggcgggctgtcgggaccgagagggcctcgtgcaacggcgctctcctcggaagccacgctacctcagccgcttctgcaaaaaggcatgagggacggctcctggcttctggagcgtgaggtggcctcggggtcaacccgttaaggggactgcgcggacggcccggcctgccttcccccagcccttcctctccggggccccgcggcaggcgcgggaatccacagaggccgacatgttcccgaggaggccaccggccaccctggccgcctggctggcgggcgcgcggggcgggggcctgctgtccgcgctggccaatcagtgccgcttcgtgacgggcctgcgcgtgcggcgagcgcagcagatcgcgcagctctacggccgcctgtattccgagagctcgcgctgcgccctgctcggacgcttctggcgccggctgcgaggccgccccggccatgcctctgttttgatggcggcgctctccggtgttttcgtatgggacgaggagagaatccaggaggaggagttgcagaggtgagcctcttggctgcagttggcgtccctgttccgtagagaagggtgggcctgggcgggaggttggtgggcaccttggggcttgagctgttgacagtgcccagtttgcccagtggtcttttgagtacgatgcaatagattgaacccattttagcaccccgtgttactgcccccatgcctgttaaatccacttgtcaggttaaaaataaccacaagagagacgacttcgaatgggtagtatgacactaaagaaaatactccaaaaccaaattagatatctgaggtatacaggtgatttttcgggtaatcagtgtacccagaaaagtgcaaattcaaaatagggcttaaaataagcccaaggtgtgtgtgtgtgtgtgtgtgtgtgtgtgtgtgtgtgtgtgtgtgatgtagcatgccatttataaaatgactgcgatccagatggaactcgggctttgcgcggacagcccactgtcattgtgacttgtgtcttggcacattcaagaagctgggagggattttgtctgtttgcacaaagcaatggcctggatattctaaccagtaagagttaggttaggttttttttgtttgtttgttttgtttttactgttttagaactcttcgaatactgtaccattatgttttgtctgtggaaaagcccattggcattgatttatttttgttaacctgtagttctgagactttataacttttagatagataatctttaaaggaaagtgcttttacattacatttctatattccttttaaacagtctcaaattgtgctccttacccctccacctaacaccctccattctaaaccgtagtttcagtaaccaacaccagcttcttctagatatttcttaaggagagaacctgttttacttttttttgtttttgatcttaacgttacaaatgagagcagagctgagcatggtggctcataccttaaacctacctacctcatacctttgggaagtagaaggaggcagagttcaaggccagcccggtctacaaagagagtttcaggactacacagagaaatcctgtattgaaaaacaaacaacgcctggcagtggtaccaaaaacaaacaaacaaacaaacaaacaaaaaacaacaaaaaaagtcttcttttttttctgcggccatactaccctcaacaccctcgaccttgttaaaagccatttttctttctttttttttttttaaagttttatttattattatatgtaagtacactgtagctgtcttcagacacaccagaagagggagtcagatcttgttagggatggttgtgagccaccatgtgttgctgggatttgaactctggaccttcagaagagcagtcgggtgctcttacccactgagccatctcaccagccccgccatttttcttactaggaagatagtcccaattattttttctagcatgagactagttttcaaatcagtattgcacaatttgaaacttaccatatggatattaatagcaaataggtcacaatataaacattactctattctcagtttttttgtttgtttgtttgtttttgttttttcgagacagggtttctctgtgtagccctggctgtcctggaactcacactgtagaccaggctggcctcgaactcagaaatccacctgcctctgcctcccaggtgctgggattaaaggcatgcgccaccacttccagcaaaagaagactttttaaaacaacattttaaagtcataatcacaggcagtcctgtgtacgcaaacgttaaagcatgaaagctgtttggtaatttttccccccccccagagctgaggaccgaacccagggccttgtgcttgctaggcaagcgctctaccactgggctaaatccccaacccctgtttggtaattcatagtgttcttttctgttcagtattttgtgctccctctcccctcagattttttgaggtaggacctgtccattatttgcccaggttagccttgaacttatagttctcctgccttggcctcctcagtgctgggatttcagttgtgtaccactacactgtagtttcttgttggagaggaagctaggatgcaggtgtgtgcagtcaagctggaactgcagagtatgttcttctcaagggcttcgcattccatgtagtgagaagattatagttttgctttctagccttttggtgcttaagaacatttcacaggctgggtgtggtggcgcttgcctttaaccaaacactcaggaggcagaggcaggaagatcgctgagtttgagccaacctggtctacatagtaagatcttggaaagccagaactacatagagagactaggtctccaaagaaaagagtgtatgaatgtacatcttatcaagtacaatctaactaatcttatttaaccttacaaaataattttgaatcattggtgccttagctatagaaataattttgttagtcttccccacccctctgcaagtcaggttcttactctatagcctaggctggctggaaactcattatataacctacactagcctcaaactaggaccactccctctggcaagagaaattagatctttctcattttatatttttattatatttatttatttattcatgtggtaagtgttgcttttgaacactacaacctttgtgtggcgatcaaagaacaatttgtagttgtttcttctggcatgtggaaacctgggatcaaactcaggccctcagacttagaggcaaatgtgtggtggttctctccccctcccctcaacatctctcaatacctgtctagaatttttatccagttggcttctttttgtttgtttgtttgtttttgtttttttcgagacagggtttctctgagtagccctggctgtcctggaacttactctgtagaccaggctggcctcgaactcagaaatcctcctgcctctgcctcccaagtgctgggatcaaaggcgcccagcccagttggcttcttaagcaaaataattttgctgactattattggtgctagctggtgttctgtgacactgggaaaaatcccatggaaaagtacagctctgtgtgtgtgtgtgtgtgtgtgtgtgtgtgtgtgtgtgtgtgtgtatgtgtgtatgtgtgtaagttacagaaacaaaaagaggaaggatgttaggaaatatgaaaatatagggggaaatgttccattgacctcatttttttaaaaagttaagtttactgctcagaaagtttgaggaattctacttaatgagaaattagttctagtaaattttcacaaagaaaattggccatttccctttttcagtttttttttgggggggtgcatttagaatacattaaacttttcagtgtattttttagctagtgaaaaatctatctggcttaaaggaacttaatggccacagtcagtttggtgtctcctacagacaaagccttagattatcgaaacaacataaatggaccttgagatttgttggatttgtttttgttattttaccattaactaactgctccaaaaatgccatgaactagtttatgtcttatttcaagatatgtctcatatcagtagtagctgaaaaaactctaatcttatttttgtttgtttgtttgtttggcttttgcttttgttcttaaattttatttaactttattctgaggcaaagtctcactatgtagctctggctgtcctggaattcactatgtagactagggtggtctggaaatcagagaaagatccaccttcctctgactcctaaggcatgggattaaaggcatgctccactatgcccagccaaaattccctaatttggacagtagtgtggaattggaggagctttggttaggtgaagcagttgttgtttgcgccgcttgctggggtggccttaccaggattatttggaagcctggatcacattctgtggtaagtgcagcaccctggctgagtcccatgttggcatgcttaccctgttttcattgtgtgtcttcagtttcttcagtacatgcctctctcagatactgttttggagaaaggaaagcatctctgtctccccttcatccttgtactaatctaatcagctcattttgttactatttcaggaataatctcttttgcccttttctcttttattaagtcttcttacatgggaagatttagacacttatcctgtctcaacaagattagataccataggagagaggcgtttcctttctccacatgctgtctatgatattgtttatgctcttgtgtgctttgtcagtcttattaccatttagaagttgaaatctttcaggggtagcaatggccaagtcctcctccatcatttgtattgtgcttttccaatagtacatgtgtgtggggtgctgtaactggctttgaacttactatgtgggtaaaccttgtactacccctagagtacctgcatgctagacaagcactcttacttaattgagctgcatcactagcctgagcccctggtgttagtaagacatttaactaggggaaacagatttctgcttcttgtcatattcaggaatggtgcttgttatttaagaatgcattactaatgcccagctgtgatggcacatgcctttaatcccagcacttgggaaacagcacttaggcagatctcttgagtaatgaggccagcctggtctacagagtgagttataggacagtcaaggctacacagagaaacctgtttcaaaaaaaagaaaagaaaagaaagaaaatgagtgcttttctaaagccatttgcacatgccttttaaatcccaaaattctggaaacactggcaggtaaaagatctctgtaagatagatgccagcctggcagtctggtctacattgcaagttctttctatagagagacccagtctcaaaaaggggatggcggtgggggaagaatgctttaattagtcctgtacagggcccttgcttgttgctaagtcatgcctggagttcttctctggggaattggtgctgtgattgtgcttttgtttcttctgcaagatctaattgcctaccattaataaaatattgcccatatttcttttcttgggccgttatagggctagcattgaattctgttttatagtttccaatttaaaactttcaaaaatgataaaacttttgtttgttttttgagacaaggtacagggtttctctgtgtagctctggctacacatgtaagcaaacaccaccgcccagcttgatgaaactatttttatcagaacgtctgtactggtcaaggttcttgagtacaaatgctaaaatgatctttgttaactcaaactaaaaggaattaactggatgcgtccttgttagctgactgttcagatcattgacaagaaagctatagagtacaggctggccaagagaacagtcaaggcttgctatagggataatcttcatatagcagccttgtgggcattttcacttacatttgttactctagactccttccctgtgagcagtctgtaaaccttctgggcctttgcccctcctagctaggagttctaaacgtacctaaattagttgtgctcaaataggagaggtagagtatgagcttgcaccctcctatttggattccccgtaaatagggaggggatttcaggcagtcggaatgacaaatatctgccaaattaaatattttttgcctaaatctaaagtttaaaatctagtaactttgaattctagaagtaataggaaccttcaagaaaagaggtcttgctgaatggtggtggcaacacacctttatttccagcattagggaggcagaagcaggagtattgttgagttcaaggccagcctgagctacatagtgagttccagaacagccagaactacagaaagagatcctgtctcaaaaaacaaggcggggaggagaggaggcagaggtaggtgtgtgtcttccctttacaggtaaaatgtaaaatgaatctcaaatcacacaattaatgtgtaccagagtcaggactacaacaaacctctctaggactgctaaactgcttgaaaatttagtcttggaatgccaataatttgcttttattccccacctcactccccccttttgaaaaagcagtattttgtgtatctttggttggcctggaactttagtctaaaatgacctagatcattataatcctcctgcctcattttttttaatgttaagattactggcatatgccattgctcctggtatgttattggctttctggtatattaatataataattttaattactgatgtctgcttctatatttttattcagcttattcattaaacatttcttgactatttactacttaccaggagttggaaccgtagctaaaagagattcatagtttagcaaaggaggcagatgtaaagatacgtttttcttttttaaagatttatttatttattattatatctaagtatactgtaactgtcttcagatgcaccagaagagggtctctgatctcattacagatggttgtgagctaccatatggtttctgggatttgaactcaggaccttcggaagagcagtcagtgctcttaaccactgagccatctctctggccctgtaaagatacattattacagcatactatgatttatctctgtagagaataaaataaaatttatataattaactttgtagaagttactcttattttagtatgtcagtaattgtggttttccttggtcttttgttatacaacactgaggattaaacccagggcttataaatactacacaaacactatattaccaggtacatcctcagactctggattcttttttttttttttttttttttttttaagacaggatctcactaattcaagctggcctcaaactctccatccttctcactaccacctaaatgctatggcaggtcaggcatgtgtgtgttcgtggctacacccagggctggcctcacttttgagttgtatccttttatgtatgtgcagcctactcaaccagcaggttttcttttctgtttactatttaaagttatttataaaatacaagccatgttttgttttatttattttctttgacaatttcattcatgtatatagtagtgtatcttttttttttttttttttttttttttagacagggtttctttgtacagccctggctgtcctggaactcactctgtagaccaggctggcctcaaactcagaaatccgcctgcctcccaagtgctgggattaaaggcgtgcaccaccattgtccgactacagtagtgtatcttgatcatatctatttatctattcctaactctaccatcctattctgtctagaacctcagagaatgccacttgtaccttcatgttctcttttccttcataatccacatagaatagtaggtgctgctttaatgtgcatggttgtggcatcatagcaactccaggaaacaatgactctccttcctccagcaagcatagactgtcaataactcctcagttaggggtggggcttcatgagctcctacattatccatgctggaatgttgcctggcttgatcttgtacaggttaccacagctgttgtgagttcatgagtacagtagccacatcatgttgaaaacagtgtttcttaacttccttgagccttgtgttagaaataagtcaaggatggcagagaaagagactaccactgaactgaactgtctcagcaaggcaaaagttttctcttctagaagatgcactgctcatcaaagcataagagcaggcagctgggacagaaagtatgcttggtttttatagttttaacacaaattagcaactgtatcttttccgcattcattgattggggtcaccacacctcactcttttgagagagagagagagagagagagagagagagagagagagtgtgtgtgtgtgtgtgtgtgtgtttgtccagaatgggaaagggttttagtgaaccaaggagaaaggaattactactctgataggaatggtggggtcactgatccaggctattaggttcttgaaatgcagcaggaacccttgtgtactgggtggagaagaaccaagatctttgcatataggtggggaagatgagaaaagactagtgatagagatgtctcagttaaggctaagcactcaagttgtttctctcagcactttgagtctctacattatatgctgcctactgggaaaaatatttctctgaccatgaaagagagagtaccactctgtgggtataaacataaatattgatcatttagcaaaatagtagtagttgattccccctagggcctatgacctccccagcttggggcctttgaccagttttgtagtaacacatttaaaaaaaaaatacatgtttcagatataaaaggtttaaagaataagagatattaaatataatgtaacttgttgggcttttctatgtctaccccagttactgaatgctgtcacggaagcttatttatgcattaacgcctaggccctcaagtgagcctcattcccaactagctcatagttatttcatttatgctaacctaagttctgccacatggctggttacctctcttctgtttcatatatccagtcttcccacccctggcccctgactctttcccagcgtttctctttctctgctgagtattccactgtctattctaccttttgctataggccattgacttttttttttattttatgtgtataaatacattgtagctgtcttcagacacaccagaagaggacatccgatcactttacagatggttgtgagccaccatgtggtttgctaggtatcgaactcaggacctctggaagatagtcagtgaaccatctctccagccccaggctattggctttttattttagccaatcagaagatgccttaggcaggcaagaaaggacggagacatattttcacaacagtgcaaataaacattttcctacaatataatattatatttaagaaatgaaagcaggcatagatgcctttggaaggctgcagtgggaggatcaagagtttgaggccagcctaatgaaaccctgtcttaaaaaaaaccaagcaacaccatcaacaaccctccccccacacacacaaaaactacaatggaaattcctctgtacttttttgtgaaattttcttacctccatggatatgtccataattccagtttgttggttattataccaatatatgtctatacttactgattaccaagtaatatataaccatactatgtagtatcacattttaggaattttatagccctttgggcaaaagtaccaaaacactaaatccagcagcatacaaaggagattctgtgccatgaacaaaattaatttaatatgctacattaaatgagtaaaatacaggagttcagatataactcacttggtagagggagcatgcaaaaaaccatcaccgtataaccaggtatgatggcacagtcctgtaaaccccaatattctggaagtggagatatgatgtttatttttgttttgttttcaagacaaggtttttctgtgtagcccctgactgtccaggaactcactggagaccaggctggcattgaactcagagatctagttgccttttcctccactttccaagtgctgggattaaagatcttcaccacctagagccaggcatggtagcgcatgtctttaatcccagcacttgagaggcagaggcaggcggatttctgagtttgaggccagcctggtctacaaagtgaccctgtctctaaaaaccagaaaaaaaaaaaaaaaacacttcaccatcaccaccaccacccagctggaagataaatttaaggccaccttagatgcacattgaggctaggctgagctacatgatactatcttaaagaaaaagaagggtctggagagatggctcagtggttaagagcacatgcctctcttagaggtccagtattcagtttccagcatctactttgggcacctcacaaaccttgaaacttgctccaggagatctaggcctctgtgaaaactgcacgtgcgcgcacgcgcgcgcacacacacacacacacacacacacacagacaaggtctccactatgtagtggtcttaaactcagaggtctgtctgactctctagagtactgggggaaaattaaaaaaaaaaaaaaaaacttagagaggtagcatttgtttaattctaacctcatttcataatttaacaaaaaagcatagggagtggagaatgatttggaggttaataccactgttgatattccagaagatctgggttcaagtcccagcacccacatgatggctaacaaccatctataactcccattccagggaatccagtgccaccttttagcctctgagggtgccaggcactcaagtggtacacagataaaagtataaacaaaagcacccccatatattacctttacaaaaaaaattacactcaactgattgggaattgaagggaaattccttaaatttataaagggtatctaaaaatagcttacaacctactgagaaaatgaaacttcctctaatgtcagcagcaaaacaagccactgctctcggtccctctttgagcagtgttctagagtttatagcagggaaattggcaaagagagagatgaaaggtacccagactggacaggaataagtaaaactacagcaaatattgttttttttaattacttgtgtttattcttttttaagatttacttatttcatgtatgttgagtacattgttgctgtcttcagatacaccagaagagggcattggatccccattacagaatgttgtgagccactatgtggttgctgggaattgaactcaggacctctagaagagcagtcagtgctcttaactgcagagccatctctccagccctgtgttatcagtttaagtacttaggaatttctgaaaaatcattaaatgttgaaaactattagcactaataagattgcaggttgaacaaatcagtaaacaatgagtaatctgaaagtgaacagaatttcatttacaacatcaaagagaataaaaattttaatttaagaacgaagcacaagactttttagaactctgaaacacattgaggctgggcatggtggtgtacacctttaatcacagcacttgggaaatagaggcagaaagatctaaattcagggctagcctggtttacatagagtttaaggctagcctgtgagcacaatataccttgtctcaaaaacaaaacattattgagtgtttaaaaagcaaatggggccagagatttagtgcctctaacagcatgggcttgatccccagacacaacatttttaaaaagctagatgtgtccatacctatagtccccaaattcctactggcagttgggaggcagagtaggagaacttgctgaaagctcaggagagataactagcctggtaccttacctcaggaacagggtggagggagaaaactgatttctgaaagttgtcctcttacttctacacatgcggtgacatatgcatacctgtaagatcaatctaaagagacaaatgcagtgggacacctgtaaccccttgggaagctgaggcaaagggattactagaacccaggattaggagttcaaggccagcaggcagcatagtaagacattgtcttaaaacaaaaacaagaaagctggccggtggtggcacttaattttaatcccagcaggagacaggcagatctcttgagttcagcctggtctactgagcaagtttcaggacagtcagagagggctacacagaaaaaccctgtttcagaaaccaaaccaaaccaaacaaacaaaaagtagtttgagagttcctcaaaaaagtaaatgaagggactgggaatgtaactcagctggtaagagtgcttgcctagtgtgtatgaagccttagtgtgtatctctagtccccttggtaggggggtaagcataaagctaccattgttaccataagctagcggatttattcttaggactctacccaaggaagtgaaagcacatctacatagaaactgttattattcatggtagccccaaagtggaaacagcacagatgcctggctttctgctaaacaaaaggcgatatatgtgtatatgatggaatgttgttcagctatgaaaagaataaaatccaacatggatgaaatttagaaatatgctaggtgaagggagccagatgaaggggacatatgtataattccatttttgttggcttgtttcacttttttgagacaaggtctcgatatataactctggctgtcctcaagctccctatgtagaccaggctggccttataaagatctacctacctctatctcccttgccaccataccaagccacaattccatttatttgaaatgttggaaaaaaaagacagacttgtggctggcagggatggggagtgagggaactgcctgaaagtatatactcaacttttcaagtaatctaaaaagtactgaattatatactgcaaagggtaagtcttatgctatgtagattatatttcaattggaaaacagggaagaaaaataatacatacagaagacagtccactaaaaaggagagtagaaagtcttacctagtagagtatgctataatcccagtactcagacggctgaggcaagaagatggaggtgtactacaaggtcagctggcctacatagtgagatcctgtgtcacaggaaggatgggattgtcaagggacacatcttcaaaccttggtggctaatatttgaagatggctccgcttcccagtcttccttgatacatgttatctgtctcactttgctgcccatagcatgatttctagtttctgacctgctttaagtcctcttactcctggacttgaaatgcagttaggtgacaggattaaggatcctactcatgtatactatgtgcatggaaaataaaaatacccaaataaatattttttttaattttgtaagttatttcaggctatgtgctaggtcttgaacacttttaaaggtgtttttcacagctaactttaggaaagtactattattttgtacattttatagatttagaaatggtgactggttaattattctaattacaagtgttaggttagtgttcaagcttaacaattcaatttttattcactgaggcagcatgctatttccagccacacctgtctttttgcaggtctttggatacttcatttcatggacaccatgcttatttctgtctttccaggtccattaatgagatgaaacggttggaagaaatgtcaaatatatttcagagctctggagttgagaatcaccctcccgaaccaaagtccccagcaggagggaatgaaaagtcaaaagacaaggaagaaccctgggaaatggtgatggacaagaaacacttcaagctgtggcgccgcccaattacaggcacccacctttaccagtaccgaggtgagccctgccctgctgcctttgacaggtgtccatggtgcccacacacagtgctttgttcctttagcttcctaaacgattcaatcctggccctactgaagaaaattggccaaattttgtttgttttcctctcccagacggcaagcttttcacactcttccttggtacatgtcgtccctgccttgctctgctgcttcctagctctccctacccctcttgtcgttctagtttttggaacatacacagatgtgactccccgacagttcttcaatgttcaggtgagttcattttctctccaggtttggaattttttggctccatgaatgtctgttgtaatctcagtgcttggaaggtgaggcaggagacttgctgtgagttagaggcaagcctgggttgtataacaaatacaagactagtcagaaatacatagcaagttaaaacaaattaaatgaattaaaaacaatatgtttgggtgtgatggcacatacctttaattctagcacttaggaagcagaggcaggtggatgaatctctatgaatttgaggcctgcctgggctatacatctagtgccaggacagcagagctatatagagtgactctgtcccaaaaacaataaaagtgaaacaaaagtgagaggagaaggtgagatctcccaaagtgccacatagaactttctttcctgatacttccattttctttttttgtttgtttgtttgtttgttttgttttgttgagacagggtttctctgtgtagccctggctgtcctggaactcactttgtagaccaggctggcctcgaactcagaaatccacctccctttgcctcccaagtgctgggattaaaggcatgtgccaccaccgcctgggatacttccattttcaaattttaattttttaattttaaaaattagtatacagctgaatgtggtggcgtgcacctttaatcctgatacttggtttatgggagctccaggacatccaggactatagaaagagaccctgtctgaaactaaatacaaaataagtatacaaagtattaggctttatggcctttttcagacataatttggttttgctggtcttcctccccctgttgccttcttccttctccccgtcctctccatgtgtatctcctccatcagtaaccctggccaacttccctatcacgtgtgttctattgttctcccctctgatcactaccttttctttattcctggactactctctggttttatgacttatgtctgtgctcacaccttcatatataagatatgcatatgagaatgtgacattgtctttctgagtctgttaccttgcttaatgtaatttccagatgtatcatcttccttaatgttttataatttcattcttcttttggctgaataaaattccattgtatacaagtaccacatgtttactatccattcatttggtgtaatttccttccttttgtgactggtgccgcagtaatcagctatagtgagatatagagtgtacaggttatatgcccaggagtatggctgggtcatatggtagttctgtttttaatttttctgataaatctccatactgattttcataatctactaacaccagtgtgtaatgtgtaagtgttcctctttcccctgccgtcaatttttgtgattttgccaagctctcaataactagtctgctgattataatacccactaaagccaagcctgttggaatagacctgtgtagcagtgagttcagctacgctgctttggttcccagtgggttgtgtgcttccagccaggagctatctggattcaagaatggaactatcgggctggagaggtggctcagcggttaagagcactggctgctctttcagagggcctgagttcaattcccagcaactatctgtaatgggatcccatgtcctcttctcgtgtgcctgaagacaatgatggtgtactcaaataatatacatataataaataaataaatctttaaaaacaaaaaagaatggaactatctcccccctttcccccctttccccctttctcatccgccagttcattttaaaatgccttggctaccttaaaggctaggcactcctaaaccttcccctgctaccccaggtccgattatggaagtggccagtggccgcccacccgaatctcacatggctggttggttttctctcatacagctcctacagcccgtccttctctcccgagtcatgccagttctctgtcttctctttcccagttcctagccctcacaaatccaaagatcccacaccatctccctttgcccagccattggctgctggcatctttattgatcaatcaaaaaccaactggggacaaggaccttcagcgtttggacactcagatttccaattaaagcattagaaccaatccccaacaggcctgtaatctcagctctttcggaggctgaagccttcctggtatgtagtgaatttaagaccagcctgatcaacttagtgagactgtcttaagtaaaaacaagaccagggaaatggaacatttgcatagtatgtacagggtgtgctgggttgaatctgcagaattgtaacaatggtgtacccactaaggatatacaaggcactttgacctgggctctggttttgtcagtgctgtttggtttttatgcatacgatgtctgtatttggttccttgatatgaaagaaaataagaaattctccttttttttttttgtggtttttagagctttattgtagaaaggcagggggaaggagagaaggtagaaagagagaggccagccatggccacatggagataggggtgaggggagagagagagggaggactagacaggagagtaggaaaggtgaaagcttaaagagcgagaaatgcttcttgaatttctttttctgttgaaaataatttagaattatcatatctttacatgttatctgacgtattttctccggacatttccttttcttctttttaagtttaatcgtttctaagagggtgcgggtccgtgcctgaaggccagggaacaactctgtagagttgcttttctcccacctttctgtgggttctatgtattgaattcaggttgttaggcttacatagtcaggcactattttagtttcattctgttgctgtgactgaccaaaagcaatttaggaagagtttattttagtttataggtatagttagtaactgagagaagttgggacaggaacttgaaacaaaaactatggaagagactgcttattttctcttttccaggctcatcttttcttctcttttctcttcttttcttttctcatgcatattgctagataaaagccaatatgaaaggtgacatactatatgattttagatcattctagacacttgtcaaaaccagcacaatgtctagcacactcactgaactctataccatagtcaatgatatatcagtactgggtaggcagtggtataggcgtgtaatcccaacacttaggatcaccaatcaccacaagttatagctagccttgtccacctagtaaatttcaggccagctgtagttactccatggtaaagccttaactaattttttttttttgtttttttgtttttcgagacagggtttctctgtatagccctggctgtcctggaactcactttgtagaccaggctggcctcgaactcagaaatccacctgcctctgcctcccaagtgttgggattaaaggcatgcgccccccctgcctggcttacttttcgctttccccaaaaaaaaaaaaaaaaaaaaaaaaaaaaaaaaaaaaaaaaaaaaattagtgaaaaaaagtacagaaaaataaacccattaaaataaaatcagatagctaagcatttaaaaagtccaacacaaggccatcaggagatgccagagatgctaaggttcagcagggtgttagcagatagttgctgatttgtatgtagactcttaactgtcctggtagagaggaggggagacttttgaagactgatgtccagtctttttagttttaagctattatagggaatacagaatgttcctttttacttcttccattctcttcagatcagaataaaaccttgacattgtctaaggtgccatatttgggagtgcagttgttatagttctttgcacagtttctctcttttaaattttctcatgatcttcttacttttttgaacacattaggacaaagcatattatcttccattcctgggatgggaaaacataggctgctatcaggaaagataaatcaacttctggaaagtgtctggaaccctggtctaattggtataaaattgcaggcaaacccagtctgtcctgtctgcaggagctgtgtaccatggacatagcctgctttttcatatagtctaggaccacctttataatgggactttctccagcccaccagtggtataaataataacgagaattttattacagtttaaaacttagactttttgctagggcagtttttcagctagctctatctttctctccgctgtggttcacatctgttccctccatgtacattttcaaatctcccacgattgctttcttttcccagtatataccacctctctctgtctctccccttcccaagtcccaccccctacttcctgcccagccattggccattagctctttattacagctagtcagtgcagcaaacctctgatacaattctagattgcctctaggcagagaggactgtctgaccttcaagtatctgagtaggagactggtgatgtaccatagaaatgacagtaccaatttcctgccagcatttagctctctttggtacagaattaaccattgaaaatacagagacataccttcatagagtataaaaaaggttaccccaacacttttccatggaatggtactgtccatagtggatagtggtctggatccacctgtattaattaataatcaagactgttctggggctggagagatggctcagcggttaagagcgtcaactgctcttccaaaggtcctgagttcaaatcccagcaactacatggtgtttcacaaccatctgtaatgaaatctgatgccctcttctggagtgtctgaacacagctacagtgtacttacatataataaatatttaaaaaaacaaacaaacaaaaaactgtcctccttagacgggctcacactccagacttatctggacatccttttctcaggtgactccaggttgtcaataggtggcaaacattttttacccactgagacatctcatcacccacattccacagacatttttaattaattaattttttttactttgcatcccaattgcagcttcctatttttcccagtccttccctaaactttttttaataattaatttaattttatgctcattgtatgagggtgtcagatcccccatggaactggagttacaaacagatgtgagctgccatttgggtgttgggaattgaacctgggtcctctagaagagcagccattgcacttagccactaagccctctctccagtatctccatagacatttctattgcatagtttttgtgtatgtgcatgtatgtacacacatgataatgagaactgaacatagacaaaacttgctagacaagtaatttaaccactgagctgtaccttcagtcttttggcgtcttttgttttgttttgtttttgagacaggtctccctatgtaagttcagccttgaacttttgatccttgtctctgcttcttgaattgctgatatttacaggtatgtgtgccaccagtgtcttgttgcatttttaagacttctttgaagggggctgaaggaagtggctgagtgattgagatcactgtttgctcttctggggaacccaggttcccagcacccacatggcagctcacagctgtctataattccagtcttagggagtccaacatcatctggcctccatgggcatcaggcaagcatgcaggcaaaacaccatgcacatgaaagttataaaaaaagattcccttgagggactgggggaatcattcagtgggtaaggctgcttgctgatcaagcttgagttcagatccctgtatcacccatgtagaaactgtgtggcagcatatgtctgtaagtaatcctagcactggttaggtggggcctagatgaatccccagggattgctggccagccagtctagtcaaaccagtatgcctcaggttcagtgagagagcctgtcttaataaagtggagagcgatagaagacatccagcattgacttctggcctatacatgcacaggtgtgtacatgaacatttacactcatacacacagacacagaaaccccctcaatacaagtgagaatcttacagtatgtgcgaaccatctaataaacagtcatgctctcacaggttggtactgttaagttaaattactatttctccataatgtgtctaagtcagagatcaaccttccagagagagaaacttctgcatctttgttttggatcttctcttttgcagctggatacagagtacaggaaaaaatgggatgcccttgtgatcaagctagaggtgattgagagagatgctgttagtggttctgaggttcttcattgggtaacccattttcctgtgagtatttttactttagttttattcttgccaagtctgtgcacaacactaatcttgcctcgcttccttttttagtatccaatgtactctcgtgattatgtttatgttcggcggtatagtgtggatcaggaaaacaatgtgatggtcttggtgtcacggtatgtataactgctggagtacttgttaagttccactagctgtgcctaacccgtttgtaccttggctcttgcccttatgagtgccctgcagacttcctagcagccagtgcccatccattcctactcagggaattacccgtgaaccaccagggagactttgcagggtgggagtgggtattaagggtagaacctagagccttaatgctaagcaagcatggtactgctgagttattgccctaaacaagtgattctcaacctttttaatgctgtaaccctttaatatagttcctcatgttgtgacccttaaccataaaattattttgttgttacttcttaattgtaattttgctactattatcaattgtaatataaatatctgtgttttccagtggtcttagatgacccctgtgaaaggatcatttgacttcttcccattttaaaaggggttgagaccacagcacctgtctcagtcagggtttctattcctgcacaaacatcatgaccaagaagcaagttggggaggaaagggtttattcagcttacacttccatactgctgttcatcaccaaggaagtcaggactggaactcaagcaggtcagaaagcaggagctgatgcagaggccatggagggatgttctttactggcttgcttctcctggcttgctcagcctgctctcttataaaaccaagactgccagcccagagatggttccaccctcaaggggcctttcccccttgatcactaattgagaatgccttacagctggatctcgtggaggcatctcccaactgaagctcctttctctgtgataactccagctgtgtcaagttgacacacaaaatcagccagtacagcacctaaacctaagttttaaataattgttttgaatttcttaatattggtagaactagaaatacagcctgtgagccagacattacaatatcaaagaaactcatatttcatgaatacaacctgggttgtattcattcatttcattaactgcttggttttgagacagggttctacagttgtgcctactccccagccccactcatcctcactttaccattgattagtgccagaataaccattcccctctcccttacagtgcggtggaacaccccagtgtgccagagtctccagagtttgtcagggtcagatcttacgaatcccaaatggttatccgtcctcacaagtcgtttgatgaggtgagttttacctcgtgagagatgaatgttgaagctttgaaattttttcaaggaatgcctttgtctgaactggtgagaggtgacttgccagaatgtatgcattcgtcagctggaacttgtaaggtatattgagggccctggtctcacttcttgattgtttcaggagtggctgaaaaatgtatggtatgtgggctggagagacggctcagtgattcagagcactgcgctaggcagtgatggcacacaccattaatcccagagcatacaagtcaaatcctcagacataaaataagaaactgggatggaggtatgcattagaatgagctggcacttgtttgatacattgtgagccttagtctcacttcctgcttgtttcaaagatgtctagaaaatgtaagtccttaaaaataaatatttaaataaataaatctttaaagtaaataatttctgaattttatagaattctaaaggtcacaaatgactttattgttgttttctgttttttgagacagtctcattacatagcccaggccaagctgccttgacttgctgtgtagtccaagctgacatcaaacccacaggcctcctgccttaggctcctgagtgttacaaatgttcatggatacattcatttctctctgctcctgactggatgtagtgtaaccaacactcccaggctcctgtctatggatgtagtgtaaccaacactcccaggctcctgtctatggatgtagtgtaaccaacactcccaggctcctgtctttggatgtagtgtaaccaacactctcaggctcctgtctttggatgtagtgtaaccaacactctcaggctcctgtctatggatgtagtgtaaccaacactctcaggctcctgtctatggatgtagtgtaaccaacactcccaggctcctgtctatggatgtagtgtaaccaacactctcaggctcctgtctatggggaatgatataattaaacatcaagagactagtgagaatgaaatagttttaaatataccagtctgccaaaaggaatgccagtgtagagaagagaagatggtgtgctgatttgattgaatgttttttaagttcctgaatcacaagaaattcctgccctcttatccagtagtctgagatttggtcccttcccatattccccatcctgttgggttaggatgcagaatcttagccagtgaataatttggggcttttttctgatcatgggatcttatcacttgggaagtggcaggcaacctgtaacttcccaattctcagttctgaaacaaacaggtagcagctagaggtaagaaaggcccacgatgtcctgcttatttagactgaactctgagcagatctcatactgaaaacagaccataattatattttacaatttccatctcttttacttatggtctttttagatttgctttaatttttgctgttgttgttaattttccactttgggattttgagatgattgatttttaaattaaattaactgtgtatgagcattttgcctgcttgtatatttgtatgttgtgcccttggagactagaagagtgtgtcagattctttagaattagaattgtaaatagttaggatccaccatgagtgctaggaattgaacccctgtcttcgatagagcagaaagtgctcttatctgctgagccatctctctagtcccacagatggaataacttaaaagttttatttgcaggagctcgttttgtcatgtaaacagcctttgtggttgttctggtcatattcctaaagtgtggcttttacctctttgtgcatatttctacagtgctcagcatgaatttctactagggtatcattcacttattccctaagtactgggaattgaactcaaagcctcctatttgaggcaaaggatctaccattgaggtacaataccagtcagggcactttatcttcataatcagaagctccggaggacaaggactggagccgacatgttggctatgtagcacctagcaaagtgccagacacggcaggcattcaaatgtatgctaagaaatgaacagcaacttaacagtacattttgagcaggatgaggaggtgggttgctgttaagatgatcagtccagagtcttcatgcctctgcttttgaagtatggctagagcatttgttctttattctcttcatatagaacacaactgtttcaggcttctcttatgggcattattctgtttgctttgtaacctagtctcctccctctgcctgccaggtgctgggactacagatatgtgccaccatacccagcagtatcagggcactttaaccacctcaataatcctgagtccttttggtgttaggtatgagagggctgagccaaaaaacagtaggtgtagtgtgctgggcgtggtggtgcacgcctttaatcccagcactcgggaggcagaggcaggtgaatttctgagtttgaggacagcctggtctacagagtgagttccaggacagacagggctacacagagaaaccctgtcttgaaaaacaaacaaacaaacaaacaaacaaaaaaaaccccaacagtaggtgtataggcctggtggttagatttttcttacgtctgtctaaactggccatctataaaatggaagagggtggtacactgcagagctgcaaggacctaagagagctccgctgcacagtgttctctaaacagttattattagcactaagagcagaagggcaagatgagatctttaagttgtaaacattggggaactgtattgggtcctcagggctaccccatgtttgaagatttgctggagcaaatattgtagtcctagctaaaatttaggacagtgacattagtaaggacacgtggccagattataaaagaaaaaagacgcagaataatcttgagtccacctgaggcttccttctctaacaccaaaatacaacaatgtgtgtttaatgttttggctagaaaacttttagagacttaatgccaaagttttcactagaaaatctccatttaacatgtaagttttggatgcccgtgaaaaaaaaacttatcctccaaagaggctgcatgatagttctcatgatttggccacaggaaacttccctattagtttagtcttttactgggatcaagatagtagcctgcctttctatgaagaacagtgtttgtgcttttcatgtatagaggatactgtgtttcttctggttgctgtggtccttatctttgctacttttcttttccagaatggctttgactacttactgacatacagtgacaatccacagacagtgttccctcgatactgtgtcagttggatggtttctagtggtaagtatgggtgtgtatagcttgaatctgagctgaacaaacttgttttgttttgtttttttgtttgttttgtttgtttttgccttaatggcaacaggagggttgatactttttgtagtcatgttgggagaaatttgaaaaaaatcttcctatttcattctagctcctgagtgggatttgaaggtgtaagaaaaacaggggttctagaaagaaatttttttttaaacccagaggagagtttttaaaactcagcttgatgccttacatatagatggtgtacattgatgtattttttttgttcagtgttgttaaatgtctaggttggtaatgcacacctgtaatctcagtagtgggcacaggagctgagacaggaggatcaaggcctacgtgacaaaagtgataaaaccaaaattttttgttgttgttgtttttgatttccgagacagggtttctctgtgtagccctggctgtcctggaactctgtagaccaggctggcctcaaactcagaaatccaccttcctctgcctccggagtgctgggattaaaggcgtgcgccaccatgcccggcaaaaccaaaatatttaaggcataagatctggccaagaaaacttggctgtaggcagttacttaggggaagaaagggctactacctaacataagctgcatatcgtagccacagtcacacccacttctagcactttgtttagaaagtgttctcttgtgagtttcattgttcttgtttggattttccttttgttttttagttttgcataatacaggctggctttattctcttgatccttctacttgaaccccccaagttactggtgtaagatgcatgcatgactcctcatacactttactttcttctggggctctgagtagttccttatccctccgcaggagaatgggaagttaggtgtttattgtttgcctacctattctttaggctttggttttgagcctctcactggcctttttggcagctgtcctagtttgttttctgttactctaatgaacacatgaccaaaaaaaaatcaacttgttggaaaaagtttatttcatcttagagcttttgtccatcatcatgaaaggaagtcagggcaggaacctggtggcagcaactgaagtggaggccatagaggatcactacttactggcttgctctccacagtttgctctgcctgctattttgtgcaggctaggaccacctgactaagtgtggtactacacattgtgggtgggcacccttttatcagtcattaatcaagataatgcccttacatacttttctagaggacaggttttttttttttgaggtaggatttctttatgtaattttggctgtcttggaactcattctgtagaccaggttgccctgcctgtccatgcccatccaacttgtagagactagtcttatagaggcattttctcacccggggttacctcctcccagatgatgctagcttgggtcaggctgacaaaaaaaaaactaaccagtacaacagcttgactagattctgctgtgtcccaataggcatgccagatttcttggagaagctgcacatggccactctgaaagccaagaacatggagatcaaagtgaaagactacatctcggctaagcctctggaaatgagcagtgaggccaaggccactgctccatcccctgagcggaagaatgagggtagctgtggccctgctcggattgagtatgcttaaaggcctttgggataaggaaagacaggcacttccagccctgccttgctccttcagctctgctgcaggacagggacaagtcacacatgttagaagacatctgctgtaactgtcagtgcaagaggatttagaactggagttagatttcatctggagccctattgctctttaccaaacagaggagcatgacattgtggagttgtcatgttctcaggccagcagttgtgaaatccagtatcgtgcttacctactctggaacaacctctcatgttaggccagaaggagatgactcctatccgcctcctacgagaagcttccttgctgacattccaaatgccactgttggttatgcaatgctctggatatccttcagttctgtaggtcacttggagagtggttggcccctggttctcactaagtggttttttggagtgctcttggtaacagtcctgtggtggtgtgaacaattctggctgagctaagtgccttgtcctcaccttgctttatctttaaagacatgaagtttgtaccaagggatccttccccctgcagactaccatgacattgactcatctggtggaggcagctttcatcttaactggcctttctgttttcatgggctgtgctcactgtgtcatggcctctgccgtagccttagcccatttgctgggagcaccagagacaaactcctctagacggtagcttcctaaatgatgtcatcagtgttttgataggatcagtggaagtgtgcacaaaacatcttacttaaaaatagatttctttttaacccttgtagcaaatggagttaggtggttgagcacaactcttcccttagtcttgtttgttttggcactattttcccactgcagattgactgcgctgtcctggaaggataaaggtggtagatggtggttgtgccatttcctcagagttttcaaaactgtaagctgacatatgggccaacagatggagtcttgcccaataccagtatggtagggatggggcttttgtgacctcttggtcttgtaaagcatttctctccagagctgacatagaagtaatagacacagtttggataagatcacaaccagatgctaggtgcctggccttgctggtttctttatggtgaatagggatcaagtttcacatccttctctctcttttcctggaattaatagagctgacattttcttttcttgcttgctacctaccctgttgtggtgttaaaagagactaaacccaaggtgaacataatctttaaccttctgttgcctattcagttctgtgccaaggaaacagctaactccccagtgtttctgtcttttcggttgttggcagagcagagagtggcattgagaagccccagtgtctctcagtgagcatttttcccttcttcccaggacctgacaggaaaagaaaaaatctttatttgactttaacatctgtagctgactgcctgtgaatctgtgagcaagtgtaagcatgtatgtgtgcgtgtgtgtgctggggctcagggactgagcagttacgtttaccctttgttttgtgatttgactctgtacagttaacttgtgtcatcataatgagtttgctcttaactgtgacatttttatcaaaggtgtgaataaatgcataaagattggtacagaagagtgttcatttctggccacatggtgggaaactgtgctccttgtcatcctgatcacagacttggcatgggtcgtccgtcagtgggccttgttctttcttggcagacaatgggtgacacaaagatgacatcttgcatagactgtgacccctaagtggctagcttgggagctaacggtaaaatgcctgtctctactcaagtatcttgatctgctaactcatagctagaataagaaaaaggtttagttaagggaatctatgtcagatcttctatagacaggcttcgtagaagatgttttcttaggattttattgctgtgaagagacatcatgaccaaggcaactcttataaaggcaaacatttaattgggggtagcttacagtttcagagatttaatctattatcatcatggtgagaagcatggcaatgtgtaggcagatatgtgaagttggagatgagagttcttgatccaaaggcagccaggaggacactggattccacattgggaagaccttgagtataggagacctcaaagccccacccaccctcccatccaacggtaacacactaattccaacaagaccacacctcctaatagtgctactccctgtgggccaagcattcaaacacataagtctgtgggggccaaacctattcaaaccaccacattccactcccctggcccccacaggcttgtagtcataacataatgcaaaatgcatttagtctaacttcaaaagcccccatagcctatcacagtctcaacaatgattaaaaatccagaatcttctgagattcatgcagtcatgtaactgtaatcccctataaaatagaaataacaaagcagatcacatactttcaacatatggcacaggatatatgttaccattccaaaacaccatagaaaggaaatattggaccaaagaaacaccaaaagctagctgggcaaacctcaaactctgcatcactgtgtctgatgtcaatatacttttcagatctccagttcctttcagcttggttgattgcagcacaattctttctctttggctggttccactccctgttagcagctttcctcggcaggtattacacagctctggcacctctaacatcttagggtctctaaggcaacttcttcaatttcacagcttctggaatccccacatgatcttctgggctcctccagagggcttgtatcacttctccagctctgtcctctgtagcactctaggccctggctgaccactgttgctcttggtggttcttcaataatgggcagtaatatggaagtataaacagaattaaccctctgctctccaacttgcttttggtaattttttttttaaccatagcaatagtaaccctagccagacgtgtgtacttgtgcatgtgtgtatgtccgtccatcctcaaattgaagggccatgggataagaatccagagatgactccatagaccacaagcactcagctgtaattcaaatgatgatggctgggagttacgtgttagtgtgagctttttactttgaaacttttaatatatgtctaagggttgaaagaatgtttagaattactatgtgtcccatgggatgtagctcagtggcagagtgcttgtccagcacgaatgaagccttgggtgtgatcctcagttttgtacagtactaattccaggttacaggtgggtcagaagttcaaggtcacccttggctgcatggtaagtcaaaggcctgcctgggatacaggacactttgttatgttactcattgtgacaaaatagaaaaagcatttgagaccagaagagggctcattctgccttacagctccaccggatacattttgccaagacaaggaaggcatgatggcaggaacaggaggcttgctgccctggctgcctcccagtcagagcacacagtgaatgggaactggggctggctttttaaacctcaaggccctccctcaatgactcacttcctccaatgggtttttgcccccctaaagataccacagccttcccaaacagcaccaccaactggaaccaagtgttcagacactgctgagggggactgacacattcaaactacaccagacctcagaaaccttgcatcactcctcccgaggctgagaagctgatgggaggatgggagtactttctctgcatacgcttttccaagattgtttgaaaacaagtgacaagcatgctccccacgcccacataagaccacagagaacatccttttagtaatacagatgccagtgtgtgtgtgtgtgtgtgtgtgtgtgtgtgtgtgtgtgtgtgtgtgtgtgtgtgagatagagagagatacagtgggagaggcatgtgttccatggcataagtatggaagacagaggataactctgtacttggatctctccttccacctttctctgggttctagggatgaacatcaggttcatcctaaggagacttgcacagcaagccactactgaaccatcttgctctccccagtagtctcacctagtaatgcagctcatgttaaaagttccctatttgacccccaaatgacttacagttcccaatgccctctatctaagtattatgtgttacatttgtctttttactcattaattttttttttatattcattgtggtgggggagtcatatgtcccatagcatgcatgctgaggacaactccagaagccagtttctcagtcatgtgtgttctgaggattgaactacggttgtcaggcttggaggcaagcacttttacccattggacaagctagccagcccagctttatccattttttaaatctagagcatccacctactctttgtaatataacatcaccttaaacttggctacacctgctaatttttctaaactcctggagcctgagcagatacccctagcccagcccaggcatgagcatctcagggtgagtttactgtagcatggtcttcaagtgcagcatgtcctgaaaggcgaacacagagctctccctagattgtgcacttccatggtaagtcgtactggtggcttagagtgaattcagaattggccaacattgagatcatggtgttccagtactgtgtgccatgctttattctaagtctcctgtgccactaaccctgtactacagaaaaggaactgccttaagaggtagtgtaatcatcttgctcaaggccacacaggaagtgatgatggagccaggccgatgacctaaccttgacctctccatagacacctggtggcatagcttctccaggggcactgatttgttctgaggcatccattgtagctattttttttttgtttgtttgtttgttttttaacacatctgcaataatgtttcacccaggacaatgacttgagtttgcctatgaggtcacctcagcagtgtttccttgtttgaagcattggcctcatttctctccccccaaaactctgcatatacatcatatctaaaaggtggagggcactcttgggacagtcctaaaatatcattttggagctgggtggtgatggcagaggcagggggatctctgtgagtttgaggcagcctgacatgtggagtgagttccaggacaaccagggctgaaacagaaaccctgcctttaaaaaacaaaaccaaataaaacaaacaaacattttggagtccagtgtgatgacaagcctttaatcccagtatttattgtggcgggagaagcagatggaattctgagattttgagactagcctggtctacacagttccaggccaaccaaggctgtatagtgagacagtgcatctatctatctatctatctatctatctatctatctatctatctatctatctatctatctatctatcatctatctatctatctatctatctatctatcatctatctatcatctatctatctatctatctatctatcatctatctatctatcatctatctatctatctatctatctatctatcatctatctatctatctatctatctatcatctatctatctatctatctatctatctatctatcatctatctatctatcatctatctatcatctatctatctatctatctatctatctatctatcatctatctatctatctatctatcatctatctatcatctatctatctatctatctacctatctatctatctatcatctatctatctatctatctatctatcatctatctatcatctatctatctatctatcatctatctatctatctatctatcatctatctatctatctatcatctatctatcatctatctatctatctatctatctatctatctatctatctatctatctatctatttctgctttattttgagacggtctagccatacagccctagttggtctagaactcatacatttagccatcttcctgcctgtgcttcctgaatactggtcatataggtatgcatcaatgagcccagcaacactttataagtcttacatttcaaagtgactggtctcttctcttagcatggtagagttcagatagtgaatatagaatatctaagatccagccgggcatggtagcacacgcctttaatcccagcacttgggaggcagaggcaggcagatttctgagttcgaagccagcctggtctacaaagtgagttccaggacagccagggctatacagagaaaccctgtctcaggaaaaaaaaaatatctaagatccattatatccaataaatatacttaaaagtcttcaagattaatgatgtatgaaaaaaaagtgtggtcttaaggcaaggtgttccattaccataaacctcagtggctgcttagtatatcatgcaagcagaacaccttggctgtgtactgtcaactatgttttcctcccagtgtggttgattatgttcacacttaacttaggaagtaggtcaggacctgactttacatctacatagcttaaccacacctaaaattgtaggacaggtttttcaaagcagtaatattagcattttagacagttcattctcatgtttttcagctctgttgtgcaggttaagattatgctttcatgtctagggacagaaaggaacagcatggctgaaatgaatgtactgttgaactcttgaatgcagccagtccacagctagttcagtggctccatggcccccagtcccaggctcctgctttcccctgaggtggaatcagagcgtttcaggagtgaaacccagcagcccgttttacgttcccaagagtcctaatgtacaatatctgtggaaacaacagggaggtgtccaaagcttctctggagccagagccaagagctgcatggccttggacaaatgactgggcttctgttttcctcatcagtaaaataagagtaagagtccctgccttaatggatgtatctggagatatcctgagtgaggtaacccaatcacaaaagaagtcacttgatatgcactcactgataagtggatattagcccagaaacttagaatacccaagatacaatttgcaaaacacaagaaaatcaagaagaaggaagaccaacatgtggctacttcattcctccttagaatagggaacaaaatacccatggaaggaggtacagagacaaagtttggagctaagatgaaaggatggaccatccagagactacccaacccggggatccatcccataatcagccaccaaatccaaacactattgcacatgccagcaagattttgctgaaaggaccctgatatagctgtctcatgtgaggctatgccagtccctggcaaatacagaagtgaatgctcacagtcatctataagatggaacacagggcccccaatggaggaactagagaaagtacccaaggagctgaaggggtctgcaacccgataggtggaacaacaatatgaactaaccagtaaccccagagctcatgtctctagctgcatatgtagcagaagatggcctagtcggccatcattgggaagagaggccccttggtcttgcaaactttatatgccctagtacagggaaacaccagggccaagaaatggaagtgggtgggtaggggagcagggtggggggagtgtacagggaactttggggatagcatttgaaatgtaaataaagaaaatatctattaataataataataaaaaggtgaataccctaaaacttgggaacagacttggaattggaggcactaacctctatataattgacttcctcttgcaggatatttgatcatattgtgaaccccaagattgtgaactggaaacttttttttaactttatttattattaaatgtaagtacactgtagctgtcttcagacataccagaagagggcatcagatctcacaggtggttgtgagccaccatgtggttgaactcaggaccttcagaagagcagtcagtgttcttaaccactgagccatctctccagccctgaactggaaaacctaattgttatatggctcagctctagcacacaccttttatcaagagctttctgtaaacaagagctaaatgaagtcaaagataagtcaagaggtagagcaagcaaccagttgacagggagtggacatatggaaacccaggaaagagaaagaagaacctttgagctgaacatatttaaggtagtgtggagaagaagtagccttttccttatgtgaggttgatgaagtaggaaggtcaactgggtgctttctctgcctctctgagctagcaggcattcaccacagcatcagactcctgagtctttattggtaaaattgaatgtctgggtgtttttgtttttttaaaacaacaactcccacctctcaaaaaaaaaaaaaaaaaaaatcacaaagagttggagagtgttggcacacacctttaatcccagaattcaagagaaagaggcaggtgagtctcttttgagtttgaggctggcctggcctacatagtgagttcaagggataaagagaatctcttgtgcactgagtggaagcatcacttgtcaataaaaagctgatggcctattagcaaaaggcaggaagtaataggtgggaattcagtagagaaattggaattctggtagacagagacaggagattttgcccaacgtacgaaactgaggagaggtgtaaagatatgtgatttgcgaagaatgataccccagactcaaatagtatgcaacagcaaagagcatttattctgtagagagcctgcatgcaggggtcaaccatatttaggatggaagccagaggtgtggactttacagggttaatttaaagcgtgttaggggaggtgtgggtcacttttacctttctttcctttgattggttggttctatctccaggggtataggtgcctttatgattggctaaggctctgaaggattgggggtggggagcttttgctgattagctatacttggctcaagctaggtggtgggacagtttctacaactcctgcctgtgaggttagatcaggctaggtagtggggcaacttcctgattggctgaccgtgaggtgtagttccccctcccaccccacgttggaattgtcttgttacaaacttttcatgaagtcagcctgtctttggctaactctgtcctcacaaggtaactagccttatggcagtctaaactagtttaaatggaatacttgagttactagctagcaggaacaagccaaagcttatgacctacacatttactaataattaagtctcagaaaacaaaggggccatgtaggaaagctacacaaagctccatgaaggctacacaaagaaaccttgtctcaccttcccatctccatatatatgcccaaaacctgctgttgcctaaaagccttaactggtaacaggcaggtgctgaacacattttgttcaggaccctatgctgtgacagtttaaagctaaactgcttagactaacgactggcagttcactaggcctcctcagtgtggaatgtaggctgagggctggaaagatggcacagcacttaagagcgccatatctggtggctcacagccttatataactacagctccaggtgacccaacacttctggcctccaagggcatacacacacacacatattcacatcgttttaaataaatgattaaaaataacaagtgtaggatggttagttttatgctgttaacaattctgactgtggctgtgtttgtttctcctctgcaaatgaccctgcatgttttgaatctgtgtgcataagtttgataactttcaactattggttttttgatgcaggatttctctgtgtatctctggctgtctttggatcttgctttgaaaccacactggccatgaaatcaaagatcaacctgcttctgccttctgagtgctgggactaaaagtgtgacccactatacctgacacttggaactttttataatagatttgtgtgtatcttcttgtcttgtttctttctttcttttttcttttttcttttttttttttttttttttttttttttttttttggtttttttttggttttttcaagacaggatttctctgtgtagccctggctgtcctggaactcactttgtagaccagaccaggctggcttcaaactcagaaatccacctgcctctgcctcccaagtgctgggattaaaggcgtgcaccaccaccacccggttcttgtcttgtttcttaagacagggtcttcacatgtagccctagctggcctgaatcttgtcatgaagcctaggctgacctcaaattcacagagctctgcctgcctcttcttccaaatgatgggataaatggtgtgtgccttcacatccagctacttgtgtttatcttacttattaaataattgatactgttccctgcgtaactttttcttattatgtctgtgttgctgtgtctgtgagggtatgggtgtagatacccatgaaggccaggagagggcatcagatctcttagagcttgattgacaggtgttgatgagcagcctgatttgggtgctagggtcttaactctggttgtcatggttaagcagcaagtgcttttaaacactgcccaagctctccagaccccatattttttttcttagtatcttcaatgtttctaggctccaaacttcatctgcattttttctaattgtcaaaaatcttaacaatgacaaatccacatataaatgggcctgcagagttaaaattcatgtttaactgggctcacagtgtgctgagacactgccagatccacttcggccgccttagtttcccctggttgtatttctgtacattttgtagcatgtcagtgtccttttaaaactgtggagttctgggttggaccccatctgctcccacaaggaaaagaccatactggccactgccgctggtcccttggtggctcctgcttcactgccagccttcccatctgggttgggataaggaggaacaatggcacgttctcgttctgaaaagtgcccatctccttcctggtgcccatcattcctttccacggcctgacgtcagcatgtagtcagaataccattgcttctgggaagcagacgctaaggtcaccggttctcaacctttctgatgctgcgaccccttataggtcctcaagttgtggtgaccccaaacaaaattatttttattgcttacttcacatctaattttgctactgttatgagttgtaaatgtcttttgttttccaaaagtctttggcaaccccaaaaggggtcaagacccgcagttgagaatcactactctaaattctgagcattcatcaacccattctgatgcctcctacgagggcagcaggaagagcagaagtgggaggcaaccagtcggctttgccaaaaattacagccgcccagaaagcatgttgcatttatttatttattttaatgtttatttctaaagatatttattgttagtgtatgtgtgtgtgtgtgtgtgtgtgtgtgtgtgtgtgtgtgtgttggggggaaacctaccgcagcatgggtgggaaagccagagaacaacttctaggggctggtactctcctttcatcacaggatctgggaatt

SEQ ID NO: 716 - DNA, 3098 bp, Mus musculus
cggacacaggcgcacgggaccgcttctgctgtggcctgggacggccaccgctttgcttcccgcgccctggccgcgggggccccgcgagttcccgccgtacacacagacgggcgggctgtcgggaccgagagggcctcgtgcaacggcgctctcctcggaagccacgctacctcagccgcttctgcaaaaaggcatgagggacggctcctggcttctggagcgtgaggtggcctcggggtcaacccgttaaggggactgcgcggacggcccggcctgccttcccccagcccttcctctccggggccccgcggcaggcgcgggaatccacagaggccgacatgttcccgaggaggccaccggccaccctggccgcctggctggcgggcgcgcggggcgggggcctgctgtccgcgctggccaatcagtgccgcttcgtgacgggcctgcgcgtgcggcgagcgcagcagatcgcgcagctctacggccgcctgtattccgagagctcgcgctgcgccctgctcggacgcttctggcgccggctgcgaggccgccccggccatgcctctgttttgatggcggcgctctccggtgttttcgtatgggacgaggagagaatccaggaggaggagttgcagaggtccattaatgagatgaaacggttggaagaaatgtcaaatatatttcagagctctggagttgagaatcaccctcccgaaccaaagtccccagcaggagggaatgaaaagtcaaaagacaaggaagaaccctgggaaatggtgatggacaagaaacacttcaagctgtggcgccgcccaattacaggcacccacctttaccagtaccgagtttttggaacatacacagatgtgactccccgacagttcttcaatgttcagctggatacagagtacaggaaaaaatgggatgcccttgtgatcaagctagaggtgattgagagagatgctgttagtggttctgaggttcttcattgggtaacccattttccttatccaatgtactctcgtgattatgtttatgttcggcggtatagtgtggatcaggaaaacaatgtgatggtcttggtgtcacgtgcggtggaacaccccagtgtgccagagtctccagagtttgtcagggtcagatcttacgaatcccaaatggttatccgtcctcacaagtcgtttgatgagaatggctttgactacttactgacatacagtgacaatccacagacagtgttccctcgatactgtgtcagttggatggtttctagtggcatgccagatttcttggagaagctgcacatggccactctgaaagccaagaacatggagatcaaagtgaaagactacatctcggctaagcctctggaaatgagcagtgaggccaaggccactgctccatcccctgagcggaagaatgagggtagctgtggccctgctcggattgagtatgcttaaaggcctttgggataaggaaagacaggcacttccagccctgccttgctccttcagctctgctgcaggacagggacaagtcacacatgttagaagacatctgctgtaactgtcagtgcaagaggatttagaactggagttagatttcatctggagccctattgctctttaccaaacagaggagcatgacattgtggagttgtcatgttctcaggccagcagttgtgaaatccagtatcgtgcttacctactctggaacaacctctcatgttaggccagaaggagatgactcctatccgcctcctacgagaagcttccttgctgacattccaaatgccactgttggttatgcaatgctctggatatccttcagttctgtaggtcacttggagagtggttggcccctggttctcactaagtggttttttggagtgctcttggtaacagtcctgtggtggtgtgaacaattctggctgagctaagtgccttgtcctcaccttgctttatctttaaagacatgaagtttgtaccaagggatccttccccctgcagactaccatgacattgactcatctggtggaggcagctttcatcttaactggcctttctgttttcatgggctgtgctcactgtgtcatggcctctgccgtagccttagcccatttgctgggagcaccagagacaaactcctctagacggtagcttcctaaatgatgtcatcagtgttttgataggatcagtggaagtgtgcacaaaacatcttacttaaaaatagatttctttttaacccttgtagcaaatggagttaggtggttgagcacaactcttcccttagtcttgtttgttttggcactattttcccactgcagattgactgcgctgtcctggaaggataaaggtggtagatggtggttgtgccatttcctcagagttttcaaaactgtaagctgacatatgggccaacagatggagtcttgcccaataccagtatggtagggatggggcttttgtgacctcttggtcttgtaaagcatttctctccagagctgacatagaagtaatagacacagtttggataagatcacaaccagatgctaggtgcctggccttgctggtttctttatggtgaatagggatcaagtttcacatccttctctctcttttcctggaattaatagagctgacattttcttttcttgcttgctacctaccctgttgtggtgttaaaagagactaaacccaaggtgaacataatctttaaccttctgttgcctattcagttctgtgccaaggaaacagctaactccccagtgtttctgtcttttcggttgttggcagagcagagagtggcattgagaagccccagtgtctctcagtgagcatttttcccttcttcccaggacctgacaggaaaagaaaaaatctttatttgactttaacatctgtagctgactgcctgtgaatctgtgagcaagtgtaagcatgtatgtgtgcgtgtgtgtgctggggctcagggactgagcagttacgtttaccctttgttttgtgatttgactctgtacagttaacttgtgtcatcataatgagtttgctcttaactgtgacatttttatcaaaggtgtgaataaatgcataaagatt

SEQ ID NO: 717 - protein, 414 aa, Mus musculus
GTAPGFWSVRWPRGQPVKGTARTARPAFPQPFLSGAPRQARESTEADMFPRRPPATLAAWLAGRGGLLSANQCRFVTGLRVRRAQQIAQLYGRKESSRCALLGRFWRRLRGRPGHASVLMAALSGVFVWDEERIQEEELQRSINEMKRLEEMSNIFQSSGVENHPPEPKSPAGGNEKSKDKEEPWEMVMDKKHFKLWRRPITGTHLYQYRVFGTYTDVTPRQFFNVQLDTEYRKKWDALVIKLEVIERDAVSGSEVLHWVTHFPYPMYSRDYVYVRRYSVDQENNVMVLVSRAVEHPSVPESPEFVRVRSYESQMVIRPHKSFDENGFDYLLTYSDNPQTVFPRYCVSWMVSSGMPDFLEKLHMATLKAKNMEIKVKDYISAKPLEMSSEAKATAPSPERKNEGSCGPARIEYA

SEQ ID NO: 718 - DNA, 44063 bp, Homo sapiens
  misc_feature (1)...(44063): n = A,T,C or G
cttgtggctgtcagacaaccgtttccttaaatatcaggctctactacttgaagggccagtgttgcgaatgcacatttgtgcaactctcagccacatttcttcctaacaataaagacagaatacaactgtcaataggtgattgctcaaacctatgctgctcgaggcgaccttctagaggttcccttgattgatcccgacctcaacttgtatactaatggaaattcctttgtagaaaaaggacttcaaaaagcggggtatgcagtggtcagtgataatggaatacctgaaagtaatctcctcactccaggaactagtgctcagctggcagaactaatagccctcactcggacaccagaattaggagaagaaaaaagggtaaatatatatacagactctaagtatgcttacctagtcctccatgcccatgcagcaatatggagagaaagggaattcctaacttccgagggaacacctatcaaacatcaggaagccattaggagattattcttggctctacagaaacctaaagaggtggcagtcttacactgccagggtcatcagaaagtaaagggaaatagaagggaactgccaagcggatattgaagccaaagatccgcaaggcaggaccctccattagaaatgcttatagaaggatccctagtatggggtaatcctctccgggaaaccaagccccagtactcagcagaagaaatagaacggggaacctcaggaggacatagtttcctcccctcaggatggctagccactgaagaaggaaaaatacttttgcctgcggctaatcaatagaaattatgtaaaagccttcaccaaacctttcactcttactgcaccccctgtatgccgctgtactaccagtagctccccttaccaagagcttctatgaagaatgcggcttcccggaaatattgatgccccatcgtataggagtttttctaaagttgcggaaaccccactttcactgcccacacccttatgcccctgcacttcaggctacacatttcaatccctgtatctttaacctccttgttaagtttgtctcttccagaatcgaagctgtaaaactacaaatcgttcttcaaatggagccccggatgcagtccatgactaagatctactgtggacccctgctagcccatgctccgatgttaatgacatcgaaggcacccctcccgaggaaatatcaacggcatgatccctagtatgcccaaattcagcaggaagcagagcggccgtcggccaacctccccaacatcacttgggttttcctgttgagaggggggactgagagacaggactaactggatttcctaggccaactaagaattcccaagcctagctgggaaaggtgactgcacccacctttagacatggggcttgtaactcagctcacacccgaccaatcaggcagtaaagagggctcactaaaatacaaatgaggctaaagcagaaggtaaagaaatagtcaaatcatacattgcctgagagcacagggggagggacaatgatcgggatataaacccaggcaatcgagcagggagcggcaaccccctttgggtcccctcccattttatgggagctctgtttcactctattaaatcctgcaactgaaaaaaaaaaagttaaaaagaataatgataggtactaaattgctatgatatagattccattggatacatttgaaaatgatgtaacatctttattttaaaataatatttacaacaatccagaaatggtgtaatgtgcaatcatttaaactcataatcttggatcaccttaaaaaatgcaaagtggggatatagtttttcaacattgttctggggatacacaagtaaacaaagtttgttgataacaggtggagcaccatggctcatgcctgtaatcccagcattttgggaggctgaggcaggtggatttcttgagcccaggagttcgagaccagcctggtccacatggcaaaaccctgtctctacaaaaaaatacaaaaattagccaggcatggtagcatgcacctgtagtcccagctacttgagaggctgaagcaggagaattgcttgagctgggaggcggaagttgtagtgagcagagatcaagccactgcactccagcctgggtgacagagtgagaccctgtctcaaaaaaaaaaaaaaaaaaaaaaaagttggtttatttgaagggaggtcatctgagacagtactattagaaccttaaaaaaagtgacagaattctgtcaaaaaattgattttttaatttctaaacaggaagaaatgatagggaggtacagaaatagaggcaggaaacatatagttgtcccttggtatctgcgggggatttgttccaggacctcctgtggatgctcaagtccctgatataaaatggcatagtatttgcacataatctatgtacatactcccatatactttaaatcatctctagattccttataactaatacagcgtaaatgctctacagttgttatactgtattgtttaggggaggggtgctcacagcgcattaccgcctgaactctgcctcctgtcagttcagcggtgacactggattctcacaggagagcgaaccctattgtgaactgtgcatgctagggatctaggttgctatgagaatcttactaatgcctgatgatctgaggtgaacagtttcatcccaaaaccatcctaccccgtccgtggaaaaactgtctcccatgaaaccagtccctggtgccaaaaagtttggggaccgctggtttagggaataatgacaaaaaagtgggtacatgtttagtatagatgcaattttttttcccaaatattttccatccacaattagttgaatccctggatgcagaacccgtaaatacaaagggccacctgtatatgccattgtttttaaaaatatataggccgggcgcggtggctcacacctgtaatcctagtactttgggaggccgaggcgggtagatcacgaggtcaggagttcaagaccagcatggccaagatgctgaaaccctgtctctactaaatatacaaaaattagctgggcgtggtggcacgcgcctgtaatcccagctacttcagaggctgaggcaggagaatcgcttaaactcgggtgccagaggttgcagtgaggcaagatcaagccaccgcactccagcctgggcaacagagcaagacttcgtctcagaaaaaaaaaaaaaaaaaaaaaaaaaaaaaaacaacttagcagtggaaagagaagtggtatctagaaaggggaagagttaaagcctctttttaaagacttttatccccaaagccttttttgaagatgaactcgattatgtttatgtactgatgggaaacaggcagtaggatggagaaaatggctgcattagagaggctcagcaggagtttctgaggattcgtttggtttataggatattggtagaaaacttatgtatacatataaaatcaaacccacaaagtactcctttttttttttttttttttttgagacagagtctccctctgtagcccaggctggagtgcaatggcatgatctcggctcactgcaacgtccgcctcccaggttcaagcaattctcctgcctcagcctcccaagtagctgggattacaggcatgcaccaccacacctggctaacttttgtatttttagtagagatggggtttcaccatgttggccaggctggtctcgaactcctgacctcaggtgattcgcccgccttggcctcccaaagtgctgggattacaggcgtgagccaccgcacccggccaaagtgctcctttaaaaaaattattattattaagaaatccacttctctaactgtcacaaagtccaggctgagttaacagtgatgagttccggaggtaactccaccccactccgggttttctggttacaatcactgtattcactctccacctcaactgaaaacccagactcaggaagcctcaagccctgcccttctattcctggcagatgccaaggccaactatgtaggaggcttttttagagaagacacttcatcttcccaaaagacaaaccctccactctgctttatgaggcagatagcaacaacaaaccaccaatgggttggggcttgcgcaggcctcattggctccttttaaaaatgtttttagagagagggtgtagtggcttatgtctgcaaacccagcactttgggaggccgaggcaggcagatcgcctgaggtcaggagttcgagaccagcctgggcaacatggtgaaactccgtctctactaaaatacaaaaaatttgctgggcatggtggcatgggcctgtaatcccagctacttgggaggctgaggcatgggaattgcttgaacccaggaggtagaggttgcagggagccaagatccagcctaggcaacagagtgagactccgtctcaaaacaaaacaaaacaaaacaaaaaacccctggctaaacacggtgtcaaatactactttctgttacatacacatttcttcttcactgctttccagatgaaataaaacctcattaatccaacctaaaatcggacaggctggataggaaagacctaaatttcggttcccaggaaagcataatctctctttggagaaacagttacttttattaagaacgtctaaaatcgcataactctttagctacagtaaaattcctaaatgccttggaaccagcagtccatttcacaccaagacagtttataatattttttcttctgtcaataaggtgcttaaatataagatttaaaagggtaaggaaacaacttagcagctttgttttaatgaggctggatacagaatagtaatttaatacactttgagatcatttagccaggttgctcacaggtgagtaaatctgtttaccttccaacactgtcacctttgggtcaaaaagagagggacagctactacttgacctagggcatctgccccaacaaactctcttctgttgctcttttaccaaaaggctgacatatttgcagactgcgacgggccacctgcccatgtgactccctctggactgtcctgggcgctcaggctgtgacacgggtccattcttggaccgaggagttagcagagaggaatgtttggggtgcttctgggagagccaggaggggaggccggggaaggttttgatggcaggcgtcgaaggaaggttttgatggcaggcgtcgaaggcctgaggagtcccccttcaccagtggtgtctttactgccccctaccccatcctggtgtaaccacccaatgggttcaccttgcctgctgcatagacagagctgatttatcaagacaagagaattgcaatagagaaagagtaactcacgcagagcccactgtgcgggagaccagagtttcatcattactcaaatcagtgtccctgagcatttggggatcaatttttttttttttttttgagatggagtctcgctcagttgaccaggctggagtgcagtggcgtgatctcagctcactgcaacctctgcctactaggtgcaagcaattctcctgcttcactcagcctccctaatagctgggattacaggggtgcactactatgcccaggtaacttttgtatttttagtagagacgggattttgctatgctggccaggctggtcttgaattcctgacctcaagtgatctgcctgccatggcctcccagcaaagtgctgggataacaggcgtgagccaccgcactgcacctggccaagagacctttttttttttttttttgtgagacgcagtctcgctctgttacccaggctagagtgcaatagcgctattgtggctcactgcaaccttggcctcctgggttcaggcgattctcctgcctcagcctcccaaatagttggtattataggcgcccaccaccatgcctaatttttgtattttttgtagagacgaggtttcgccatgttggttaggctggtctcaaactcctgacctcaggtgatccgcccacctcagcttcccaaagtgctgggattaaaggcatgagccactgtgccaggccccaacccagagttttaaaggagactttggtgggtgggggaaggtcagtgagtccagagtgctgattggttgggtccgagatgaaatcatagggaattgaagctgtcatcttgcactgagctggttcccggttgggggtcacagatcaaatgagccattttatccatctgggtggtgccagccgatccatcaagtgcaaggtcagcaaaatatctcaagcactgatcttaggagcagttcagggagggtcagaatcttgtagcctcttaaaccttaacttctaaccttgtggctaatttgttagtcctacaaaggcagtctagtctccaggcaaggacctttgttttgagaaatggctgttatcctctttgttttaaactataaattacgtccctcccaaagttagttcagcctatgcccaggaatgaataaggacaacttggaggttagaagcaagatggagttggttaggtcagatctctctgtctcagttataattttgcaatggtggttttaatccctccctttgggtttataacacctttatcttaaggtgttgttaatgaagatggaaaaagggcaaagaccttaacttcttcctactaaccaggggtgtagtgaggggtaggtgttgactccaaggtgagaggagtggaaccactttgcaactgtctgagtgtactcctgcaggcctgactggggttcgaaggcttgcatggcaaaggcattagtattgccacctatagttttcgtactgtgtttaagggaaccgtgtactataagggaaataatgagtactagggtaaggagtgcagttcccagttttaaaagtaaagatttaaaagcattagcctgggaacttgtagcccacaaagaatttaggatttagttcaaactgcagaaaaaaacttaagaacagttaacaaaaggtgtaccacagtttttcttctgaagcataatttttctctctccagttcccatttttactaaaaacaaatcatgatagaactgatttgtttacaaaataaaccgcagtcttattgtacttggcctgatgatttgcataaagtgaagcaagaataattatttttcacataggctttgtttttttttttgagatgaagtcttgcttcgtggcccaggctagagtgcggtggtgcgatcgtggcttactgcaacctccgcctcccaggctcaggcgattctcctgcctcagtcttccaagtatctgggattacaggtatctgccaccacgcccagctaactttttgtattttcagtagagacagggtttcaccatgttggccaggctagtctcaaactcctaacattgtgatctgcctgccttggcctcccaaagtgctgggataacaggtgtgagccactgcgcctggccttcacataggcttttaaaattggctttgatggaactctgttccataagaaatcttagataagacctttttaaagccaagcccagccatgggtttgtaccctcgaatacctatgagttgggtaaattcctctcctcttgaggtgtcaagataacttaggtctcctgagcctgttagaaagtgacattctttacttaccacaggtcaggaacctcgtacagggactgtgttgacatagtatgaggccagatttcccaaggggctctataagtcaattttttggcttattggctctataagtcaactttgttttttttttttttgagacggagtctcgctctgtcgcccagggtggagtgtagtggcgcgatctcggctcactgctgcaagctccacctcccgggttcacgccattctcctgcctcagcctcccgagtagctaggattacaggtgcccactaccacgcccggctaattttttgtatttttagtagagacgaggtttcaccgtgttagccaggatggtctggatcttctgacctcgtgatccgcccgccttggcctcccaaagtgctgggattaaaagtgtgagccaccatgcccggcctagagctcttttttctaagaaaaaatccttttaaggccaggcacggtgggtcattgaatcgtgaattcaatgggtggtctctgagcagtcaccctgaatcaggcctgttaaacttctttcagggctcactgaatgtgactagataaataaggagtgttctccaagttaggcctgctggattttcatcagcaattccttcagagatcccctccatatatacaaacacacacacgaagacaagacagacagaaggccttccaaattaaggtccctaaccaagaactccaagagtaccccttccaaactatcctcctattctccatctgacaaatctccctgaaatattcctgattgagaagtctcccgaaccaagactcttcctagttagggacagccaactgggatgccccaggagccaaactgagacagacaccccatggtggagctacagacacccaccatgtggctacagaatcagtccggagaaggaaggaggcactggcagcacctaggatactcagcaacctgccaccccatgatggggctatagctacagacactccatgacctggctacagcgccccgctatggagctacagataccctgtgacagggctacagttatgggatgtctccccaggactatttctccattgcgattaagtccatgcatattgggctagcagtgccccactggcagagacggtgccagagttagcccctagtccaagagaactatgtggccgcttaggctggcctctggatctgtcaccagaggtggggctaccgaaccatggacaggtagccacaaggggtatcccagacgaacccccaaatttgtaaccgtacaatgggttcaccttgcccactgcctagacagagccgatttatcaagacaggggaactgcaataaagagtaattcacgcagagcccactatgagactggagtttgtttcaacattactcaatcagtctcccttagcattccgggatcagagtgtttaaggataatttggtgggtgggggaaggccagtgagtccagagtgttgactggttgggtcgagatgaaataatagggaattgaagctgtcctcttgcactgagttggttcctgggtgggggccacaaggtcagatgagccagtttatccatctgggtggtgccaggatccaaccagtgcggggtcagcaaaatatctcaagcactgatcttaagagcagtttagggggatcacaatatcgtagcctccagctgcatgactcctaaaccataatttccaatcttatggctaacttattagtcctacaaaggcagtctagttcccagataagaagatttgttttgggaaagggctgttatcctctttattttaaactataaactaagttcctcccaaaattagttcacctaagctcaggaatgaacaaggacagaagcaagatggaattggttaggtcagatctctttcactgtctcagttttaattctgcaatggcggttatcactgggagcccccagcccccgcagagacatgcggagccccgcccccaccctgcactctaataaagaagggggccagcgtgccggcctcttaaaacaagttaacacctggcaggattctaacaggaacctggccaggtttctccgcggggcggggctgggacggccggaagatggcggcgacggcggcagccgggtccgagggtcactctccaatgcgcccttgacggctctcgccgccgagccacctaccttgctagcaggcggcctccgcgcatgcatgaaggggcaggagggggcggtgacgagcacttcacggcgccaatgagcacccaggagcccaggtcgcgcccaatcacggcccaggtggcggagaaaaagtagggtgcgcgcgcgccgcgcgtgtggcagtcgcggaaggcgcgggagcttgcgtgctgctgggcctgagctgtctgtctcgtttctgtccgcgcgccctgcatcccggccccgggcgcccgctggaggtcgccgaggagccacagggctgactggtctgctgcccgggcccaggagtgcctggtgtagcagtcgcggagccatcccggcgtctgctgccatgaccgactctcccctcagaggagactcttcctcagcggtggctgcagagacagatgagcggcggctcctggccgcgggaccgtgagacgggttcgtggccggccatttagggggacgctgcgaccaccgcctgcgcccctccggactggttccttgggccccggaagctcgcggcgggccctgcgggaggcggcatgctcccgcggaggctgctggccgcctggctggcggggacgcggggcgggggcctgctggcgcttctggccaatcagtgccgcttcgtcacgggcctgcgcgtgcggcgcgcgcagcagatcgcgcagctctacggccgcctctactccgagagctcacgccgcgttctcctcggccgcctctggcgccggctgcacggccgtcctggccatgcctctgccttgatggcggcgttagccggcgtcttcgtttgggacgaggagaggatccaggaggaggagttgcagaggtgggcgctgcggcgagctctttctgggccgtggggtgggggggcttgtgaaccctggggcctgccctgtggtcgttggcccttgtttacccggtggtcttttaattggcaatacagtcgattgaacctgcttcagcaaaccgcgttgttatttgtctctgtgtgtcaatttgcatttgtcgggttataaaatagaactgaaagtgtgtaggctggtgtgtaggagggagactttgagtggggcgagcaagacagtaaagaaacaacactgtagaaatcaattagatagcgaaggcatggaggcccttgttcatgtaatctgtaatctttaacacaaccagaaaggtgcaaattcaaaacaaattttaaatttggcctaagggtggtgggctgctatttgcaaaatgacttcaatccagatgggactcaggcctgtgagaaaagccaggagagccctctgtcatcgtgactcgtggcaaaattgagagcctggaagcgattttgtccaggttacacaaaccagcagcccagacatttgaacctgtaagaattaggtcagatttttgcgacgttaactagaactttgggaatagtgtcccattagactctgaagtcatgctgtcgtcatcaaaactgtgaaaagcccagtaccattgattacgtttgttaatctgtagttctgagactgtagtttccaggtaatgtcatggggaaactttgctttggtttttggtttaccttgtgtctgtattttctttgcaacagatattcttaaactgtgccctccctgcacagaaagtactttgccgtgatttcgggaaccagagacaatcccctccctccgcagattccacactcgcctgtttattcttgatatttcctccacagggaaacaacctgttattccacattttttgttaggttaaaaatggaaataccccaataaagtttataccatggcctgtgtgggaggtgtaacacccagatgccaggcagctatttgtgccacactatgaattgtgggtaaatgcaagtctatcttaagaactgggaatacttttcctagcaggaaagataacttttataaatgcaacttaaaataataaccacaaacaaccttattcacaaaaaagttaagctatcaaagcgtgataggtattttgcctagttcctattagtattcttttgctacttggccattggttataatcacagtctcttgggtgtgggaaataaaagaataggaagaaaacttctaagttgacaaattatcattaacttttaattttcatttttgatgatgaaatgtccgtgttccacttttttttttttttttttttttttgagacggagtctcgctctgtcgcccaggctggagtgcagtggcgcgatctaggctcactgcaagctccgcctcccgggttcacgccattctcctgcctcagcctcccgagtagctgggactacaggcgcccgccaccacgcccggctaatttttttgtatttttagtagagacggggtttcaccgtgttagccaggatggtctcgatctcctgacctcgtgatccgcccgcctcggcctcccaaagtgctgggattacaggcgtgagccaccgcgcccggccgtgttccacttttaagttgaaaaattatcattaactttgaattttcagttttgatgatgaaatatccttgttccacagttaagtttgagaggaaaatctccagttggaattgttggggtaagaggagaaagaccaggaaaagggctactgggtacaaaagagaggaaaggagagtttgggggtgggagttgaatagtgttggggcttacgtagtagatgacactctttggcttattttatgcatttttatggatgatattaatagatcctggagcctctgtttagcagtgctaaacagagttagtggggagttagtggggaaaaaagataggaaatgaacatagtaagcatttgagttagtcagtatttatcatggcagagagatcagaccagttcatgactgagcctctggtcagactgtccctgaaacctggaggcaattgaaatactcttggttctactccaactcctcaagagggactgctctgagttaaccagctttggaatttcaggagttcagatgaactccagaacactttcaagctgcactttgacccttcttagggttgttatagtaaaggccctcatttaacatttcattgtttggttcatgcttgaatttggtttttcatgtaattaaaatttgatcatgttgttcatcttgaggattttttttctttttaaaatatttgttaatgtgataggaaggcaaatatgctattcaacaactacatcttggttgcacagtggttccttaggtctttgttttgatagcttgtcatgtttatattttattaaaatattctgggtacagattaacttatttgctttgtgtttaagtattctatttgcttgaaagtaggcactgctgaggttgtcatagctagcttagaacatcttggatttcgtttgttctagtgagatgatttttgggtagcttccataatggagcacagttggagtgtgtctcaagtgcatttctttcattgttaatggaaaaagagcatgattgtcacatggcccctaaatcacagcctttggctcatctgtgctgattctgtaccaacttgtcctggcacaaactaattctaacatagctgttttggttaagcgggtggaatgtgcagggtgtctttttgaatgtgtgccttaaagtggcatgtgttttccttatgttatttgagtcctattcagaatgacaaagcataacttgtcttctcgtcttttgtgcttaagaacatcttaccaaatagcgtcttattaatcaagcaacagcaagaaaatttgagaagtgattttgactggctgctgtggccagatgtagaaatcagatcttttaatacttgctctagtacccagttgtcttaaattaaacaacgaaaatatcttgggattgctgtttttggtgctagctggcattctgtgattccagggcaaatctaatggaaaaatacagtagtcatgtttttgattgctttggaacagttaaaaagaaaagttacaggaacaaagagaggaaggatgttaagaaatgaaaggctaggggaaaatgttccattaacctcctcatagttttttaaaagttacagttcattgctccagaaatttgagtaaataagtgccattaaagttgcataaagaaaattggccattttctcttttctgtctttcagggcattcgggatatgttaaacttcagtgtgttattgactagataaatgatccgcataaagtccttttgccttaaaggaacttttttttttttttttggccattgtcacttcagggtatcttactggtaaacccttaaaccccttgttagatcttcagagctacataaaattagatctcaattttttgaggttgtcttcattattttaccattaactagttgccctagaactgcaatgagctaattgatgtcctgtcctgtcctgtcctccccttccctcccgcccccttccgggacagagtctcaccctgtcgcccaggctggagtgcattggcatgatctcggctcactgcaacctccgcctcccaggttcaagcgattctcctgcctcagcctccactgagtagctggattacaggtgcttgccaccacacccggctaattttttgtatccttagtagagatggggtttcaccatgttggacaggctggtctccagctcttgacctcgtgatccgcctgtctcggcctcccaaagagttgggattacaggcatgagacatcacgcccagactcttttttttcttaagacataatctcactctgtcgcccaggctggagtgcagtggtgtgatctcacctcaccgcagcctccgcctccctggttccagctattctcgtgcctcagccttgccagtggctgggtctacagcgggggtgccaccacgcctgtttaatttttgtatttttagtggagacggggattcaccatgttggccaggctggtctcgaactcctgctcctgacctcaaacagtcctcacgccttggccttccaaagtgctgagagccaggcgcctggctctatgtctttttttggggggtatggagtcttgttctgttgcctaggctggagtgcagcggtgtgatctgggcttactgaagcatccacctcctggtttcaagcagttctcctgcctcagcctctcaagtagctgggactacaggcatgccccaccacgcccacctaattttgtgtgtttatttttagaagagaaggtttcactgtgttggccaggctgatctccaactcctgatctcaagtgatccgcctgccttggcctcccaaagtgctgggattacaggcataagccactgcgcctgactcctatgtcttttatttctaggtgtgtcccgtatcagtagaacctgactttgacaataacttggaatttgaagaggaggagaattatgtgaagtgaggctgttgtctgactgaaattcctaattgtagggatggtttcatttaagtaattttggagccttacaccaagctccatgctgagggcaggacccctagatgaaccaaatgttgtttcacttactttgttttcatggtttgtttgctttcagtttctatagctttcggtccagcctttttcagatattgaaatgattttcgttttggagaaagaaaggcatggtctctcttttcttgatcctttttctaatctgctgattttactattttgggaataatctcttttgtccttctgtcctctcttaagtctcttaagatgtgaaggtttagccacccatcccatccaaacaagattgggcacagcagcctaaagagatgtgtcatgagaggttttccttttctccacatatatgttagtgaatgactttgtgctcctgtatgttaattgggtcttgtcatgttagcatttagaagttcagacccttcagggattcctaaaccttgggaaaaaataacttgatcatttacattttcgtgaagcagtcttgctctatcattcatactgtgtctccacaagacatttccgtcccttttcataattttagtcaaagccacctagtaacctttaattatataggagagcttgattaagcagtgggtcagatgctctgaaccaccttgattcttagaaggtcatgaaaaaatgttgcctatagttaataattttcttaaaactttattaactatgtaattattttatgagcctctgatgttttagtacgacattccaccagtggaaacatgctcccctttattatgtggcaagaatgataattcgggccaggtgttgtggcatgtgcctgtacttgggaggctggaggatcacttgagcccaggaatttgaggccagcttgggcaatgaagaaaaaaattttttttaaagaatgacactcaagagttgtgcttagttattgttgaaggatgctttatagacctcaaaaatgctgtaatcgatgccctatggtgcctgattgttctctgagcaaatctagctatggttttgcttttgctcttcttctgcaacatctaaatgcctatcctaaggttccttctctgtttctctatggttttgcagctggtcagggttcttggttgtaacaaagaaactggtcttggttaatttaagccaaaaaggaattaatcaaaacggtattaggtcactcagtattgacaaggccagggtacaggttgaccaagacctgcagcaggaataatctacttagagcagtgttgctggcattctttcccccagattggttgtactcctggactcccagctccctcaagatcctgtgcctttgtgttatcttcaagatgcaaagccccttctagaagtctctaacctcacttaaattaggagctgtgctttaactgcttgtgggcgggaggggggctgcattcacctatttgggttctttccaaatagaaagggatttcaggcagtcaaaatgacaaatattcccctatataaatattttcatccaagtccaaagcttaaaattcagcaaattcaattttagaactaataggacttcaagaaataacgtcctcactttaaaggtaaaataaaataagatcacacagctggtcagctgtagagccaggactagaacacaaatctttagacttaccattattttgaattgctctaaacttttaatcttggattgacactatacctttgaatttttggcttttgcagcaatatattaatgcaatatatatatatttttgagacagtttcactctcacccaggctggagtgcagtggcacgatctcaactcactgcaacctccatctcctgggttcaacagattcttgtgcctcagcctgctgagtagctgggattacaggcgcaggccaccatgcctggctaatttttttttgtagtgctgggattacaggtgtgagccgttgcacctggccaatttttttttttttttaagagtcttactctgttgccaggctggagtgcagtggcatgattttggctcgctacagtcccgacctccagggctcaggtgattctcccacctctgcctcctcagtagctgggactacagctgcatgccactacgcccagctatttgttgtgtaattttttttttttttttttagaggtggagttttgcatgttgcccaggctggtcttgaagtcctgggctcaagtgatctgctcaccttagcctcccaaaatgctgaggattataggcgtgaaccactgccccaggccttaatgcaatcttttaataaaaatttggattactgaggcctattttcattttattatttcttgatttactaaatttattcatgtaatgtatgtaatgtttaccaggacatgtaatgtttaccaggacatgctaggagctggaactacaaatatgaaaaagactgattctgggctattaaggaatttatagtttagtaaggaaagcagatataaagatagattaattatagtgtaatatgcctgtgtaaaggaataaaaatcagtgtgtatggttaactctgcctagcagttacctttgtggttttttgaagcttgaagggtgaaaaggcatttcagacagtgtagcagtaatttgggtcttcttcagtcttgaattgcaatagagtgtataagacagccagccagcaatttttgtttcttatctgtaacctttctttaaatgttgcagggggtagggtgaggtggagggcacggagaagctgggtatggtagcacacgcctattgtgccagctacttgggaggctgaagtgaaaggatctcttaagcccaggaatttgaggccagtttcggcgacatagtgagactttgtctcaaaaaagaagaggttatgggaaaaatacaagccaagttttaaaaaattattattataaaatgtttcagatatataaaaaaggtttaaataataacacgagcgttgcaagtacagctatgttaagaaataagatattacaagtatacttagggttcctctgtacctttttccagttgtattcttatttttccccaagatgtcaccattatcccaatttgttgtatataattccctatgtttttatacatatgtatatacccctgaatgatacatagtgatacatagtacaatatatggtggtgtttttcatgttttaaaactttttgcagccggtgagtcccgcctggaatcccagcactttgggaggcccaggctagtggatcacttgaggccaggagttcaacaccagcctgggcaacatggtgcaaccccatctctactaaaaatacagaaaacaaattagctgcatgtggtggtgcttgtctgtagtcccagctacttgggaagctgaagtgggagaatcacctgagcttggggagttaaggctgtagtgagctgtgattatgccactgcactctagcctgggctcagaacaaacaaaaaaaaaccacacaacttttcgcagtcctgaacaaaatactaacaaactgaactcagcaatatatgaaatggattatatgccatgaaaagtaggatttatttaaggaacggcaaggtcggttcttcatacaaaaatcaatttattacaccatattaatagaaaaaaggacaaaaactgcgtgatcatctgaataaacacaaaaagtatttgacaaattccagcctccttttgtgattaaaaaagaaaacactcagcagactgggaatagaaggaaatttcttgcagctgataaaaggcatctacaaaaaacatagctaacagtgtagttaatggcaaaagacttagtgcttttctcctaagatcaggaacaagatgaggattctgctctcaccatttctgttcaacattgtactggaggtcataaccaatgaaatcaggcaacataaggaaatgaaagtcatttagattggaaagaagaaataaaactatctctatttgcagctgacatgatcttatatttagaaaatagtaaggaatctacagaaagcaattagagctgataaatgagttcatcaagtttgcaggatacaagatcaatacacggaagtcatgtttatgtacactaacaatgaatctgaaaataaaattaacaatttcatttacagtagcataaaaggaataaatacatacgaataaattaacaagtgtacaactaaaactgtaacactaaaaacaacaaaacatcattggaagaaatttaaaaagacataagtgaaagacatcccgtgttcatggattagattagaacacttaatattgctaagatggcaataccacttaaagtgatctacaaattcagtgtagtctttatcaaaatcctaggcagttctgcagaaattggcaagccacttctgatagtcatatggaaatgaaaggaactcagaatagcaaaaacagtcttgaaaaaagagaacaaagtttggaggactcactgttcccaatttcaaaacttattacaaagctacagtaatgacattgtggtactggcataaggatagacatctagattgttagaataaaattgagagtctagaaataaacctttacatttttggtcagttttcaacaaggatgccaggatagttcactggggaaggaataggcttttcgacaaatgacactgggtcacctggagaagcagatgcaaaagaatgagtttagactcctacctcattatcatacacaaacattaacttgaaatggggtaaagacctaatgtaagctaaaattctaaaactcttagaagaaaatataggcataagttcttatgaccttggattaggcagtggtttcttggctataacaccaaaaacaagcaatcaaagaaaaaataaacatcaaaattaaaaacttttatgcatgaaaggatactatcaagactagtataagcacatgaaaaggttagggaaataccagtcaagacgcaatgagataccatttcacacccactaagttggctggaataacaaagatggacaataacaagtggggcaattggaaccaaggatgtggagcagttagaatcctcaaacattgctgatgtgaatataaaatagtgtaattgtttggaaaacattttggcagttgcttaaaaagttaagcatagttaccatgatccatcaaatctgctcctaggaatctacccaagagaattgaaaacatgtctatatgaagatttgtacacaaatgtccatagcagtattcttttttttttttttgagacagttttgtcttttcgcccaggctggagtgaagtggtgcaatcttggctcactgcaacctccacctcctgggttcaagcaattctcctgtctcagcctcccaagtagttgggattccaggctcctgccatcacacctggctaatttttgtatttttagtagaaatggggttttgccatgttggccaggctgggtctcgaactcaacctcagagtgatccacccaccttggcctcccgaagtgctaggattataggcatgagtcactacgtccggccagcagtattataatagcagtaatataatatagtgctattataatagcactataataaaatagtggaaacaaattttatttgatgaatggataaacaaaatgcgatctatccatacaatggaatattattcagctataaaaaggaataaagtacagcatggttgaacttgaaagtatgctaagtgaaagaagctcaacacaaaagctacatatcatatgattccatttacttgaaatgtccagaattggcaactccatagagacagaaagtagattagtggctgcctaggactgggaggaggcaggaatgggaagtgactaatgatagatagaggtttcttttgggggtgataaaaatgttctggaattaggggtgatggttgcacaaccttgtgaatatactaacaagtacagaattgtacactgtaaaagaatgaatcttatggtatgtgaatttatcaatttaaaaacaaaggggaaaaatacatacatacttataataagacaacccaataaaaaacggacaaaagatatcaattgacattttaaaaccataaaccttcatagttaacatttgagggctacttacgtgccagataacaaacactttattttattttattttttatttattttagagatggagtctcactctgttgcccaggctggagtgcaatggtgcgatcttggctcactgcaccctcagcctcctgggttcaagtgattcttctgcctcagcctcccgagtagctgggattacaggcgtccaccaccatgcccagctaatttttgtatttttagtagagatggagtttcaccatgtttcccaggccggtctcgaactcctgacctcaggtgatccgcccacctcggcctcccaaagtctgggattacaggcgtgagccgttgtgcttggctttattttattttattttattttattttattttattttattttattttattttattttgagacggagtttcgctcttgttgcccaggctagagtgcaatggcacgatcttggctccctgcaacctccgcctcccgtgttcaagcgattctcttgcctcagtctcccgagtagctgggattacaggtatgtgccaccgtgcccagctaattttgtatttttagtagagacagggtttctccacgttggttaggctggtctcaaactcctgactcaggtgatcgcctgcctcagcctcccaannnnnnnnnnnnnnnnnnnncactgcgcctaagcctattttattttttaagtagcacagtgtagctgggcacggtggtttacgcctgtaatcccagaactttgggaggccgaggcgggcagatcatgaggtcaggagattgagaccgtcctgggtaacacggtgaaaccctgtctctgctaaaaatacaaaaaatcagccgggcatgatagcgcgtgcctgtagtcccagctactggggaggctgaggcaggagaaatacttgaacccaggaggcggaagttgcagtgagcccagatcatggcactctattctagcctgggtgacagagtgagactctgtttcaaaaaaacaaacaaaaaaaagagacagagtcttactgtattgcccagactggagtacagtggcagaattgtagctcactacagcctccaactcctgggctcaagtgatgttcccatctcagcctatagcttggagtacaggcatgtgccactatgcctggctaattttttaaattttttcttagaggtagggtctcactgtgtttcccaggttagtcttgaacctggcctcaaggagtcctcctgccttggcctcccaaagtgctgggactacaggagtgagcctctgtgcctggccatagatattaagcacttgacacttacttttttttcgttgttttttgttttttgttttttttttttttttgagacaagagtctcactctgtcgcccaggctagagtgcagtggcgtgatctcggcttactgcaacctctgcctcccaggttcaagtcattctcctgcctcagcctcctgagtagctgggattacagttgcgcgccaccatgcccggttaatttttgtgtttgtagtagagacagggtttcaccatgttgatcaggctggttttgagctcctgacctcgtgatccaccctcttctgcctcccagtgttgagattacagtcgtgagccaccacgccctgcagcacttgacactttgtaatctttatagccaacctcgagataggtactattattatttccattttatagatttagaaataggaactggttaaataataatctagttagtgagtgttggactaagattcaaactcaggaactcagtttttattgactacactgtgtcctgtttatatactacatactgtggtttactgtataaccttcttgcacagacctttgtgtggacacttcatttcacagggctgactaaccacctcaccatggctctttttcccctttacagatctattaatgagatgaagcggttggaagaaatgtcaaatatgtttcagagctctggagtccagcaccaccctccagaaccaaaagcccaaacagaagggaatgaagattcagagggcaaagagcaacgttgggaaatggtgatggataagaaacactttaagctgtggcggcgcccaattacaggcacccacctttaccagtaccgaggtgagcccagtgtggctatcttttgggttccatagttgcacaggtgcatgggatttctgttcttcatacttctctaaactgttctggttgtttctcagaaaatttgccgtagttttttgtttattgtttttcttctcccagatgacaaatgtctcagtgttgtctttgcttacatcctctttgtctttctttgttgctctactaagacttctagtttctgaacctgcctttaagatctcttagtactttagatctgaaacgccgctaggtgaaagaaacaaggcgagtgactggagtatggccagcatcccttattctttcttttcattctagtttttggaacctacacagatgtgacacctcggcagttcttcaatgttcaggtgagttaatttttctctccagatttggagcctcctagcatatcaattgctactgtctacatgaatcatttatctgactcaggtgacattggcttaagtacatccatctatctacctgtcatccacattgcatagcatttaggtaaacatttgacttagaatttctttatctgtcccatggggatgagatcagttttaccctcccacaggactgttgggaatatcagatagaggaatggatatgaatactttaatgtattttatgaggctttattgtttttttccccaaacaacttaagagtaagttacatacatcatagtcctttactcctaaattcttccagtgtgtatttcctaaaactagccatatgccgtatttcttaactaatcatgataccattattgaaattagtaaatttaacactgatggaacactttcatgtagtcctctgtttgtatttatcagttttatcagttgactcaatgtcctttatagcattttccacttcagtacagataggattatatttagttgtcacatctgtttaacctcaaatcaagaacatttccatagtggagggtttttttttttctttcctctccctgagacagggtcctgctgtgttacccaggctggagtacagtggtgtgatcatgtcttgctgcagcctttgtttcctggactcaagtgatcctcccacctcagcttccaggcctacaggcatgcgccaccacacttggctaattaaaatttttttttcttagagacagggtctccctatgtctcctaggctggtcttgaactccctgggctctagtgatcctcctgcctttgcctcccaaagtgccgggattacaggtgtgagtcactgtgttggcccaatgtttatttcataaagatgaagagtatctgttcaaagactgctttcctccttgtaggggaagatggtttaaaaaatgaaacagggaggtgggatcgcccagagttctagaacaaaatttttttctttctggatttttcatttgttttgctgacttccgataactacttcgttggttataacactcactctaacgtgcaagtgcactttccctgaggtactggatcttgttaatttgtagtgaatttttgttggttttatgtatatggtatatctgtcttaagttgaaaatcttcagttactagtgatgccagaaatttaaaaaaatatgctgcttgcatttttgtgtgtgaagtgtctacttaatacttttggactttttgttgtttaaaactttttagaattgtcttacccttacacattcatatcactatatattattttccccagatgtgtctattaaaatattttgttacacttttccttggtttgtctaatgaagattcacattcagtgtaatgacattagcctgtataaggtgattttgaaagaaacatctgtagtaaacacagccatgtctctcacactctggcactgtctgttaggtcagattactctctccttgtaataagattcttggatcagagaccaaagcatctggaaagctttctgcatttttgttttgggtcttcttgggtattcatggtcttttctctttctgcagctggacacagagtatagaaaaaaatgggatgccctggtaatcaagctggaggtgattgagagggatgtggttagtggttccgaggttcttcactgggtaacccattttcctgtgagtatttttacttctgattttatttctgtccaggtttgtgtgatgcagaacactaatcctgctcctccatttctttagtatccaatgtactcacgggattatgtttatgttcggcggtatagtgtggatcaggaaaacaacatgatggtgttggtgtcgcggtatgtatggctgcctgtggctgttgccgagttcctttagctgtggccttcattcctacgtacctgagtttgtatattcttagtgtcctatgagtctcccacaggcttccctgcagccagtgccccttccatccagctagaagatgagggactctgactgtctagaaagaatggagagatacaagcttttagttaaactgtttttttgggttctttaatgttggtaatcaaaagaagtgctgttgtttttgacccacagcctagtgagccgtaaattaccaaaggaactcacttcatttttaattaattcatttgtttgttgtagacgcagggtttcacagtgtggtccaggctggtcttggactcctggcctcaagtgatcttccttccttggcttcccagtgttgggattacaggcatgagccaccacgtctggccttcgcttcatttttagaacttagtttgtatttattcatcttagtgactcctttgttttgtgtatttaaaaatatcagagccagctttttaggccttccccttaacttagctctcctgttgttttatatatagacattactaagagtttgcttctcctttcctccttaccagtgctgtggagcatccgagtgtgccagagtctccagaattcgtcagggtcagatcatatgaatcccaaatggttatccgtccccacaagtcatttgatgaggtgagttttacctcatccaagagataacatgtcatggctgtggaattttctcaagggatgtcttacctgaactagggaggagggggtgtggcgcaggaacagttctcgctcgggggagtctgatgctactggtctgggaaccattttttgggaactcctgacgtaggtgatgtacctggaagttccccaaggacaaagtagtggcaatccattggttccctcttatctgagagatagttaaaagaatcatagccactgacgcattagcctgtatcagtagcattcttcaggaactagagcgagtacctcctgtcaacattttactacagtgggcagagcactggatggaaacttttctggatttctgcttccttgccagagtaatgggaagattggactcatgctgtctgccttctttaaaattctgtgacctttctttgaaaagaatatttatttcagcctaatgaggtgttttgtgtttattttttatctttttaagctaaatctccactgagagtatagatattgatgctagtggctgctggttttagttccacttcaccttataatggctttgtttctccctattgcttgtgttcgatttagggctatatggacagtgttctttagtgtagttttcttattctcatcaagttgttttatttataccacctcaaggacttgagttggtccttgtaaaaaaaaacaaaaaaaaaagtacactggatagagaggaaagcaggcagggcactagggttagaagacatgattcaagcaaagacaaagataggaatgagccaggtatgcactgagagactcacatgcttagagaggaaagtagaggttagggagaagtgataaattgcattgactgtgtacagagggtactcgaaaaccatgtagctgagtttggatttgccaaatgggaattagatctttgagccaaggtagggggtttttatcatggaaaatttgaaatagatacaaaagatacagaagtagaagagtataatgaaccccctgtatccatccccagctccagttatcaacttatggccaaaattgttttatctataccctttcccatttcctttctcactcccctgattattttgaagcaaattctagctttactgtaggagaacccagttcttctattatatatttcagtatttatctcaaataaggattttgggtttttttggaaacagggtctcccactgttacccaggctagtgtgcagtggtacaatcacaactcactgcagccttgacttcctgggctcaggtgatcctcctgcctcagcctcctgaggagctgggattataggcgtgtgccaacatgtcaggctaattttttgtattttttgtagagatggggtctcaccatgctgcgcaggctggtctcaaactcctggactcaagcaatcctcccacctcagcctcccaaaatgctgggattagaggcgtgagccactgtgcccagcccaagtaagaaatttgtaaaacagctctgggccaggcagcatggagagacccggtctctacaaaaaataaaaattagccaggcatggtgatatgtgcctgtagtcccagctgcttgggaagctgaggttgggagaatcacttgagtccaggaggtcaaggctgcattaagccgtgtttgtgccactgcatgccagcctgggcaacagtttgagacccttctcaaaaaaaaaataaaaaataaaaaagccaggcgcagtggctcacgcctgtaatcccagcactttgggaggccgaggcatgtagataacttgaggtcaggattttgagaccagcctggccaacatggtgaaaccctgtctctactaaaagtacaaaaattatccaggcattgtggcacgtgtctgtaatcccagccacttgggaggctgaggcaggagagaatggcttgaacctgggaggcagaggttgcagtgagccaagatcgtgccgctgcaccccagcgtgggcgacacagtgagactcgtctcaaaaaaaaaaaaaaaaaaagacacagacttaaatgtacttagtttttaaatatattatccttattgatgctcaaattgattccagttttggtcattgggagtcttcttgttggctcaagcccctttgacatgaccccagaagctgtcttgctttctggtgttacaagatgttgtaggttcatcttgtatatttttagttttacacctggaaattaacatttctttagggagtcctggttccttttagtggaaaatggcatttaaataccacaatttggctgctaagaatattcatagctattgggtcgtttattgtttgtaggccttttcagaagacagaaccaagtaatacattttactggtatgtttatttttaagataaaataaatcctaagtatatactaatacttttaattcaaattcaggactatggagtttttatttctatcttctatcttttgtctttccctgtactgtagaactcaattcccaggaaccctaacacaactactaatttgttgaaatacacagcctcagaataacaatacagtaagatcaccaataatacgaagaataaaattttgtggtctttttgtcttcaggatgtgcatactgtgtacaaaatattgattttttttttttttttttggagacggagtctcgttctgttgtgcaggctggagtgcagtggtgcgatcttggctcacttgcaacctccacctgccaggttcaagcaattctcctgcttcagcctcccaagtagctgggattacagatgtgcaccaccacgcctagctaatttttgtatttttattagagacagggcttcaccatgttggccaggctggtctcgaactcctgacttcaagtgatccgcccgcctcggcctttctgagtgctgggattacaggcatgagccaccgtgcccagcccccagctaagatttatgacagtgtcagagtaaagatatgcagctggatcataagagaaaaaggcacaggaggagtctggaggagtccatgtgaagcttccttccccagcaatgaaatgtagcaatatgtgtgcaatgtttctgtttaggaaggccattagaaatttaacactctggctgagcacggtagctcatgcctgtaatcgcagcactttgggaggctgaggcaggaggatctctttagccaaggagtttgagatcagcctgggcaacacagggaagacccagtctctgcaaaaaataaaaaattagttgtggtggtagtgcatgcctgtagtccctgctacacaggaggttgaggtgggatgactgcttgagcccaggaggtggaggctgtactgagtcgagattgcatcactgcactccagactgtgcaacagagtgagaccttgtctcaaaaaaaagaaaaaaaaaacacccaaagtgttttttttgtttttttgtttttgtttgttttgttttgtttttctgagatgagtttcgctcttgttgcccaggctggagtgcgatggcgtgatcttggctcactgcaacctccgcctcccgggttcaagcagttctcttgcctcagcctcccgagtagctgggattactggtgtgtgccaccacacctggctagtttttttttttctttgtattttcagtagagacagggttttgccatgttggccagggtggtctcaaactcctgacctcaggtgatccatctgcctcagcctcccaaagtgctgagattacagacgtgagccaccacacccagcccaaagtgttttttaaagacggagtcttggctgggtgcagtggcacacgcttgtaatcccagcactttgggaggccaaggtgggtggatcacttgaggtcgggagttcgagaccagcctgaccaagatggagaagccccgtttctactgaaaatacaaaattagctgggcatggtggtgcatgcctgtaatctcagctactggggaggctgnnnnnnnnnnnnnnnnnnnnnnnnnnnnnnnnnnnnnnnnnnnnnnnnnnnnnnnnnnnnnnnnnnnnnnnnnnnnnnnnnnnnnnnnnnnnnnnnnnnnnnnnnnnnnnnnnnnnnnnnnnnnnnnnnnnnnnnnnnnnnnnnnnnnnnnnnnnnnnnnnnnnnnnnnnnnnnnnnnnnnnnnnnnnnnnnnnnnnnnnnnnnnnnnnnnnnnnnnnnnnnnnnnnnnnnnnnnnnnnnnnnnnnntctcaaaaaaaaaaaaaaaaaaaaaaaaaaatcttggtctgtcacccaggctggagtacagtggctcaatctgtgctcactgcaacctctgcctcccggttcaaacgattctcctgcctcagactcccaagtaactgggattacaggcgtgtaccaccacggcccagctaattttttaactttcagtagagatgggatttcaccatgttggccaggctggtctcgaactctggtcctcaagtaatctgcctgccttgggctcccaaagtgctgggattataaggcatgagccaccacgcccagccaacacccaatttatttatttatttatttattttttgagacggagtctcgctctgtttcccaggctggaatgcagtggctagatcttggctcactgcaacctctgcctcccgggttcaagcaattcttgtgcctcagcctcccgagtagctgggactacaggtgtgtgccagtatggccggttaatttttgtatttttggtagagatggggtttcaccatgttggccaggcttgtcttgaactcttgacctcaggtgatccgcctgcctcggcctcccaaagtgctgggattgtaggcatgagccaccatgcctggcctaacacccaaaatttttattgggagctggtcacttagtaccgtctgcttagcacataccagaattccaaaccctgcaaagcaaagcctgtgttcagcataaaccacgttgtttgcatagtctatgcacagggagccacccatatcagctaactgttgactgggagcgaagttggccaagggtcaacattgcaaggagacctttctatagatagtagtctctcaggccttcagtgttaactcttttctgcacagggtgaaaaaagaaatgacactccctgctccagaatcagatcatagttattctatggtactggatatggaggttgtggttggtgattcagggatcttcatttttgctgtttttcttttccagaatggctttgactacttactaacatacagtgacaatccccaaacggtgtttcctcgctactgtgttagttggatggtttccagtggtaagtaagggcaagtatacagggcctggaacctgggttgagcattttgtttttctctatttcctaatggggaaataaaacgtctcttctggttcttcttttttttttttttctgagacagagttttcacaacccatgctttgggaacacattccgggaggcagctcttattcacaggctagtcaggttgtgatctttataaggaagaactagttccctaccatcaaagaaatagggtcttctcattttgagcctactgttggtttgtatgtcagcttaacctgattctcgtctcctgacaggcatgccagatttcctggagaagctgcacatggccactctgaaagccaagaatatggagattaaagtaaaggactacatctcagctaagcctctggaaatgagtagtgaagccaaggccaccagccagtcctctgagcgaaagaacgagggcagctgtggccctgctcggattgagtatgcttgacaggctttgggataagaagggacaaggtgcttctagccctgtctcagtccgttatcactctgctgtagaagggggacatgccacatgtattagaaggcatctgctgtaacttccagtgcaagataattcaataactgatgtcccatttcattcagagcccttattgctcttatcaaaacagaagaaggctacatttgtgggagtgttgtcatattctcaggccaactgttttgaaattcggtatctcactgagctaatctggaacaaacctctcacctcaggccagaaggggatgacctccatttgcttctctgagtagtttcctctgctgacattccaaatcccaccatcgattgtgcagcgctttggatttccttcagttctccaggtccacctggaaagtatagttggccagttgagtctctcaaatgaggggctactgggagtgctcttggtaacaatcatgatgtgaatgggtgtgaacgatacttggctatgttaagtgccttgtccgcaccttgcttttatctctagagacatgaagttattattaattttttttttttttaagtagagatggagtttcactctgtttcccaggctggtcttgaactcctgggccatgcctggccagggacatgaatttgtacaaagaaatttccctccctgcctgcacaatatcacccattgactcaccttatccaaagcaagtttcctgtgaatcggccagttcttctatattcattggatcattgcctccttcctaaccttccccatttaccaagaacactgggagactaatccttttagatagtagctttttgatgctcaaaacatcacatttaaatttagtttaaaaattttttaacttttgtgtcaaataggagttgaggaattgagcaggattctaccctagtccgattgtatagaaaacaccattttgattcaggtattatttttcatatttcaggtttgacttgttcttttcagaaggctaaagtcagaggaatgggggctgggccactcccttggagctctcagatctacagacaagctgtgtgaatgcatagatgtaatcttgtctcaaatactaatacagtggagatttggtttatgttaccattaagttcctctaaaaagtttttcttcctctcttcagagccaaaataaaagtgaactacactgttcagataaggtcacaatctgatgctgtcagtttgaccgagctggttttgcttatggtcatgctgcaatttgttagaataatagggatcaagttttaaatcctcctccttcccttttttctggagtcttgagggccagagtttttgtttttgtttttgtttttgttttcctgcttgctactgttttgtggtgttgaaaagtggtttaaacctgagactaacttaaacacttccttgaccttcttgttgcctgttcatttttgtgccaaggaagtagctgccccagtgtatgtcttgccttctccgcgtcattgttggaagaggagagatgcatcgagcagtcccagctgcttttcatttattacttcttctttccaggacctgacagaagtcagggaagagtccctgggttatgtccaaacttagcacctgcaattgttgggatgtggatggatgtgtgcataagagagagagagaatatgtgtgtgtgtgtgtgcgtctgcgagcgcacacacatgcacaagtgcgaaggagttgcggttgctccatgttctgacttagggcaatttgattctgcacttggggtctgtctgtacagttactcatgtcattgtaatgatttcactcctaactgtgacatttttatcaaatgtgtgaataaatacataaagattggtacaaaaaaaagtgtttgtctttggacaaatggtggtggaaaaatcttgcatattggacttaccatttctttctgatcacaaagttgaaaagaattttactctgagagttgggaggtggaagtggcagggcttgttcattcttggtagatagtggctgacacagtttgcctagaccacgagccctttccaagtgacctgcttggcaactgaaaataaaccacctatgtccacttccctagcttgatatactgacccatatcctttccctttaaaaaaagatcactttggagggagcagtgctagagcttagcagacggtagaaatcaggagggacagaagcaggcctgaggtctagggttgaggttgaggagagggtcaagtcagcgctcttggcggaggggcagtcctgctggcatgctctgagcataacatgagtttatgtgtaattttgcctgtgggaagcactaggtgaacacaaaagcacacccagttgaactgagctgcataggaacacacaaggcacacgtccctgtgtggtgtaccatctgattccagagaaccgcacgccccatctcatgcttgcaagccgcagcccttccatcggccatcctggctctgcctcacactctgctctttattctctttcaacctcatttgtgttttacctctctaatttttttttttttgagacggagtctcactctcgcctaggctggagtccagtgacgagacctcggctcactgcaacctctacctcccgggttcgagcaattctcctgtctcagcctccctagtatctgggactacaggtgtgtgccaccaaacctggctaatttttgtatttttagtagagatgggctttcaccatgttagccaggctggtctcgaactcctggccttaagtgatccacccaccttggcctcccaaagtgttgggattacaggcgtgagccaccgtgcccggcctataacatttttaagtgacaaaattttagaaatggaagattgatttagaaatggccgggcgcagtgactcatgcctgtaactttcgggggccgaggctggtggatcacctgagatcgggagttcaagaccagcctgaccaacatagagaaaccccgtctcttctaaaaatacaaaattagctgggtgtggttgtgcatgcctgtaatcccagctacttaggaggctgaggcaggagaatcacttgaacccaggaggcagaggttgcggtgagccaagatcacgacactgcactccagcccaggtgacagagcaagactctgtcttaaagaaaaaaaaaaaaccacatagaccaggcagggtggctcacacctgtaatcctgacactttgggaagccgaggcaggcggatcgcccgaggtcaggaggttgagaccaaccagggcaatatggtgaaaccccgtctctactaaaaatacaaaaaaattagctggacacagtggtgggtacctgtaatcccagctactcaggaggctgaggcgagagatttgcttgaacccgggaggcagaggtttcagtgagccaagatcacaccattgcactccagcctgggcaacgagcgaaactcgaaaaaccaaacaacaaaccagagcaacaccagggatcccttgcgatgctggtctaccaccacagtcaactgtggtgttagatacacaaaactacactggtgataaaattttaaagctttttttttttttttttcccgagacagagtctcggactgttgaccgggctggagtacagtggctcgatttcagctcactgcaacctctgcctcctgggttcaagctattctgcctcagcctcccaagtagtttggattacaggtgcctgccaccacgccctgccaattttttgtatttttagtagaggtgggtttttactatgttggccagtctcaaactcctgacctcgtgatccgcccgcctgagcctcccaaagtgctgggattacaggcatgagccactgtgcccggctaaaattttatagctttttttttttttttttttgagacagagttttgctgttgttgcccaagctgaagtgcaatggcacaatctcggctcaccacaacctccgcctcccgggttcaagcgattctcctgcctcagacccctgagtagctgggattacaggcatgcgccaccaccctggctaattttgtgtttttagtagagacggggtttctccatgttggtcaggctggtcttgaactcccaacctcaggtgatacacctgccttggcctcccaaagtgctgggattacaggtgtgagccaccgtgcccggcaaattttatagctcttttttttttttttttagatggagtgtcttgctctgttgcccaggctggagtgcagtgtcgcaatctcagctcactgcaagctccacctcccgggttcacgccattctcctgcctcagcctcccaagtagctgggactacaggtgcctgccaccacgcttggctaattttttgtatttttagtagagttggggtttcaccgtgttagccaggatggtcttgatctcctgacctcgtgatctgcccatcttggcctcccaaagtgctgggattacaggcgtgagccactgcgcccagcccaatctttcttctttttctctatgttttctctcactttgtcttatcttttgttctcttcctcttcatgcagggtggtacgcgtgggagctgggtgggctgtccagtgtgtttctgcctgcaaattgcaggtcaaggtagactgctttatttcttaaccattgacatatttgaaactggtacctttttatgtgtcacaaagatttgagtattgcacacctaaacccatttctctataggccttgcagtttttgttgtgtggtttgtgtagacatgttgtgagacagcagcactgagtgttctatgaacaggagaaccaaataataggaaagtagtgatgctttaatagctagcgtgggcttagctatcacagcgtggtgaccgtgggttgagtgttagtatgaggttttcattttaaaaaatgtatatatatatagaaaaagacgaagaaactacgttgtatacccttccctttgctggtgtttaacatctgctgtgtgtgctttctctttctatatacacagtgtcatgatcatttgaaagtaggatgcaaacatcatggtatttcacccctaaacagttgagcatgctttttataatacaggtgttctgtgtagccacaataccatgagcacacaagataaataacaatgccacaatatctaataatgcagttcatattaaaatttccaaaatgacttttatagcctccccaacccaagattaattatcgtgtgttgcatttgtctctttggccacttttttttttttttgtgagacagagtgttgctctgtcacccaggctggagtgcattgacaccatctcagctcactgcaacctccacctcccgggttcaagcaattcttctgcctcagcctcccgagtagctgggattacaagcgtgcaccaccacacccaactaatttttatatttttagtagagatgaggtttcaccatgttagccaggctggtctcaaacgcctgacctcaagtgatccacccgtctcagcccccaaaactgctgggattacaggcgtgagccacttcgcccggccttctttggccacttttcatctagaacagtagtctaccttttgtaacttcacctgtgcttcatataatagaatgtagagcagtggtcttcaagcttggctgcacttgggaagctttgcaaactcccaaagcctggccccaccccagaccattgaaacctctaggggtgagcaagtgttgtgcaagtgtacatgaacaagtgttaaatgttgaatgtgatcaaagggagacaaataggctagagaggcaacagtcttcctagatccgcatactactgatgtaagtcttgtcatactgttggcttatgctgagtttgggattagccaataatagccaccattattgagcatctactgtgccaggcaccatgcttcatgccttcatctaattctatagccctgtgagtatgtagctagtgcctcatctataaaatgaagagatggcattagaggttaagtaattttcttgctcagggtcacacaggaagtgacagccaggatgcagacctagctctaacatctccaaagacagctggcagcatggcttaaaacttatgtttttaaatttttttattttccccctaaaacttaatgtttataaatactgccagattctttcccctgggggtagttgacttgtttggaagcttggatcatagcttgctttattttttattatttatttatttatttttattttttggctagtgacacagccctcaggagatcttgagaacatatgccccatgagcttgctttttaaaaaattttattttttgagatagtctcgctggtgcccaggctggagtgctgtggtgccatcagatctcactgcagctttgaactcctgggtttaagtgaactcccacatcagcctcctgagtagcccagaccaaccacaggcatgcaccaccattcccatctaatttttctgtagagatggggtctcactgtgttgcccaggctggtctcaaactcctgacttcaagtgatcctcccacctagatctcccaaagtattggaattacaggtgtaagccactgtgcctggcctaggcttgcctgcttgcttgacttttgttttttcagagtcccactctgtcacccaggctggattgcagtggcgcagtcaaggcttactgcagtcttcaactccctgggctcaggcaatcctcccacctctgctgggactacagcacgagccaccacacctggataatttttgtatttattttataggtgggctttcaccatgttgcccaggctggtctcaaaactggcctcaagcaatcttcccaatttggcctcccgaagcactggaattataggtgtgagccactatgcctggtttaggcttgctttctgtgttaaattttatgtggtttacacttcttaccctctagttccatccagtataatagccagttgcttgaactttatctctttcaccaattgtttgagttctgtttctgtaagtatctggaatcatttttctctagaacacttcagaatgtacaccactcccagtaccatactgtgtaatgaagggatggggggtggggacatcttgaaataacgttttctaaaggtattaaatttcaaagtcaccagtctctgaacccaccatgataggacagaaatctaaatatttttctcaaagtgaaaatagcaataaaatctgagaactatgatttctaatgaataaacttgaaagccttttaaaaatcaagcagtaacgtgtagatgaaagtgatcttaatgcagatgtactatccctataagcctcagcgggtacttgatggagcatcattcaaatagagcctcaggctctccactgtcagagctgctttaataacctcagggttggttgtgacccacacatatactttaaaacatttttaaacagataatttataaattttataaatgaccttattgccccccaccccttttttttttttttggacacagaatcttgctctgtcgcccaggctggagtgcaatggctcaatcttggctcactgcatcctctgcctcccgggttcaagcaattctctgcctcagcctcccaagtagctgggattacaggcacctgccaccacgcccagctaatttttgtatttttagtagagacagggttttatcatcttggccatgctggtcttgaactcctgaactcatgatccacctgcctcagcctcccaaagtgctgagattacaggcgtgagccaccgcacctggcctattatccacttttaaagagcctaaccatacctaaaaaggtaggctgagtgtttgaatatgtgagccgggcgtggtggctcaggcttgtaatcccagcagtttgggaggccaaggcaggcagatcacctgaggtcaggagtttgagaccggcctggccaacgtagcgaaaccccgtctctactaaaaatacaaaatttagtcgggcgtggtgggtgcatgccagtagtcccagctactcaggagactgaggcaggagaatcacctgaactggggaggtggaggttgcagtgagctgagattgcaccattgcactacatccagcctgagcaacaagagcaaaactccgtctcgaaaaaaaaaaaaaagtaatatgtaaatgcttttcagtaaatgcattttgtcatatcttaaaattctgctgtgtatgggagtttaggattatgtttagccttgaggaatagaggctaccatgtggctgaaacaaatttacccttgattcttgtgagtgtagccagtccaggactggtatgatagctctgcagtcctcctggtcccaggctcctgctgtcttctccatacagcctccaccaaggtggaattacagttgcatcagaatctgagggtgggacccaagcatcctgttttttttaaagttttcagggatcctaatgtgcagtaaagtttgagaagcactggcgaaggggttcaaaataaggactctgtagctagagtcaaaggttgtgtgactttgaacaagttaatgaacctttttcctcatctgtaaaagggaaatgagtacctaccttgtatggttactgtgaagattacataatacatgtaaagtacttagactggtgtctgagacatagcactccatacattctcacggtcttcttttctcctgattacgtttctggaaatagtagagtttgtcaatgcccttcctaaaatgcagagcccagggctagacccctttctgttccctggaaggtaggcatccccagggaagggacagtgtctgtgttcccagtgccccagcgggaccggctccacctccagccatcacgtctgttccaccagtgggaaggaacaaggggagaagtggatggcctctgcctttgaagacactttccatttttacctgcggccaatggccacactttcaaagaacaccagctgctgggaaataatttatattttaagcagctatgtgcccagttaaaattcagaggtgatttgctgggcaagaaagggagaatggaaatggaggacagctgggagtctttgccaaattatagctgaaaataactttaaatgaatcacttcaaaggaccaaatggttcagttaaaaagggaaaaatcgccagtagatgttttagaactttcagtagtctagaactcagtagatgtagaatttatttggcatcgacatcaagccaattggcctgtaattcatcccctttttgaaaaccctaatagcctttgcccatctccaatcagcggtgcctctttcttcaggaatttagacatttagtccttgttgaggaccctctgaagaaatctgcttggcctcagtgtccggaataggactctcaggcatgctttttttttttttttttttttttttgagacagagtctcgctctgttgccaggttggaagtgcagtggtgcgatctcgactcactgcaacctccgcctcccgggttcaagcgattctcctgtctcagcctcccaagtagctgggaatacaggtgtgtgccaccacacctggctaatttttgtatttttagtagagacggggtttcaccatgttggccaggatggtcttgatctcctggtctcgtaatctgctcgcctcagcctcccaaagtgctgggtttacagaggtgagccactacgccttgctgcacttgtatttttgcttcatttctagatccactttctgtccctgcccttatttgtgtgtgtgtttttttctttcttatatctttctgtttctacttttaaacgtcttgtgtctgatatttttgttggctaatttgctcctctgttggaacacaagcattgtctagattaacacaagtatctggcacacttcccatttccatacgcaagtgattgtagttgcctgggctgtggttctacatctggaggtcaggattcatttggaaagtttaggtgatgggagaggaagaaggaactgttttggtatccagtttccttttttccgatgtgttcaatcttccctttccatcagaagatacagaagatacagaagtgggctgtgcatggtgttcacctgtaatcccagcattttgggaggccgaggtgggcgaatcacttgaggtcaggagttcaaaacaagcctggccaacatggagaaaccctgtctctaacaaaatacaaaaattagctgggcttggtggtgcgcacctgtggttccagctactggggaggctgaggcaggagaatcgcttgaacctgggaggcggaggttgtagtgagccgagatcgtgccactgcactccagcctggcgacagagtgagactccgtttcaaaaaaaaaaaagaagatacagaaatgggaaactttgtgggtgcaggttggggtgtccccaggtgactccggagtggtcagctgtgtgcatttctgtgtcccaggagctgcacctcagttctgtgggctgggaaactccaccatgtcagagaccagagttggttgaactcagtgtctaaccaggctcccaagagaaagacacatttagcagtccaagaaatacatgctggcaggatgagtcaggccttgctagcccgaccagggtcatctccactgtaagcaaaacacatgggaagcccaatcacagggtttcgtggtgatcatgcaggcaggtgagcattcgcttggctatatttgtcccactaccaccttctgagctcgtcagcaagctcctgcgcagtctggtgtttttgttttgttttgttttgttttttgacattggagtcttgctctgttgcctaggctggagttcaatggcacaatcttggctcactgcaacttctgactcccaggttcaagcaatgctcctgcctcagcctcttgagtagctgggcttacaggtgcatgccaccatgcccagctaatttttatatttttagtagagatatggtttcaccatgttgtccaggccggtcttgaactcctgacctcaggtgatccgcctgcctcagcctcccaaagtgctgggattacaggtgtgagccacagcacccggtctttactttgttatttttaaatttttttcttaaaatgttctctgcttttgggggcttgggactgttcagggtatgtgtgtatatttcagtttgcatttccctagacaggattgagcccaatatttaaacaaatgtagtttaatgctgaaaggcactttagagggcatcaggtacagatctttcatttataaacgatgctcagagcttagcatttgttccaagtcacacagctcttccctggtctagaaccttggtcttctgggatccaatgcattttccattccactgtgtaatttcttggcgaagttttcggagaaatctttagaattcataatatgcatgccgtaaagccttaaaaccactcccaactaccctaagaacaccctggacgaggagtgtattagtttggtcataatcagctgctgtaacaaagtgccacaaactgagtggcttaaacaataaaaatttattgtctcacatttttggaggctggaagtccaaaagcaaggtgtgagcagggctggctccttctgagggcagtgagggagaatgttctagaactctgtcccagctttttgtggttgctggcgtgtgagctgcatcaccccagtccctgcctttgtgttccctgcatgcacgtgttgcccacatttccttttaataaggacaccagtcatattgcattagggaccacactacttcattatgacttgatcttaactgtatctgtaacaccctatctccaaatagggtcacattctgagatactggggattagaccttcaacatatgaattttagagggatacaattcaat

SEQ ID NO: 719 - DNA, 3320 bp, Homo sapiens
cgtttctgtccgcgcgccctgcatcccggccccgggcgcccgctggaggtcgccgaggagccacagggctgactggtctgctgcccgggcccaggagtgcctggtgtagcagtcgcggagccatcccggcgtctgctgccatgaccgactctcccctcagaggagactcttcctcagcggtggctgcagagacagatgagcggcggctcctggccgcgggaccgtgagacgggttcgtggccggccatttagggggacgctgcgaccaccgcctgcgcccctccggactggttccttgggccccggaagctcgcggcgggccctgcgggaggcggcatgctcccgcggaggctgctggccgcctggctggcggggacgcggggcgggggcctgctggcgcttctggccaatcagtgccgcttcgtcacgggcctgcgcgtgcggcgcgcgcagcagatcgcgcagctctacggccgcctctactccgagagctcacgccgcgttctcctcggccgcctctggcgccggctgcacggccgtcctggccatgcctctgccttgatggcggcgttagccggcgtcttcgtttgggacgaggagaggatccaggaggaggagttgcagagatctattaatgagatgaagcggttggaagaaatgtcaaatatgtttcagagctctggagtccagcaccaccctccagaaccaaaagcccaaacagaagggaatgaagattcagagggcaaagagcaacgttgggaaatggtgatggataagaaacactttaagctgtggcggcgcccaattacaggcacccacctttaccagtaccgagtttttggaacctacacagatgtgacacctcggcagttcttcaatgttcagctggacacagagtatagaaaaaaatgggatgccctggtaatcaagctggaggtgattgagagggatgtggttagtggttccgaggttcttcactgggtaacccattttccttatccaatgtactcacgggattatgtttatgttcggcggtatagtgtggatcaggaaaacaacatgatggtgttggtgtcgcgtgctgtggagcatccgagtgtgccagagtctccagaattcgtcagggtcagatcatatgaatcccaaatggttatccgtccccacaagtcatttgatgagaatggctttgactacttactaacatacagtgacaatccccaaacggtgtttcctcgctactgtgttagttggatggtttccagtggcatgccagatttcctggagaagctgcacatggccactctgaaagccaagaatatggagattaaagtaaaggactacatctcagctaagcctctggaaatgagtagtgaagccaaggccaccagccagtcctctgagcgaaagaacgagggcagctgtggccctgctcggattgagtatgcttgacaggctttgggataagaagggacaaggtgcttctagccctgtctcagtccgttatcactctgctgtagaagggggacatgccacatgtattagaaggcatctgctgtaacttccagtgcaagataattcaataactgatgtcccatttcattcagagcccttattgctcttatcaaaacagaagaaggctacatttgtgggagtgttgtcatattctcaggccaactgttttgaaattcggtatctcactgagctaatctggaacaaacctctcacctcaggccagaaggggatgacctccatttgcttctctgagtagtttcctctgctgacattccaaatcccaccatcgattgtgcagcgctttggatttccttcagttctccaggtccacctggaaagtatagttggccagttgagtctctcaaatgaggggctactgggagtgctcttggtaacaatcatgatgtgaatgggtgtgaacgatacttggctatgttaagtgccttgtccgcaccttgcttttatctctagagacatgaagttattattaattttttttttttttaagtagagatggagtttcactctgtttcccaggctggtcttgaactcctgggccatgcctggccagggacatgaatttgtacaaagaaatttccctccctgcctgcacaatatcacccattgactcaccttatccaaagcaagtttcctgtgaatcggccagttcttctatattcattggatcattgcctccttcctaaccttccccatttaccaagaacactgggagactaatccttttagatagtagctttttgatgctcaaaacatcacatttaaatttagtttaaaaattttttaacttttgtgtcaaataggagttgaggaattgagcaggattctaccctagtccgattgtatagaaaacaccattttgattcaggtattatttttcatatttcaggtttgacttgttcttttcagaaggctaaagtcagaggaatgggggctgggccactcccttggagctctcagatctacagacaagctgtgtgaatgcatagatgtaatcttgtctcaaatactaatacagtggagatttggtttatgttaccattaagttcctctaaaaagtttttcttcctctcttcagagccaaaataaaagtgaactacactgttcagataaggtcacaatctgatgctgtcagtttgaccgagctggttttgcttatggtcatgctgcaatttgttagaataatagggatcaagttttaaatcctcctccttcccttttttctggagtcttgagggccagagtttttgtttttgtttttgtttttgttttcctgcttgctactgttttgtggtgttgaaaagtggtttaaacctgagactaacttaaacacttccttgaccttcttgttgcctgttcatttttgtgccaaggaagtagctgccccagtgtatgtcttgccttctccgcgtcattgttggaagaggagagatgcatcgagcagtcccagctgcttttcatttattacttcttctttccaggacctgacagaagtcagggaagagtccctgggttatgtccaaacttagcacctgcaattgttgggatgtggatggatgtgtgcataagagagagagagaatatgtgtgtgtgtgtgtgcgtctgcgagcgcacacacatgcacaagtgcgaaggagttgcggttgctccatgttctgacttagggcaatttgattctgcacttggggtctgtctgtacagttactcatgtcattgtaatgatttcactcctaactgtgacatttttatcaaatgtgtgaataaatacataaagattggtacaaaaaaaa

SEQ ID NO: 720 - protein, 364 aa, Homo sapiens
MLPRRLLAAWLAGTRGGGLLALLANQCRFVTGLRVRRAQQIAQLYGRKESSRRVLLGRLWRRLHGRPGHASALMAAGVFVWDEERIQEEELQRSINEMKRLEEMSNMFQSSGVQHHPPEPKAQTEGNEDSEGKEQRWEMVMDKKHFKLWRRPITGTHLYQYRVFGTYTDVTPRQFFNVQLDTEYRKKWDALVIKLEVIERDVVSGSEVLHWVTHFPYPMYSRDYVYVRRYSVDQENNMMVLVSRAVEHPSVPESPEFVRVRSYESQMVIRPHKSFDENGFDYLLTYSDNPQTVFPRYCVSWMVSSGMPDFLEKLHMATLKAKNMEIKVKDYISAKPLEMSSEAKATSQSSKNEGSCGPARIEYA

SEQ ID NO: 721 - DNA, 153995 bp, Mus musculus
  misc_feature (1)...(153995): n = A,T,C or G
tgtctccaggggttgtcccttcagtaaggtagaatacttctgaacactgatccctaagttgggagaaagtatttggcattcatgtatcaactaacacctgagtattttgtagataacaacaatgttgcatatgacatttatgtagccacaagggaaaacagaatctatgggtttactgaaggaagcaagataaaggctaggaacgtgtctggattatcactccatagaaaggcacacatgagtgggctgcagaggtgactcgattgataaagtacttgttgtacaagcgctaacggctgggtttgaatcttcagtcccccatgtgaagagctctgtggagtggttgtgcttgcctatcatctagtgctagtagggggagtcttgggacttctgaacagctagtctacctgagttagtaagctctgggttcagaaagagactttgtctcaaaaagtaaggtggagagtgaactgaggaacgtgctagactatagtgagaattttgtttgtttgtttaaaacacacagaaatgttataagagtatgtttttattttaatcccaggtgtggaatatgggaatgcttaggattattcacagcagctgactgtgatttgcatcatgcaggggtgtgatttttgccagtagcagatagtttctgtgattgtgtgacacttggaattatgggaacttttcacagggtatatagatactagaaccctgagaggcagggtaggttgttggtagtgggttggttgctgttggtagtggtttgttaagtagtcgtgcacaaagaagaaacaagaagaaattagatatcctgacagtgaagatcaaacttgtcccaaggaactcaacacccctaatcagcaggaagtagtctacggataatgaatcctttttctctcttatctagtgttagggggttgaaagggtagaagaaagaagaacccacaaagtagccaaagtctgcctacatttggcatcattctgatggacacacaaacgcatcatgaatgcacacacacccacaaacacacacacacactgtgcctttgaagagcaactgaataaatacctccaaactgtcagtggtaatattagtatagaaaaatttaaaatagatatctttatgtttataatttgttatggccaaagtagaatggattctttattgggtttatctccttttgggtagagaatattagaagagaatactttaaaatgaaaagttgtagcatctaaccaagcactgaagtctgggcttccctgtggcagacacagtagatgggcaagccttgctttagcatttgaggcagatgaacagaaatgtaattgccatgctttagtggagcacagaggtctgtggtctcataatgcccttataagacctggctttagataagtgaatgaggacatacttagtgctcaaaaaggtcctctgatcaggggcagtgttttagggtgagctcctgtggtcatggtgcaatagaatacagaataagacaggtggctttggctttctaaggcagagacttgtggcctctgtgtcaggtagaagctggaggatctttggctacttctctgtgaagtgagaacaatacatacttgtaagctaaggttggagagttatacatgacaaccagctaaagtacatagtgtgccacacaacaagtgagttactgcatcaacactggctgcctgtgccattaaagtcattattgctaaaatctatgaagactcacaatgtgtgtgtgtgtgtgtgtgtgtgtgtgtgtgtgtaccaatttggacttcagatatttgaatttagagagatagccagaggcagctctctcattgctgggacgttgctgtggtcccctttgggaggagaatggggatgtgcaagggggaactccatgctggttcttcttttgctcctcttcatgctacttccccgcatctgagcaggtgcacgctgccccagaacagccttttaccttcctgttcttgcattctgtgtttcttttcttcaacttttcgtacttcccttttctcccccaaacccaaagagggtagatgactaaggaacaattctgtcttcttcgtggttgccttttttatttgaaactgaaagctattttcctaatgccagcacttggagtttgcctgagtacagctgtgtccaccctactatctcttttcttccttttaatgatgccttttctccagcaggagggtggttcgatgggtaaaggtgcttgctgccaagtctgaagacctgagttcaatccctgggatccacatggactcttgaaggttgtcctctgacatcagcatacacacaccacactaatcaaacaaattaataaaatgtgataagaatgtctattctcccaaagattgtttttagtaaatgtcaaaaatgacagtgacagtcatcagaacagagacaggatagagttcacttcaggtaactctgtcttgcacagaggcatggctcttcccagagcttttctgcactctggtaatgccttcctagactcagacatagatgttagtgtgagaaacattctctgtcttggcaccatttgctttttgatttctgcttcaacctccagcagctgttatgagaggaaaagacacacacaggtgtgaaggacacacagccggaccagggaggagtcacagctcagggttgccaccagaacaaagtgattaaaagcaaaaccaagctgacacccaggatacttgagtgcaaaacacccctcacctgccaaaatctaacccactccacctttgccaaaaatactggggtgcccctggttttactagaaattccatttgcatgtttataagcccattatctccaggcacacatacccatttgggtctagcagttcccaccccatctctctgcatacataagcagacgtacatacgcacacacatacgcatacattagcagacatgcacgctgctggtttgcactttcccataaaattactctttccctttttaattagggtgctttcagaggcacctccgcgttaaggctgtgttcgcttccattataaatacctgttgccagccaataattatcccctgatgaattactcactcagaaggagattttaaatgctcattttttttttttaataaacagggattccccttcattacttctggtgcctctgctctcaaacttcattaatcactttggcgttctgcatagtaagaaaaatgtccctctttgcttcagaagacgcagacgtggatctgcacgagtatggaacaaagatgatccacactagaggaggaaagctgtttgagaacttggacctcagtggtcaagagttgctgggctactcaggaaggtgcaatgtaaggatgcgggtggagacgatggaattgtctctgtgaacatttcatctggagttgcatatccatctcagtaacgaaagcactgatactcatccaataatatcatgggttgataattatacacctgtgggtttgtgatgctcttgaataggggagctgtcttgggacacacgggtcagctgtttctgtacgttcctattttatatttatgtagtgtgtgtacccacttaggaagtgaagtgtgatatttctcagtataaaatatgtaagagaggtttttaaggtcaagtggtgctctggcaagccttcctatgctaacatgttaattttaaggtcatgtgctgctctggcaaaagttccatgctaacatattagttctcctcgactcttgagcagcacagggtccccaggtaagctgtgtttgtcacgtagcctatgcctatgagggagcaaccctcctaaaggcatcttcacattgctttgctttaatactgactgagatacctacatttgcaaaagggaaaagaacaccaagacaccaaaattatagcagcttttattatttgtatgcttcattaaggcgggacagttgggtctatgttcagagccgggtctgatcactgtattgactgactgctgagttgtttggctgaactatgcagaccatttcgagggtggagtgttttggttttgtttcatttcgtggttgtttttaagacagggtttgcctcatagtctgtgccaaaactgaacttactttgaaccttgagctttcttgcctcagcctcccaaatgctgggattacaggcctggaaatgaggatctttactgagagctttgttgaggggagaaaaaaaatccatttctgtggggctacaaacctgaagaagaaataaattagagatggccccggtcttcaaatcgttttcaattagttgtgctggccaccctgattcatattgctcaggacgaggacttgaaaatacagacggccttgaaattaatcttagtgctgagaatggtggaagggccagcaccttatcaccattggagctgtggtgtgagtctgtgatgtccacagagcaagaacggctggggcttatttagatttgtattgtcacagagtcaaggacgtgctctgcagagtgcaagctctcaaaatggctttaaaataattccaagagttgacttacttgtttcaatttctcagttgcagtaggtcagcttgccctgtaccaatatgaaagtggaaagaggctggcactctgtgcctgcaggcccctgcactgagaagcacctccaaaaatgcttgtactattgtgccccatgcagtgaaactgaatacgtagtcaaaaccaagggattttgtcttagctctgtcattaattacttatttaaccttgggcaagacactttatcttcaattttttttttttttttttttttgtctgtgaatggtgatgataatggctggtctgtttatttcccacggctgctttgaggatcgcgagataatataccttaacgtgcttgggtaagtataaagcactttctaaatagaaggcattattaaaagaaatctcacttgtaattcctgcttccactaacatcgcctccaccatctcatagatggtgagatatgtaatgtaggtcagctcaggtctggtccctgctgagtctctacctcaggatgtatagtacctgactgactgacgctgcctgggattttccaagaggcagtctcacacctgttgcaaacttgcttcccttccaacacattcatttatcacacatgcacacactcacacatgcacacacgcacacgcacacacacacacacacaaacatatacatgggctcaatggcttctgcaggagagaaaaggcatgtgcttagctggctgtgatgggacgtttgtaatcccagcacttggtaggtagagggaggcaggaggatcaggagttcaaagtcattttctgtgatgtttacagctagcttgtctcagaagaaaaacccaacccaaacccgaataaagcaaaactaggtcaaatcacaacacgcccccccccaccatatattattgagcgcctctgtatacaaatgccctagaaaccaggacaaaataggtaaacgagatggtcacaactgtctgtaactgtgcgttccagaggagcccttgagcgttttatgagaggacagactggatggcaggcaagcactcgcttctgttcttacttttgaaggaaatcttatctgtgggttttaattaaatagggcctaactgcatattttaaggtttgagtacaatcaaagcctttggtagcccttgtttgtatttctgtactagtggagtgtgaatcgagacggggttctggaggcagagtgtgttttcagatgaaggtctgcgggatcccatttttctttgcaccagtgaagctatggctcaccaaggatctgcagctgctctgactggttgtaggactccccccagccccgacctccaggtgtccctgccaatctggcttagaagaaggacttgctctaatgaggaactatgttcttaggagaagagccatccccagtctagttacagtgctcagtctatctggggcttagctttgtaggcaggttggagacttccacctcttcaggctctggttcagggtttgagatgctaccacaagccactctggcagcaggaaaacagatgcagacagtgatattcaggcttcacccagggaagagaccagttgcaagagtgcaaggccacacttgtgaatcagccaggctacatccggctctttcaaaaggccataactgctgtaagtcccgaacacagtttccccttagagctatgctgatttcttgcctactttatctcctctatcgaaccacctttctcttccttttgctagcctttatctaggaatggtgtcttcctgccccaaggtattgaggccattgctgattccttgatgttactcttgctctctcctttgagcagttgctaatcccaaaagccacgcccacatgtccagcactcccacagctcctgtttaagttgctgtctccccagttcatggacaaactttgatcttcttgattatctgctttcacagaccctgccctgtccctgtggcagaagtaagcctctaaacgcaataagtccctgctcacctgattggctatttcttcatctgattgatcatttaattctctgacttttagtttacttatcggcctcttcctgaagctttcccttgatgatagttggtctggtgctgtgtatacaaatgctatattctgtaccctaagagctggttgccccccaacaagagaattctcacatacatcagcctttgcttgctccccaatttcaagttaattggttaataaaaggctacaacctgtgatgggcagacagagagggaaaggcaggacttgatgatctagtgagaggtttcaggagagaccaggggaaggagaaaggaaaagagggagggaggagaaggtcacctcgaggctggatgaatcttgagcacaacaaggagaaatggaccctgagaataacccaggcaagaacaaaatagcaagtgacaagggacatgtggctggaacataaattataatagttccaaacttgtccaatttaggtttacagcttgaaaataaaataccaggattttgtatcttttatactggctagctagaatatgtaattcactttacattccctgacgaattccaggctgaacctgtaacactcttgactggattataacgctttttatgagcaccttcttattctttcttttatttataatatttctgcattatttatctagtgcttactagaacacacacacagtgagtttaacactccaacaattcaacagaagtttcacatcatgtaatactttctattctttaatgtacacaggaacatgcacacgtgtacatacacacacacacacacacacacagatgtatctgcgggtatgcatacatatatgtgcatgtgtatagaagccagaagttaaagttgggtattattatctggactgccatctcttttgagacaaggtctctcattggtctagagttcatcaattatgttagattggttgccaacaagctccaagggccagctagtctctgcctccttaatacttggctttggctttttttttttttcttggtcaagattttgtatgtgtgtgtctgtctgtctgtctctgtgtatggtgggcattgtgcacatatatgtgggtgcctgtgaagccagaactattagatctcctggaactggagttatacgaggtcacgggccacttgacatgggtgctgggaaccaaactctggttctctggaagagcagacttagcttttaactgctaaaccattttccccacccctctgcctgttatggtaggggagagcaagctcgggttaaacccactggactgtttccccagccctgaaggttattgtctttaaagctgtcaccctgaggaacacagctacagccacttctggagctgtgcctcaggggtgagcacctttactctcttttgtatgcatgttggttgtgagaaatctgatctttgtaggtcaatttaaagtttgtatcggcaactcacgatttaccctcttacgtgagtagagattagactggtaacaccatgggtgaacaaatgaaagttaatgttattactcttctttaaacacatggcacaagcagaaattgcctagtgattttcactaactatactatttttaaatttaaatttggttttattttatgtgtatgggagctttgcctgcgtgtatctctgtccatcatgtgcatgcctggtgcctgtggagcccaggagagggaagtggatcccttggaactggagttgcggatagacgtgaagcaccatgtgggatgtgggtgctggggattgaacccaggttctctacaagaacagcaaccactgagctatctctctagtcctcaattatgctactttttgaaaagagcttctagggtcccaatgtgaccgtttgcagtaagtactagcttctctttcccaaggtaatgtatatgtgtatgtggtatattattatttgtgtttggtataaggtatatgtgtgtgacatatgctgtatgtgtgtgatatatggtatatatgtatgatatatgctgtatatgtgtatgtatatattcatgtgtgtggaggtcagaggacatcagatatcctgttctattactctctaacttattccctggttggggggggggggatctcttactgaacctggaactgggctacctgctaattagccccagagattcatttaactctactccctacagctgtttgaggcatgtgcatagtcaaacctggctttcactgtgagtgttggagatttgaactcaggtccccgtgcttgcacagcaagcactctttcccgctgatccatttcctcagactctatagtgcttattaaactgcagttttaatgttcacacccatttgcacttgctgaacggtattctgcattctaggtcaccatctactaattgataggcactagtgatgaaggccatgatcctgggccataaagacttccccgtgtagtcaagacagaaatacaaacagtcctgtgttacttatgcaattcctcgtagttgccaatttcgttctacaaatgcatttattcctaagacagatcacaccctccactctcccactttggaaattgttagtgtaatagctttatcttttaaaaactatgcacacaaacgtccatacaatgttcagtgttgtttggaaacatttatatgtaaatggcattcttagagtctcgctctgcgattcgtgttttcatcatcattttggttttacggctgacgtatatgaagatggtattttcaattgtattgcacttataattatgcattattcatctagtccctaagggtggggcatttaggttactcttcactcgcagctattaataggttataaagagtattcctggttcttctttctattttctacacctttgactagagtttcaagctcctgctgtctcttgaaagcctcccctaaattcttctagaccctagagcggacgattccagtgtcccaagcaccttgctacacgaagttcactaaaagaaccaaggatgggtgggtggatggacggatgaatgaacgaaatgcccagagcatcttaaggaatgtcctcttaagagtactttggcgcctttgccctctgccttccgttgacagtctcgtttttgctctccctcattcctctaaccagccaagaagtgtgtgggtgggtgtgtggggcatgaggtctgcctctctctacaagttcaggacccgggtaaaccctagtgtttgatgttgggcgcttcagccgcccccctttccgagctcatgggcgggctcggcggtcgagcgggcggagtacggggtgctgctcactcagatccctccgcgcgcagaggaccggcgcttctttctgcgggaaacccctgggcgcgcggcggcgacgggggcggagcctcgcggtgggaggaggccgaggcggaaggacacgcgggccgcccagccgcgcggcgcagccagaaactttcagccaaacttcgggcggcggcctggctgcgcggagtgcaggggcggcgcagcgggagctccaggactcagcgagccgcgggggcagggtagagcacgcgagagccgggctcctggtcgggacccgctccccatgcggatctgctctggctgcggccccgaagatgcccgctctgcgtcccgccgcgctgcgggcgctgctgtggctctggctgtgcggcgcgggccccgcgcacggtgagtaccgggcgcccgggagaccatccctctctgtctctgcgctacggggactgcgtcttccaaactgcctcgtccgggcctcgagtcttggcaacgcgtagcgtcccgggttccgcgttagcggggtctcgggcgagcagctcgcgggccgaggtgcgagtgtggtcgggagggcggcgggggcttgcggcgttcccagcttttgacacccggatcggtcggtttgtccggaggaggagttgggcgtggggcttaggtcttggataggtggaggcagcagtgggggaactggtgtggcagcgtgctgagccacatgattgaaaatctcaactgctgttattctttccgaggcgcggagctctgctgcggttccagtgtgcgtccagccccaggaatgtggtgtgacgatccccaactcctccaacctggcagcagcttgctgctcttttggcaccgttgggggtggggcaggggcaggcgaggaaaagtggagacgttgcttgatccgaagtgcttgcttagaaaggcttgttatggtgggatattccgtgccccctcgctaacttggtgggagccaggaaaggaaatcggatcatattttacccactccacccacatctttagattttacatttctttggaatgttgtatggaaagaacttcggctttggagtccagctctgtaatcctggattcaaatcttctgtattaactcaccaataaaatggggatgaaattacccagctaataggattaattaaaagaatgtatattaaacccgtagcacttaaaagatgttcagaaaagttgtttcagggcaggagcagcggtttggtctgtgcttccaatggggctatgtcttgtactggtttgaagtctgtgcttccagtggggctatgtcttgtactggttcgaagtctgtgcttccagtggggctatgtcttgtactggtttgaagtctgtgcttccagtggggctatgtcttgtactggtttgaagtctgtgcttccagtggggctatgtcttgtactggtttgttgaactggtagggtccccctttactcaagaacaattaacttttaccagaaaaactctagtacatttcctcagagaagggatgagtttcagaaaagtatggtctttgttcattgtaacaggcagctgacatgccaatcgcagatgctttgaggaagactcgattatttatcacctgcaaacagtgctgggctgtccagcatcaaccagatactttctggaaaattagaatgtcatacattgctgggtctgtaggttttcagaagtggaccaggattgaattcaggattgaatggttcccgaaagttttcctcaaaactcaacgatggcattcttgccttgccccttttctttgagtgaagctgttagccctcagtgtagacttagtgtaaagagctgtatgattagtgtggttttttttctgaggatgaaagtgcttggtcccccacgacttgttttacatagtaaagtaactttagtcttcatgacctgtgtcttttcccatatggaataggattcaaagcctaactatttttctcttgagtacttcggggactagtacgtaaagtgactcacaagtgctaacgctggcaacagagatgggatgaggctggcacacgggctttctcccatgttgaaccccagtgcgctgaactgatgcccccacttctgctaatgcaggccctcgctgtcaccgatatcggttggggcgtcacactgagtgtcagtccagctcaaatgtaggcattttgggttttggacaggtgttctttagatgctaaactattctcatgaaagagattaaagagctagttgttgttgcaaatcttaaatcttcccagggtctagcagggaagcttcctaatctattatggtgtatttgccaaggtaccaattataactctccctccctaagttttgagtgttcccgtgtttggctcgtggccagttgttaatttgaacatcactggttcctaaggcaaggagctgtcaacccatctgtgtgagcttctgaacaattctctggaccaccccttactccccttacttctggcttgcttttggctctgcggtgggagtgactccctggttttgctgtcacctagacactttctcagttgaatccctactataaaaagaacaagttttttttttttttcctttagggtggagataaaattcaccctataactatttcccgtttttctttcttggagggaggggggagtggttggttgcagaatctcttgttttatggtgtttggcatctcttttctgcctcctctgtggatttgtgttgcccagaagggcagccttggctcacctggcctgtcactgatttcaggacctttaaagaatgtttaagcgcagtgggatatgcttggatgcttgagagaaaccttataatacattttaaaaatatcacacccacagaaattttattttgcccacagaatttgcattgatgtagttcccactcttccattcctggtgaccctcctccctgccccttccatgtcctggctgcagcagacctccactcagcaccctggtgtcctgacacaggaggcctgagaatctgtattattattttttttaaataaggcttacaaaagattttgacaaattgaccgagtgggacaatcacagattaattctgccttcaagaggtgtatgagatcttgccttttagattttaatagtttccacagtgaacccagctttaaccagccattccagcagttaacccttttgactcttaaagaattcagaaattgctaacatgaaagctgtagactgtgattggatccttcttgtgcacaactgcttctaaaaaggcttcatgtgtgagtgatacctctaccccctctgccacggattcttcttcaaatgttatatatacatataaattttggattctttataaacttttccaggtgtgtgtgtgtgtgtgattgtgtgtgtgtgtgtgtgtgtgtgtgccctctaaggcatgatctggataggaatgcattcttgtgctgtatttacagactgtatctgttttctttcttgatgtctgtccggatgtctcactgatctgtcccctccactcctgaactttctggatcctcctgctcctgtcttctcttgctttccaaacacaccttgaaaacaagaatgtcccccgtctggcactttccctctgcaccggtccactgtatatgtagtaattgggacaagccactaagccgggagccagaaaaccagaaatctcctccagctctgttattaattgatttggtgaccttgcaggggagcccatggtttggtagttcacattctcatggactttgtcaccaatcacagggctggttgcagagttgggactagaatttctttgtttaaggcctcaggtccagggccttgtgtatcgtccatactgcttctgtcttgtgtacagatggatttgtgtacacagaaacacatccttgagtgcttactgttagtgtatgctacagggaaagaattgtgcctctgcttgtctgtgttctggtacccacatttctaccctgtacttggcatggttccttggcatctcattggcatcctgtgaagacgtgttcatttgagccagtacctttcagtcctttttcattgtaggccacagtggtcctgctggatgcctattaagtggtgtttgcaatgaggctctggtgtcttctcttccctgacctctcctgctccatgtggtggtcacaggttaacactcactgcacttttgttcaccttttctatagaaggctttcatttggggcacagcttgggatcatttctggaatagtatatttttctttggggtcagctttgttttgctatttttgagccttttcatcttaaacttgatactgcaatcctgtgccagacaaccacatgtgattggcctctgacacacagatcctgctccttgagagaggtgctctgcctcacacacacagcccttttctgtcctacggatgttcacggcatgtgtccagtgtgcagaggcacctgagcggaacgccttggttgagcacctgtggcttgctcagtgtgcctacagacttatactgcctggcgccttttgagacagggctttggaaccttggtcctcctgtgtcagcctctcgagtgctcgtgttcagtgtgcaccatcatgtctcacctggctttgtgctaacccatcccctgtttttacctaagaggtgggtcagggttacctctttgttgtatgtgctgatggggactttaaagccctctggtgcttctctctgcccatgctagatctgatctctacctggcaaggggcagtgtacctgtgtttcctatcaagaggcagtctttgacctctagttcttatatgcaccaagtttctctcctcttgtttctattcattggtatcatctctggattttgtcctcagagtcctgagctttgtgtgggtgacagaagtaaaaaagagcaggctatgtacccttcactgaagtgacacccacttgtccataaaaggagtggaacttgtgaagaacgttatgttcttctgtctgggaaggctgttcaggtgaaccaccttagccctacgtcttcatacctccctgtccagataggtccatgaagaaggaaagagtttgtccagcagcttccctggctcctcttacgaaaagaacacatgattgtcctgggtagtgtgactcagtggatctcaagttgtgtctgggaatttgtacgttctagttaggggtggggatggctcagtgtgtagagtacctgttacaagcaagaacacctgggtttggatctccagcacccacataataagcagctgtggtggtgtttatttgtaattccatagctgggggcagagacaggatgatcctggggctgtaccagccagtcactccagatgaaacaataaactgtatcctttcccaaaaagcaaggcagatggtgctggagagatggatcagggattgtgagtgcttgctgatcttccaaggtcacaagtttgattcccagcacctgtatcaggtgcctcataactgcctgtaactccagtttggggggggtgtctgatgcccatttctggcttccatgggcactgacacacacatgacttacactcacacaagcatatacataaacatagctgtatgcaatacagtgatagcttgaaaaggaggccatcacttgctctgctggcactgcaaggctagtaatgttgccttgtgcttttaaagagccggtctgtgaagtctatattttaggactgacagaggtatagcgtgtgtctttaaaggcagtctccctccctccatcagtgtcactcggatagatcccggaatgcacggatttcacacgaagtgctgtctttagcccgggtgattgacgcttcctcggaggatatctgttttgttaacctgtgactgcctctctgctggcagcttttcccttgagtacaggagcacggagagagaggaagacaacttatttcagcctgtcctgattttttgagagagggtcttactactttgtagccagaattggctggaacttactgtgttcgaggctggccttgaacttagagtgatctgtaggccttagcttccttcttatttcgattagaggaacaagccatcattgggtggcagtactgacttgggttgggatattctcacgtggtgcatgaggggaagggagaatgatgagcgtgccaaaggccccctacatggcacgtttagcaagaagggcccagggtcgccctgttaccatggcacttcatgttaccgcctctgatggaaagaaagaagtggcttcagaagttgttggctgtcctttgggcttcggcgggtcagactgcacagtgttccctggcagcagcaggaggtttgccgcccctttttgaagggattcttacctgtttgcctttaacactgtggccttcaaaagcgtgaaacagagaaagagggctcttgggagctggagtgagcaaagcaatgatcgcattcattttttattgttacttttggtcagtgtgttcaagaattcagggtcactgctcaattgcctgcaggactctcagggactgggctccagggcattagaagagggacccaggccctcaatgcctggcttgaagaccaaagtgccagctcagccatcaaattggcctgcagttcaaggggtccaggcacatttgcgtagaatcctctgaagactgtgggctcttagagtgatgctatgttaaggccttgggtgtgtcgtcaggcttaattgtttcccttggcatcttggggcaggcagtgcagggaaatatagtctccaggtatgtgggaattgtacccagagtggaagttaggctcctgcccccaggactgatagcatcactgagatgaggcagagaggtacacggtgtgtagtttgaaagccacctagccatttattgaactctctgaaagcagtttcctgcagtctgggtaactaagagcagtggggttcctggggagtacccaggagagaagagcagccccagctccccccacccaggggggcttgtctgctattttgcacagtccgctattttcttttctctgttgtaacataggaaaagaataatcaacttgccttggtgagaagaagacaaagacccccgtctggtggcgggtgtgagtataacattggcagaggttgtggtggctattagtggctctgtggtgagagagcactgtgtcctcagccctgcatggcaggcttgctacaggacatatcagggtggaaactgtcttcctgggaagatcccagttctcagcggcagtggctgaaagacctcctcatcacaggcatggggtgtgtgtggtgtggacacacccagagtcgctgctgctggtggcattgattaatcaacgctgacatagccctcaccctgctttacttgtcttggcaaaaccctgttctgccagctcctcagtacttatgtggtaccaggagagatggagcaaggtcctggtggttgcgggggcggtcactccactgtcctccctctgctgtctggaactgttggctgtcaccttggttgaccagatgacttttctgccaggtgtggaggacctgggtcccatcttccagtggactgaagcccagttccctggaggcctgccagcggagatctctagtctccaagtcagttccttctacagattgctggcaactgaatagtaattctgggttctttgaatatatcagaccaacatcatgccagagtggactcattgccacacaaagactggttgggtgtgtggtgttgcagaacctgtttctggggtaagagtgactctcccactcacagacatgtttattcatatgaagaaagtatgtgtgttttgtgaggccagaaaaacacgatgagaatattttgattggagtcagatattgtctccttaataatacgtcttcatttaacaaatagcaccccctttaaatgcagccttgcttgccaggtaaggtgttgaagacacagctgtggttgtattctaaagtatatgtcctttttcagaggcaggtgtacttttaaatggtgtggtttgcttccttttcattttgtgttctcctccctgccctccctcccctccctccctttgagaagattctgcatcgggtgtaggtcacaagcgttacctagcaggagagagaaatcttgtctgttgggctcacgaggtgtcccagtaagaataaccgaatgctgtctacttaggtggtgcctgagttaactcctgcagagagaaggtggaaaggtgctgggagccttgtgtgtttctgggctctcggagccttgcctttggaagctattcagtctcattgaggttccaggacaagctatcttgcttattcattttgtatgtttttctttgaagtgtacatggctgttcatttgctgactcttcttttaagtggcacacatttacctttagatagtaaattttttttttgcaacatttaagacacttccaaatctttatgaggatttaaaggcaaaagctcaaatggtgtgcctagtgcaaggtttgtcattacgtcagcaacggctgggtggggtgtgcttacctaattcaagaatgctggaaactgagacaggaggattgctgtaaggacaagcagctaggctatcttggaagaccccctgtcctcccaaataaggcaagcaaccacttacagtccttgctccacattgcctagccattaaggaaaatggttgtaactaaaaacaaacattgtaacagtttcgcttaggtaggtttacatagcaacagaattattccttatgtttacacataattaacttgtatttatactgtgttgattttccctggcacctttacaagattttgtgtgtatatgtgcttttaaaagcagtcacatttggaattctttaggtatgtgtgagcaatcagaataatatcaccacacctctgttagtgttttggtattcatgtatgtattttgttatatcttttttcacccttagattttaaaagctcctatacatttgaaagtcacacaggcagttttctgtttaaaatgttttcatacatttgattctagtaattaaataatactaaggaatggactcatatgttttgacctctttcttttgactgcaaatttggttggatccaactcccccccccctgcccccccgccctgtcccatgtacagataagaatcagctgcccaccagaggaagcgttgctctttggtattccagcgatttctaaacctaagagagtggcatctaaaaaaaaaaaaaaaaaaaaaaatcagagacaattaacatctccaataatcacatcgtttataagccaaacttgtggttaacattttgattgatactttacagtatttttccatgctcagtgtctattataaaactttaattgggattttaacagacatatagttttccactaaaaataatatgaacatttcctccatatatgttagtagcctttaagaatatgacttcaaaggcaacatactacactatcttaagggactactagccttcatttttgtggaaatccatccttagtttccaggtgtcataaatataaagaattctgtaatgtatattgttgctgggactggctcggttaagagcactggctgcttttccagattcccagcacccatctctggctgctcgcaaccatctgtagctctagttctaagggcttcataccttctgaccactgtgggccccacacacacatgctgtgcagacatgcacggagacacagcacccatactcataaaataaaaacacatctttaaaaaaacaaatcccttactttctaccaaaatccagaagcttttcagccaaatggttgcattactttttatagagtttgacccagtcatacttttcattagcagaatatgaggctgccagcgctgccagccaccgacagccctgggattcatttaaataactcttgttattacctggcaaatggtgaatcctacctcatctcttgttgccttttattagagcagtatagaaaaaaagatctctgtggattcattcgtctaacgcctcttcttcctttctatctcttttactcaactgagtcttttacccgtgaattttttaatatatctgaactttagctattaaaggcattggtacttcacctgcttaaaacatatcacagtatgcctgtcagtttacagtacatacaggctggggctgggatggagtacatgtatgacatgcatgacgccctgggttcaatgtccagcaccaaaagcagtcagccacacgaaaccctctcactctgtctgtctctgcctcgctcagtcgaacataaagaccccaaataagcaaactagaataccatacacaataccaagtttagtataagaaatgtcctttgataaggtaatagtttttcatcttttgaattctgagttttcgagacagggtctgcagccctggctggcctagaactcagagatctgcctgggctctgctgggattcagggtggatgccctcataccttgtccttggccatttaaaaaatacatatattaagtagtattttctatagctactttaaattccatttttggatgtagttgtttagttctgattttttgagagtctcatgtagcccaggctggcctcgaactcagtacaaagtggaggctagtgttgaactcttgatcttcctgccttcatgtccctagaggggattataagtatggattgccattgcctggcttggtgctctcaaatttggatctgactttaccacacaacagctgcttgtaagttatatgcatcaaggaaccgtacgtttactatatactgggtttaagaagagaccttgggggcaaatggtatgtggttccactactgtcctgtttttcggagggtgcagaaatgtgtggagcacataacactctgaaagacaaaaccagcatcctgtcctctccactcactgggacctaactggtgagcctggacagtggtcagggcagtcagttcaggcagacaactgggtgactgagactcccttctctctaccctcaccaaattgattcgttgtgggatggagtggcctgaagcaacctgttgttttggcaccctgtggacaccacctgtttcttccctttctcactccagcctcccacttgccggtgcagggcgagtgcacagcggagcacagcggggaagcgatcggtgttgttgccgaggaatgttgcaataaagaggaatagattgagttttgcaagcttgtgtgttcctaagacgccccactgcttttgacatggagtgctccggctgaacggctctgtgctgaagccttgccggccccaagcgtttgctgcagagcaatttcaggctgtatgaatgcttaagtatcattggaatttactgggctggttgtttgccagcaattaccatatttagcatgaggagacctggggaatgaggacatttctgaccaaccaaagaaggaaactctgaaggactgcaactccttcctctctttctttctttctttctttctttctttctttctttctttctttctttctttctttctttttcttcttttaatgaggtggttaggagaacaccagccaagctaggactctaatttgtgacaactggtctttgtttttgtgccccttccacataattaatttatggacgggcaaagagatttgatagtggagttctttctcaccctgacgtacaattctgccttcgggaggaagcagggaattactaggcctgcttccctgctgcctggctcagcctgcaggtgagactgtggatctatggctagtttccactcttctcacttaagatgtgctagttttcggctttgtcctggcctgaatttattttggcctagcccttgtctccaccctgtgtttggagacatcggccttcgtgctgtggcttaacattcctctgcctcagtttttccagtactggaataaccagccaatataattaacataaacattgtttttataaagtaagacaacctccaacatcagtacagccctgtgtagttcaaagagcatctcacaggagttgctcctttaatcccttcaaacctttgctggagcccagcaccaagaggtcaggtggctttgcactgcgtcctgttgcttcttcctagatggtcgttggtcgtcgagggcagggcaggcacttaaacgcacattttgattgttttcttttctttctctctctctcttttttaaatgttcatttccttcccaaaaaggtctgctgcgcttttactctgtaagcatcatccgtccagggctgtgtcgtgtgtggttcctcattgcgctcacatgaccgtcctttggggtaaacagtagtcactggcgctgtagctcgagttcggagattagaaagttaagtcagaggggcatcaggctgcatccagagccctaccagggcctcacagctgctgcccactccatgacttccctggaacacagggcgggatgtggagactgaggctgcagttagtcgttggcttagtttaggttcataaataggcttgatcccaatgttcttctgggttcaaagacactgcgcacacactttatgataggaataactaaacattaaatcccagagtcttctgttttgaagagccagcctcttaggaagcctttgtaagcctcagtaaggctgggatggctgtgtcagctgacaggtgcagctgtggctctggcctccccttagctgctccactgccaggacaggcaaaaagaattcagggagattggcaggagttcccgttaggtcaacatgggtctctcagctctgagctctctcaggaggactgctcttaggcgcaccagtctctggctgtcctcgggacattccagtgtgtgtccagcctttgtgaggaagttgtcagctttgtggggagaaggtggaggcaccaacaagtttggttcccagcttaccagctttttttcttaggacagatttctttgtgccttccttttgccgtctgtgtaacgaggagagtagtagtgtgtgatctgggggcttgttgtgaatgttaactggtctgtgtgagattcacaggacagtgtctggagtgcagtgagtgtggtaaggactcggcactgatgttcctttaggtcacagtgtggacagcctgttcattcccgcagaatggaatgcttcatccatcttccggaatctagtgtgagtgagtgactgcagtcctccgtgaagaaccagggacttttcagcttcctggtcaggggctgtaccctgctttcttctgacttggggagtgttgaagtctgttcccttcatggggtggaagtccaacttggacaagttttgggttctgctgggaaggtggtaagattttgcttttactttttaaccaggtgtgtggttatatgttatgtcaggccacactgaaggtgttgatcttagagtagttttagattcaaaactcattatttttttaacttgagttttcaagttttatttgtatgtgtctctgtgtgtggatgttttcagaggtcagaagaagatgtctggtccccttggagttacaggtggctatgcacctgaagtgcatgctggaaactgaacttgcttcttcaggaagagcagtcttatgcactgagccatctctctagctccaaggttcatacttactctagactttctgtgatatgacagatgttcttgtctgccattctgtaccatggtgagggatattaataaggctaggatactcaattcattatctctgttagacattgcaaaataataccaatgtgcgacacctctcactacacttgcagaggcaattggaggttctcaggctgggagctatcctcctacttcatacccactttaaagatggagaaactgaagcctgtagaaacagagtgtctgccaaagggataggcgccaggccagggccagggccagggccaggatttatgctcctgatttctggtcaggtggttttttgttttgttgttgttgttgtttctctctgtgcttgctcctcagaagtgtgtcagtgtgttgactatctgggttttgaggtctgagggttgctttcagagccaacagcagtgacgaagtaggaaggatgtggggagggcagaggtgtagccatcttgaagctgtctctgaagtaaagatcttgtttcctggggactcaggcttgtccctttggacttctttgtcatagtgagggtaaccagtgggcctgatgtgactgatgattcagagttggctcatccaggactgggaagctgctgtgtcagatggacgttaacatttgtttcccgtggcagcttgcttatctcaagtcttggcagccttggacaaatggttgttagggttcttttgttttgttttgttttaagacaagatttcagattctactttgcagattttgtgagccaccttctacctaccactcccttctgctccctctgtaattatttttaagactttgttttttcattgtgggaatatgaaaggtttcttttatagtctaaagatatttataattattggtaagcacacaattgacagaaaatgttgtgtattcattttaacttaagatatccctaaaacacttaaactatgttccctataatttggatcttcctacaaaagcagtttaagctactttctgagaagactgtactaaggggaggactatctggatataacctagatatgtatgaagacactctggagaaactgcagtgcctgtgtgaaaggtgacctaggacatgtccccttgctcataaagtaaaccagacagacacctccgttctcatggagcttatgtggtttccagtcatttgcatgttctgagggcttaagtccttagagtaagcattatgattcctggtcacagaaaggccagggagtggccatgcatgtgactgtcctagccagtggatcagagcagcggctgagcactggcttgacacgaaagctgacccccaaccatagggcagtctggaggaatcctgtgtcccattgatgacttagctttgagtttaatcatttatgtactgaattgacacttggttcttagcagtatcttcactccgaataaatacctgcatagtgttatggaaattattaaaatttccacttctacttagaagaattctagttccttctgatttttttttaactaggaaggatgtatttatattgatagtaatgccaaagagttgtttactggtctcgtctgtgttttctcttgaccctctcaaagaaactcttcagtagattgggaccaggaatgaatagtatagcttttatatttttattttttataataagaaaaagtttagaaagattggaaatggtagctcggagtcctatttgtgttcagaaatgttttctggcaggctttttggttacaattagctttctctggactgtgcagttgtcttcttactgtgtccttcaaaaagagatgtgtaaaacagattggaatgcttcagtctctcaacactggacacagcctgctactaaaactacccagtactaacctgtcctcaccagaaaccaaaactacccagtttcaacctgccctgcctcaatgttagttaaaactacccattctaacctgtcctgaccaggaagtttgaactgtgtatggcattctgcacctgtcgctcgctccgggccaagaacgaagaggccttgccttttccatgagcattcctcagtgtcgtctcctctggcactgagaactagcagtcatttgcactgctgtttgtgagaagagggaaccccagagcaccctttctgctttgcagcgcaggcttgtcctgggcacacaattgtgcatgtgagtcttctcagcacacccggtttctgccaaggacttgctgtgctccccaccagttgaacagtgacggggggtgggggggggagcagcgtaaagactgcggcagtcagcactggtcatttctcagcagccagcaggatgcttannnnnnnnnnnnnnnnnnnnggtttggaacatggatagacttggctttggttcttatcagctgggaatatcagagaagccattgaagtctttaggtcccaggcccctcatttgtgtagtgggagtaatagtaataactaacttatggagtgctcttaaagactagagacatttaattatgcctgtgtggctgtgggcacaaaggtagggggtcccagaactttaagtgtcattaggcttatggtaattctacattccctgggcctgtttgtttcagtgactcccgtttcgctctgctctgctaccaaggcaagattctggattacccagaatgcaggccgaaagctttaccaagagtctgctactcttgtttgcagtggttttgttcatagcatgcagcctcttgctcctctcacctcagaagccatcgattcatagaaaaatactgttcaggatttcagagtaaagctgcagaactctgccagtgccaagctacgtggttggattatttctgtcgttaacccccaagtccatggtgtcaggtgccaggggctgtttccagcactgggcctcacacagacatgtgatgggacttccactgaaacttgtgccagagaaggctggaggtgggttggggattggggtcgggtagggggtgggtgcctgctcctgcctctgactcctgagtgtggctgagacagcagtggaaccgtggggaagctgctttcagaagtggttgatgctacatcacctaatgatgtacatgtttgtgccctgtgggctggggaaggggctttcctgacataaatcttgttgccatttatcatttctggcctaagttgggggaggactttttttgcttcatagaactttagactgggaattttgttttaatgaaacacttatattaaataatgtttctcagtttatattcaaccctatcttatttgagcctcaaatcaactcaaccatagatgagaataatgaatatttagtaacttcagggaattcttctaaatcatgtagttagtgtctgacagagccaggcctgggacccacattcttacatgtctgccagctcgcctttatataccacatgcttccttcagagcacccctcatctggattctgttccccatggcctggagcacttttctcctgtctgactatctctgttggctagacttcaagggtgccttccccaaagctgggctgtccaggtgtggctctagtcacctgtccctgtcccacctaagcaggatggatccaaggagaagctggcagaaagtgtcactgacacagctcagccgccacagggggcctgtgcctgctcactcagcatcacactcttccctgcttgtttattacccagtcttcatatgttaagcttgctttctttccatgttgccagagcaactgctccttaaagttccccaagcgtaccctggacgtgcttgtgttcaccagcagctccagcactcagcaggctgaggaagaaccatctccgttagttcaaggccagcctggactatatagtaacttccaagtcagcctgggctaaacaaagcgagaccctgtctcaaacccaaaacaaaggctgacaaactgagctgactcagaagataaaggtgctgctaagcctggcagcccgaggttgtttgatctctggaactcaagaggtttaaaaaaaaaaaaaatcaatttctgaaggttgccctttgacctctgcatgtatgctgctgcacatgcatcatgggtacacacacacacacacactccacctgcctcccaaagttacctaaggtttgtctagagtacacagcagtgaggagccactccttagtgtaattttaagctctggctggcaatgcttccttccttaatcattataacagtaaatagaacccgtgctgcgcatgcacacgggtgtgtccgcagtgcactgtcacttacacaagtgcacttcaggtttcttcttttcatcaaaatgaggaaatagaacatgttttgttaatggtgattttacaaggaagtgtgagttcaggttctgtgggcgtgctaagagatagagtttaggggaggaaaggctgctgctggatgttagctgcgagatgttcaggagagaggaaacccacgcactcatgctgtgcactccagatgtgccgctcaggcctgaggtaatggtgatctgaaagcccttgcctacatccatgctgtatggaccatttattcaagaaaaccctcttaaaatgtgctattggtcacaggtgtgaggggctaattaaaagtttgatatgtgagctctcagaaaacaccaaaggaccatcattttgactcctgcagctgtccaggtgggtgcttgtcttggcccgtggtcattggagcacgtccgtgaaggctgctgcacctagctgtaccaggatggcgctgcactctgctctctaggaaggtggcagctgaatctctggtgctgtaatccctagaactccgagacagcagggttgctccccagcaaagacggcgtttcaacattcatgtaatcttctcataggaagctgggggactctagatgtggttgcacacaaccctagtacttgcgaggctgaggcaggaagattgttagttcaaggccacctagactatgtagcaggatgagagagggagagagagagggagagggagagagagagaatatgaatgtgtgtatgtgtctgtgagagatgtagggggaacataaattagtacctttgttatatctcaagcaggggtgaagttttaaatctgaaaatttggatatctgaattagaaattgggcatccctaataggttaagttggtgtgtgagtgtgtgagtgtgtgtgtgtgtgtgtgtgtatggaggaacaatagactttggaacttttttttttcagaaaggatatttatctctgtatctcttctcagttggcagagaatagctatctagagcactgctcaggcctcctgaaagatagatttagggaagttgtagctcgcttaataaccatctgtggagtgacatagattgacacacccaattacacaagcctggagtctgagaactggtgatgtgcaatcatctcatccgcatctgctggtcattatcaacagcgataatggctcagctatttcttcagggccatgaaaaaagacagggtagctctatcaaaggttaagtcagctctgaagagaatagcctttcccaccctcttcttcccaaacttctctttaaacattctcttttgagaggttttgaaagaattcattttgtttcttgtttttcaaatatatgtatatatatgaaatatatatatatgtatctatatgactatatatgaaaaacaagaaacaaaatgaatacatacatacatacatagacatgtgcatatacatatgctgctccttctgaaaacagaaaagatcaaagtattgtaggccattttctcaaattgaatttctttgtcatgtgcaagcttttggtgacatcacagtgctttatttgtgtgaaggtattcattctttctagtttatggttttgtcacatctgctattaagtcacctgtgggcaattttctaatgcaatgcatttgggtcaccatgagtaggagggaaggagtcagtttacagggatgatttgcatgtgagaacataagctgtactagtctgtccacactcacaggggcatcggtaccttttacagagactgggcagtgtgtctgcagatactgaggcaggcatccgtgcgatctcaggccagcttgctctgtgggtaccagggtgagttagggacaacaaagccagctcccctgcctgttcctctttgtagagctggaatgttagttggcaaaagtgtgggctcttcttttaggagatgtactgttggctctgggagagtgtgctaggattcacgtcctctgtgggaagaggacacactgttgccttatcgtaaaagtcatcttactgtccctgaaccatgcatggttctgtggctatctaatggcactgcagggcttctggctaggatgggaaataggcagtgtcatggaaaatactgagcttctccacagctttctgtgagaggaagtcccatgtggtagatgatctctgattttgccaactgtagctttggtgttttaaagtttatgtgccttgtttttggaatgtgtctctctctacaacacaaatgcttaatgaggtctcattgttttgacaaatggtcagacacaagggggtcagagcagtgctgttatagctgggactaagagtgttatgtaggcagtggtgatgggcttgtttgctgtttgagaactgctgtagaatatgaggaagcaccccgagtcgagtttccagaagtccaggtaatgacaatgtgagcccagggtatgtgctagataaaaagaccaaaaaaagcaaaactctttggagccatccatttcattcattcattcatatatgcatgcatgactagactcattcaacaaatatttaagtgcccaccaggtgccaggaactgaattgctgggggtttttgaagaaaatgctaaaacctccatttgtggggctgcagtgagcataggccagcactgacttgttcctgatggttagtgatgtgtacaggtaagcctgcccttttctcttgggcttttgtttggaatccctgcactttgttacagtggcctccctgctagatacagggtagctgatgatgcatttaatccttagaaaaacctcagtgacttaatcaggatgtaaaagatgatgaactttgaagaggtcataacttggggctgaagaggtggctcagcagttaagagatcactggctgctcttcctgaggtgctgggttcaattcccagcacccattgtcagcttacaactggctataactccagttctaggggatctgatacccttttctgacctccttgggtattgcttacttgtggtacatagatatatatgcagattaaaaaagacactgataaacagaatatatatatgtgtgtgtgtgtgtgtgtgtgtgtgtgtgtgtaaccagtttgctatgtatcaaacagcacattgtaggaaaagagtggactcaagagaaggtaccacagtcataagtgttgtttggggtgtgtatgtgtatatgtggtataaagtatatttttaccctaggttattataaaatgtcagcaagatacagcttccttagctgtggacccacagattggtgttagcagattgtgacatttaggccttagaaaaactaagtttccaagagcacggagatagtagccacacaacacccagtcacctgctcccttgatagtgctgaggatgcctgggaatcaaatcttatcttctgcgtggtgctgtggatgctttagagatgttgacagaacctgaaaagggaagctgaccctcacctgctgagtaggtgaaaattcggccatggagtcccactgtttgcagataaagacagaacatgtctccagggaattctggcatggatgatggaatgagcgtgatagccttagtgatcagcacaggctgcgtgtgatgtttctgtgttagctcatgtaattgctaattactttggcagaggggccgtagctgttgggagtgagaagggcgcctatcagcaagcccacatttctgtacgctgccttcagttccttcttttgtttctgctgaggtcggagctgttttcctcagagcctggctcacctggcatgcactccctcatttttcttttgctgcactatatattgcttgcttcattagccgggtgacagtgggtcctgtagagatgctagtgagtgagcccagttcatctctacgttttcctggcctgtcatattctctgaagggcgtgcatatcctaccgtgtggagtgttggggtgaaaactttaaaacagtataccccaagaaaaacattcttttgagcctgcctgccagtgtgtgcacagtcttaggaaggcttaattttagaccattctaacgtttcctccagcttcccagtggagggtcttgcacctccccccatacccttccaggatacacatacttcattttgcagaccactgatccagaaggtaaattgaagagtttaatgccaaagctgttggctctttcgttaactagattatcttttactcccagtgttcctaatgcccttctgcaaagtagcttttgtgaatgactgcatgaattgagaggctacatttttgaggtggaaaagatgaggatagagcatgcacgtgaattaagttgaatctgttgttgccagaatactgtttttgattttggaaaaggagaaccaacagctctccctgtaacagtctgggttggtgtttggtgtgattaagtctctccttcatatcgtggtgactagcctggctcatgatccagagttagagcttggtaaatgtttattgaaaaaaaaaatcagcctacttgagagtaagctagaagtgacagagtaataaaatgggtgatacatcatctgagggccctactgaaggctgctagcatcgtgcaacggttgtagattctccgtcggcctttctgtgggcccaaagtggagcagggcataagaaaaatagacattagaggaaaaacttgcatttcagcgtttggaagctcagcaatgtggggattatcagaggccgtgggacaccgagcagaagcaacaaaagattattttggtattggaagaattttcatttttgtgatagagcaggttaccatttgagatataaaaagcagaatggaactggctggctgtaaggtagaagcagacagactcacagacatgggtgcagtgtacgtagacgttttgggcatttcttcaaccatagacatgccagtctgttcagtgttagggctgtttagcttattaatgtcactggaaaaacgagttagactgtgtgctgaggaggcccagtgagcagtgtcctagcctgggacagcgcatgagcgaggtcttcccagtgctgtggttttcctccagctgagtaaagacagctgctcctcagactggggcttggctgcacaataagaaggcaccctttgcgattcttcttggttgtcccctcccacccccaacccttttgtgctgatacttttcaaaactctttgtttttagtttcctcagatttttgtcattgaatttcttgaatttggtagaacatttatagagcacacacacacacacacacacacacacacacacaaaacacacacacatactatacatggtgtctgatacccttacaaaggtcataacgatgggcaggaaagacagttctctggctggtagcatgctctgctctttcagagaactagaactacatctggctctcacaactgcctgtaactccagtgccaggggatctgatgccagtttctagcccttgtgggtactactatttggagggtcgtgctcacatgtacaaacttacactcaaacacatatacacagaagtaaaatatttaaaaagtgccattaagaaagcagaaaagtaatatctttaaaacatcttttaattaagtttttttcattaaagaaactatatgtgtactgatgttttacctgtgtgcataatgcaacatgtgtgttcagtgcaatgtccaccgaggccaaaaggaggcgtcagatctcctaggactagagttatagacaattgtgagctgccatgtgggtgctgggaattgaacctgtgtcctctggaagatcagccagtgctcttaagtcctacgacatctccccagcccctattttatacagttttaaagtagtgcagacatgaaataaggtgacactttggggacaacatatgaaaatgtaatgtacttttgtctttggaagactagggtctggggtctgagccatgtggaaagaatgagctaacgactcttgcagcaccgagggcatgcggcagaattgcttatttcctgccttgggaagttaggctgctctctgctgtctctgttgattcttttaattggacagaagctgagcagatgaagaaaatccccagcttcctatggccttttggttcaccgcatcagtcattacccaccctctacagagcatgccacgctttttcctggtgagtgctccgtcttcattagcttcgtttgcagatgtgttttttattttggaggtatttctatctaactgtttgaactgtggattctttgtcccagtgagggtgactgtccccgtcactaggctcaccatctgtaagagtaaattcctgtcaaagtgaggtgtggtcagtcgttcctgagttccagttctgactcctgggtgttctcttccttccccatgctgttctgttattgagaagaaatgctgtctagctacagtctgattatcaacaacttcagcctctcccctgctgctttcaactccatatagtaccctgttttgttttgtttcccaggctggaaagcctgggattgctgtggaggtcggtgatggtgaagtgtgtgtcttcatagggcttgactgtccagggtgggtctggaacacagcactgtagcctctcctgtcctaggagctcaggcctactttcacaagcatgtgggctttggcagaggtgttcttcatatgcatggctaatatgtaagtggctgtctatttgacgagactgttgtatcgcaaatggtattaatgcaagtttgttgttgttgttttgtatctaatacaggattggtagattaacaaaacaaaacaaatctaaaatactgcattctagccttggtttggagtctccatctgtatggctataggcaagtctgttatttttaaaattctttcctcttttgcaaagtggagctaatatcaatttgtatgccttgccaggttgtagggattaaaggatttgtatgaagacacctagctggccgagacagtactttattgtagccgtgcatttctagagctgggtggagagtccttgcctgtgaggagctgggccgtccgtcgtaaatactctgtacagggctgctgtctatggtctgtgttgctccctggtgctcagtcaacgccagcttcagctgttgttggagtgggtgcctttgaccctctagctatatggcttgggatgcagttagatcatttctgaagttcatgtcctcagagttcctccctgagacctccagtagcagggttgggattgttttctgctcagatccgtgagataggctggagcccaccgtgctcaaaagtcataatcttgccaacattataaatttagcaggccgaaaaccaggccacattgcaggggcaggtaggagctagagacttggtttgaattttttttttttttttaactataaaacgtagagtatttgagactttccacggagacatactcgggcgcatagccaaagtggttacaataccctggttttaatattgtcggtgaggtaatcgtgtgttgggagaggggatgcttgtttcctctctggcactccaccaaaccccaccactgactcctttgtcccttgaacctaggcttacttgtaccagtaccggcttttccaaaggatttgaccctggtaatgagatgaggtgatgggaaggcaggccccagccctgggcatggactggtgtaactggtaaactccctcttaaatccctctgttcaacaggcctctcgctcccatgtcctcagtggggtgaattgttctcgaggagagaattttaagagtgataaacaagagggattaaaatgtcccctccaccaggtctctgtgtccttataaaaggctataataaactgtcattttgcaggttttccttgtgctttgtgggcaattaaggccttgtttatcattctcttggtgggagatagaaaattactggtctctccattccttgggcagtccagcttagcaaccatttcccaagcattgattgtatgtgtgcctgtcctcacagctgagctgagtgatgtaggtggagcagaaagggcttgtgtttgttgccttagtcctagaacccacaagcttctggaactctcttcagctccgaatagaaggaatgccaaggaagatgaatgggagttgaccccgagttcactcttctggatccttgagctccctcaggacttgttaatgacgagcgggggggggggggnnnnnnnnnnnnnnnnnnnncaacacctcacacagaacttaccctcaggtcttagtttagtaatctagagtttgcactgtcactggcggcctttctgagacctccaggctgagctactcttgacctctctagacttgagaatgctgccaagggcatcgtggccctctgtgtttgtgagttgactttgtttttttggaagcctagggtttgatgaaggagctccctggctgcggggatcagtggcagccatcagtgtcgcctgcttctctctgccctcgtgttgatatgagttgatttctgtgtgaggaaacagctgaggagaactgagaagtaagactagggatggaagggccgggctgtgccccttgcaccatcttcatgtgcactacagagtgggtgtctgcctgctggctccctctggtccccagatttgggccctgggtgtactgtgcatcccccatctccacggttacttttctgactgcaagtctctgtgctgatttggagtgtcagatataggcaggccagggacttaggacctttggaggttcttggacttagacaattctcagtgacgtgtgcaggaatgctgggcttgaataccatgcacgggtgagtggggttcatttggtgccgtaggtatcgagcatctgggaccgagatgaccatgtagctgccgacttgcacacttcagagcatatcgttgaactctgtggtgtcaccatttgcacagcagctgcggtattccggtgactcctgcccagcctggttcttgtgaatagcccctgttcctaccacacaagggtgtttttgaaaaagaccatgaggatggacgctggtcaggaaatctgagactagtctctggattttccctgcttggttttgggaagttgccatattttgtgatagcatttaacaatcacaggattttgttttgttttgttttgttttttttcctttttaatataacattgtgtcttagacttttttgaaatctacctctggatgaacaaacactagacattgtcttcttcacttaaaaagcaccaagaagtttaagctaaaagacattctgcttcttttggggggagggtagcaagaaaattatatatacttataattttttccagtaagggtacttaaaagcttctatttaaaattatggggtttaaaaactttaagttgtacttaaaatacttttttttttaaatatcttttaatagagagggcttactaaaagaacagggaattgttggcaggcagaatttgtcttgataagaggacagatagaggtagtacgacagatcagctagaaggctggccctttgagcctttggatgggaattcttcctctacctgaggctttagcacactgagccatgggcttgtaagccccgcgtctgtctttgttagtgccatttcttccccagatggatgtccatgctgaggaaatacactggggcttcttggaaccatactggcacctactgaccagtggatgtgccaggagcaaaagtgcttactgcgagaggagagcaggcatgcatcctccctcactgcgagaggagagcaggcatgcgtcctccctcactgtgagaggagagcaggcatgcgtccttgctcaagtttcctggacagtttccttttgaggagtttgtttttgcatttgttggttagttgcacatgattttgcttttgtccaacttcttcagtcagtctcccctccttgatacacatggctaaaggtgcacaggggttgggtcggagggaatatcatcatgcacacaaattttcctttattttaaagacttattttagttatatgtgcatgtgccacgtgcacatgagtgcaggtacacaccgaagtcagaagagggcactgtgtgggtgctaggaggagctgtgtggcctctcagccacttgccgtctccccagccccagctcatgcgtattttaagacagaagaaacattgaaaggtgttttagttttgccgagatcagaaatgtacaattctactttctcagacttttattcttgttaaaggctaagatgtgtctaactgtgttcctctgtttattttacttctcctgacaaacgtaaaatctgtgttagagtctcatttcagtgtctccatgctcagtaaaatggaaacctttgaacattttaatcacgggagctggtggttgagtctgacagtaggtttttgtcttagctgtttagtttgttgaatgtcagtgactatgcaccttccgtggttcatacacatggagatgagccatctctgttgtcaacaccactgcctttcaagaactttgctagacgtgagggtgagagtatgatacacctgcccaagccatagtggaagcacgtggaagcaaatgattcggaatgcaagtaggaattagcaagctagagaggggtcgcatcgttcagtgccgtctagagggacagcatgcagtggtgccattaatagactgacatgtcctggttcttctgtgggttttcaaaccatatgttgtatatagtgtaatctttaacatgcaagggctgaaacttacctagttgaactcatttgcttcagctcacaattggggtctagttgttttttctataatcccgataagagaaaagcagaggaggaggagaagaaggagggggaggaggaggaaggggaagaagaagaaggaggagaaggagaaggagaaggagaagaaggagaccaccatcaccaccaccaccaccaccattgtatagtaaactctggtgttacatagtacattgatgagttcaggttttagaatcaaggattaatatttcatagaaatgaatttctgtataaaatgaaaatcctagatgctgggcatggtgactcacctgagaggcaggcaagagctttgccaggagttcaagggcagcctggatcacacagtcagtttccggccagtctgggccggagtgaaaccctgttgcttctgtttttcccaaaccacagcaggtttcatttttgggaaagcagctgggacggggagccctctagatgtcctgtctgcatcaggaatcggcatattttaggtcagaaatattttctactggtgatctctgaagaacgcagagatccttgacatattaggggaggcataaaaatccgtgtctccctggttgcttttctcctttcttttaaccaagactgatttcaggagggagacaactactcccacgttgcttctgtttaaatgtgagcttctgtgcttctgtttgtttgtatttttttttcatggctgacacgccctcccccctcggcggctgccccccaaaaatggaataaaaaacaaagtggaagctttgttgtttgaaattgaagggtgctgtgagaatcactgcaaatccctgctgtctccgcctgccctcagttctcctattttgggtagtagtgcaagcagtcattttagaaaacatggccgtgtccactggacggcactccttccagaggccctgtgccagaagcaacagagggacacacagccaagtcccagccagcaacccagacttcagctctcaaattctgctacttgaaatttgcataaacgttgaagggagaaaagaagcgccctgtgtctgtcactcttctactttaggctctgcagccattcagagcattaaacctcgtctgagggtgcagcggatgagcgcgctgcaggcagaaggagcagggtatgaaaagagtcatgtgagtcagacaacagacagaggcttatttgaagaggctacaaagcaacaagtattgccaatttaaaacattgcttgtcagagcaaggagtgaaacacattgtaggctgctcagattacaccgtctggggtaccagacttaattactcatgtttgagattcttaaaacaaagggaggcttttaagcctgtgatacatagctggcacggcccaaaaagctccggaaagcctagaaaattgtgatggggactccatcaagcctggataccttcagtctgtcttttcgaagataaattcctggtgcgttggacctggtaaagatcactgactgatatgtaccttgttgtctgcagtgtttgtatacagtggaggctaataaatgtgaatatgaagcctcgtctggactgaatggcttcaagggtctgtgctgttttcgtagttctttgtagagaggttttgacagtgagttttaagagggtatactgaaggcatccaataaaagccatttttgctgtgtttgtatttttctggagtcatttggctaggtccctttctctctgttccatctgtcccttccctgtaggctgagaggatggtgtatccagagactggttcattcatggttggttggtctctgtgtattgctggttgagcgccatgctcgtgtatggagtggccctttgctcaagtatagtactggctgtacatttagtgaatcatttcttttttattgcccctttaggaggatagcagtaagctctgcgtggcttgtgtgttttattagagggctggtgatggcatctgggaggaattaatcccatttattgatatcatactctatattaaattgtgtcattttcctttgaagttgatgtgcttaaacagggcagtttgttcccctcccacttgaaggagcagctgtgacctgaccaggcctttggtgacttatcccatcctagcctccatggcctttttcttgtgactattgtttaatttgcgatctcaatccccaaatgtatgttagttttctgtgcctgggttcctgctcaagtgggcttttcttatctctacctgagaacttttttcgttgcttggttttgtttttttttctagaacataccactgtctaaagaggctttatttacattttgtttgttgttgcctgttttcccctaagagaagcagagtttgtgagagtttgctgactacagtgtccctgacatcagggccctgcatctgcatgctttgtagatgtgctgtgttctgaatgggtttcagctgagggtggtggcacccacctttgatgtctgcactgaggaggccgagctagatggtgctctgtgaattttgaagctagcctgctctacatagtgagttccaggataaccagagctacagtgagaccctatctcaaaactccgaaaaaagaaaaattctagaagctttcttctacgttttgtgtcacactgccaagtgaccgggcaatgagacacaagtccactttcttgtgtttgcttttccttttattgtggggtacatgtccagaaatacagaccgtggtctgaaagattgatcttcctctgctactgtgtgcagcctgagaagaaaagttgggctggtgtctcagactccatccactcttggatttgattggggctggagagccagtccaggtactgatttaacaggcgcctctgatgcatattgaagtttgaaaactgtgactggggaaatgttaaaggttcaaggtagtagaatcccagaaaccagccaagtggcattaattattagcctggggtgcccacctttttttttttttttttttttggtcactgacttggattggttctctaaagcaaggctgtaaagttatttgctaggtagataggcacatattgactctaggttgtgtgtattctatgaatctgtcactgtgattatttgccaggacacctagtaggaacaggctgtgatttttttttttttcctctccctgcccacagctgagtcatgggtggctggggtccttctgctctcctggataaatttctctttgtattctgcctatttttatgtacttgttaaaacttggtgtatttcgtgtcgcacgcctttaatctcagcacttgggagctagaggcaagcagatttctgagttcaaggccagcctggtctacagagtgagttccaggacagccagggctttacagagaaaccctgtctcgccaaacaaaaaaaacaaaaaacaaacaaacaaacaaaaaaaaaccaaacaaaaacaaaaacaaaaacccaacccccccaaaacaaaacaaaaccaaaaaaccttggtatatttcttaacacattatccctgtgtgtggtgtaatgcttatgcatttgtgtgtggtacgtgcactgagtgtggaggtgagtgaccttgtgtgcacacgccaggttcagagggggagctgctgcctccctctgcttctctttccctcactgtcttgagacagggtgttaatctgagctgaagctggctttggggattagcctggccatgcagtgagctcttgggcgctgcccccatccccctcttcaggttgagatcccaggcgtgcacagccatgtctgactctttgcgtgggtgcctgggggggtagtgggggggttgatctcatctcttcactcttgcacagctagcgctctccagctgagcctctgcagcctcttttatggagtgccactccctgctggattacaggggactctgggggcggtcaacctagattagttcacaggtagggaatggagcccagtgaggctgtcttgcctgaggttaccagctaggtacaggaggcaggactcatgatggcttttgcctgttggaattcttgtaggggactgagctggaacgctctgtgctggtggtacagtcctttcctgagctgttttccttttttaaataagaggaagaggaaaaggcaaccagaagagagctaataaaagtgtctcaagaggatgaaaacatgagtttgagcgctgcagtatggaggaaataacctgacattactgttttaattatggtagttgcattggagcttatcagtgtgggaagagggagcgcttatgccttacagggaagtgggccgtggatgagaagatgtgcctggctgtgcctgttgagtgcacagcccagcgggtgcttctgtgatgccaacagctgtcgcagagataggccgggcttagcgagaggcctggctctcaggctcagtgctgccaccagataggatctgatacctcatgaggaagccacttaacctctctggccctcactttccagcacgtggtcataataacacccgcccagccatggtagtgggaagtagcctgtctctgtgcataaggacagtctctgggcctggtcaccccaggccagtgttgtatctggctctggctcactgtgatgatctcacaggctgcctgcctacgctgcttcttcagctatgacgtagggtgtgatgaaatgaaccatttcagggttgttgtcaaagctgaattagttcccgtgtgtacagtgcctgataaataaacacttctaagaggggtttgaatgtcttgaatgttagaataggttctatcttgccttcctagtagtccttaggagtcttgatgtatctttggtgatgaaaattccacttctaaaagctgaacatttggatgctgaaagcacctgagctgggtagacatcctcctttcctggctgaaatcagtgcaagttttggggtatggccattcccctacccacgctgagtcggctgctttggggagcctttcctgctaaagtcttccttgtcgcgcaaggggcttctgtgtgtccgtaaatacgaagttagtttctactttgtttacttagtcccttctcccaccgtctccattgaccaccttctccttgcttttttgtgagtccttgaaatgagaggttattgtagtcccttctccacagatgtggtttctccttttttctgggtcctgttagtggatgttgatgcttttggctgcttactaaagtggcccattttattaaatcgtaacctgaagccaagcagctcctcctatagtcaaccgctgtccactcagatcttaagtagtcagtggtggactcttgtgtgctttgctgaagtgtctaaatcctgaaaggcccacagcctgttatggttggtacggctttaacgatctcattgtcactaggacatgtgtctgccagacacatggaggcacagagaacgaagggcatacaagaccatgagaggagactgtgaggtgaactgtgttcctgtgacttgggagccaaacactggctagtcagtgaagtctcaagggacgtgcaggggtgctaagaaaggctttctctttggatcccactttgccgtcaaagggctgtgactggtgcctgatttctgattccactttgtcttttatttcagctttgcagtgtcgaggtggtcaagagccctgtgtaaatgaagggacctgtgttacctaccacaacggcacaggcttctgccggtaagttcttctgtaatcatctctctgacagtaggccctgggcaaggtgtgcttgggctttttaaaatttcaatgcttctgtgaagtgttgctggctcttagatcttctgatgtagtttttgtgggtggtgaggatggaagggcgggctggttgttagtgaaatggttgaggagagtaagtcactatcctgccattatctttatcattgtgaaagggttttagtgagtggctagtaatatctattgagtatttcttttatttttcagtgtaagagatagccttttttttctccctcaaataccagatatgatcatgtttttaagtcataccaagtagatacactctaaatgaatgtcaagtagtcattggaaaactttaatccccctgtttaaaaagtccagttctgaatgcgagactatggagcaagatgtatatgagcttgtaggatggaggaggggccggtctatgggtggagcacatgggtgggaggggatcggacctggaaactttcagtacctcttgattcaagaacacttcctttctgtttttccaatggtctaatctagcctaatttttttgtttgagacaagctgtgagataatttcatacacagctttttccccacttcttctatgtattattttcttattttaaagacagggtcccactatctagccttggctgcttagaactccctttgtagacaaggttggccttgaactcacagagatatgcctgcttctgctcagagtccttggattaaaggcttgcatcaccaaaccaagctacctttcttactgatgtcatatgttttttacctcagaagttttagtgctaaggcagctccattctctttacaccagggaaataagatgtggataggaaattgctggtcctttttcttttgaccttgtgacaactacccctagattctgaccttacgatctgcattctttaatgtcataagattttcagaaagatggtcagaaacagttttcttcaacaaagtgaaaatattttaaactgtgatgacagtcaaatttaacattggtttgtttgggttggaattaagatagcatcagaaatggaagattatataactgattgtggctactcacttgagtcttagccaggaaaactacccgacgtggtacactctcctccacttggaagatactaagggagggagttcaatacctcaacagtttgtctctcgcagcatctgctgtgtggttggttactctgttctaactggctcaatgtgattacctgctgagcctcttcttagtaccggactctgggcatttttgcatagctaatacctagcatggtgcctgctatgtagagactgtagagcaaagtgtcttgtgccttcttcaacagcagcaggtctcagccttcctagtactgccaccctctaatatagttcctcatgtgtggtgacccccctcccaccataaaatcatttcatagctgtaattttgctactgttatgaatcataatgtaaatatctatgttttccaatggccttaggcgatccctatgaaagggtcgttcaaccccaaaggggtcacaacccacaggttgagaactgctgttctaggatgctgtcaacagacacctatttacctcaagtggggcactgaaaatggaaccaagaattgatgccacttaagtctagctagtccactggggttccttattggagcacaggccactaaaaggccagctgccacactgaaaagcccaccagcatgtgacaaaatctagagagccttaactcacacaactcgcaggacgtgagcctgctccccccaccagctgatggttgtttttgtaaccctggagcagggctttgcagatcctctgggtcccaagcttcttatgccttgtgagtttcattagctgcatcttaccagcccctcctacctttgcagaataaatgtttcaattgggaggaaacagccacacaggatccttgagtaaaaaggtccatacacacagatttcagcacatgtaatcatttccatgtctcttatctgtttatctttcaagattgattttcccctgggaattttacttgctttgtgtggcattggcctggtggagaggcaagctggttgggtataattggacttaatgagttatgcagggggagtttcacatacatgctgatctgcgcatggtctgatgtgagaggggaggcatcagggagaacagtgtctgagtactggagaggacacagaagttcacctttaaaaaaaaaagatttatttattgtttattctatatgtaagtacactgtagctgtcttcagacacaccgggagagggagtcagatgtcattaaggatggttgtgagccaccatgtggttgctgggatttgaactcagaaccttcggaagagcagtcagtgctcttaaccgctgagccgtctctccagcccagaagttcacttttagagaaaggcagttgctagcctcagacttgaccagggaggcatggttgtaccgacttcaggaagaagccccgcatagtgacgtgcatgctagaagtggtgtcagcctgggactctctgtggtgagtactgtttgtcccagtacttgacagaaggcatattaagggtgatctgtgtgggttcaagatcagcctgatttacatagtgagtttcaggccagccagggtcacacagcaaagaaagtaggtttggaaaaggaggcctaagtgcgaaagttggcagagccatccttttgggagaccagcaagaagcctgggcagagtgctctcctctcccatgtgtccaccgtgtcctcaggagaggtcgtgggcgtgactgaccacgggagagtggcagtgcagcctaggctgagcacattgctctctggctcctcagcatcatcttaagtaacaatggtgtgtactcacggcacttgtcagcatccttcaccacccccgacccgagggataaggtatgcgagtttgttcagtaaatattttcacaacatagtaagtaagtattccaacacttagaggattatgaaaattacatcagatgtgcagggcatgtgattgtctttttattttttttccctgaggttgcttagtggattaaggaaacagagttgaagccaagttccttctgtagggggtagggtgggaattgggagaaaactgttttagagtggaaggtatcccagaacctgctaaggtggccttatcctgctgattcagccaaaacctaatgattgtttatagaaattatagaaaccctcgataagatcacattgacagatgcggataagtactttcaaagataggttttgtgcacagctcaactgtgtggttattccccccccccccccttcacactgtgatgagctcaaggaccctgtcagactgtgatgccaggcaaggggaacctgtgcaatcttgcatgaaactcaattactgctgctaaatagtcgctgtcagctcttaataaagtcctctcagtacttaaagttaagacattttattctctccctgtcctactgggaggtgtaaatatataattacgtttggatgtaattaatcactttcgagttgtttgttccaagctttcaagtataaaccacgcaaatcccattttgattaaaaatcacgggcagtgcatgtttgctagcctggcgggtgtaggtgaggtcatgagttacccagtcgggacgttcactctaaggacgtatttatcctgttacatacggtctgcccgctgctccttgtcttcactttgggctcacgtttgctttccttcactctttgaaatgactgcctggacactggatgatgcattcggagtgtttatcccagcagagcttcgtgggagtgggtctgttccatccctgacggatcactttgatcccactgaggctatgttacatggctttgcttctgtttcacccttactgctgggagatggcccacatggccaaatgtgacccttcagaggactgctgtggagcgtggggggggggggggggttgaccgagcctgggatgttcttaacaggccctctgttctggccgacttgagttctaaggaggaactaactgcctgcgcagtctttacagccatccaactctttctcttgggtcctgtgttctcctcttctgcacagtcagaagccattgaaggggaagtattttcagagttgtgttcagacgttgcgctcctcctcccaggtcttttctaaggttttgcctttcaaattctgtttacctccatggctcctggtgcccccgccctgccctgtctctgttagagagatgtccatggccacttgctgtctctgttagagagatgtccatggccacttgctttttttctgtagcgctgcaggaccttcatgtagagcagcttgcagagggaaagcagctaactgtgggattctcacagtttgcgtctgtcctgtgtcccttgtagttttctctagtgcctttaatatttcatcctgagttgataattgttatgaacaagagagttgttctgatgtgattgttgctgttcgtgagggtgcagattggggtcgtgaagggtccttcaccctcgcctgccgggttgaggtgcctagcacagtactgggaaagggaggaaaggatacatgcaaagccacacaattgcagagtccctgaggatgggggcttactcctgggaaactccagtttgtatctaagaattacatttttaagtgcatgatgatggatgcaaaatgttataaaatataagctgtgtcacattttatccaaaccttgttgctagctgcagtaaacattagcaactaagtattttctttgccaggattaggagtgatgttggtggtccaggcatctgaaatccatccaagaaagctgggcgggttgccttcattgtcctcctaacacgttaggtatcacagcagagagcagaggagctagactcccccagaactcagctctggatggaggccctagcctagtgcttgtgccgcggtggtggtctcagaagggtgtgtgccactgtggccagctcagccttagtcccttttgtcaccttctcctgagcgcatgcgttgctgtgagggttgctgaggatcagggccatggagtggactgtccactgccaattgctcgcttgcttccctgccaagctggtcctgccagcctggtcccttcatgttgggtgcccaggttaccagaacatcgtgcgtgcttacgctctctggaaggtgatagcagagttagccatacctctgagtgccttcatcttcctttttcttagcgtcttgcagatcttaagtgaagagtggtagctttgcctttcacagggtaatgtttcttttcttcttctgagagtggtgcctaagaatgattaactcccagagttacttattgtgcagacagcgatggctccgtggttaaaagcacctgctgctcttgcagaggatccaggtttggtttcaagcacccacatggtggctcacaaccatctgtatgtaactccagtctagggcacctgaagtcaccttgggcctctgaggccaccaggcttgcaggtggtacacagatacgtagacgcaaaacacccctacacataacgtaaaaaataaacacatcttgaaaaacctaagagtgacttactgcagtctgtgtgtaccacaggcagcaccccatgcaccgctcaagtccgtggtagcagttgcaattaattgatgttgttctattatttcattcttcttcgggagtcaccagcctttcccagtccactggatgacttacagcagtcccgagaagccctgcagggctcttgtgaggacgggcgagaaataaagttaggcaggaaacaactgaatctcgtatggtctgttcagagcgagctggggctacggtgagtggggagagccacagcctcaggtgtggaagtcagggcactgcctgaaaactcactcatcagtcggggataccttggttcaaaaatatcaaagttaatgcaaaaaatggtgaaaaatcctaacattctaaataaggagattagcaatacccattactgccttagccccaggctccagtgtggctcagcctagtgcttgtgagtggattaagtcttggaagagtcctgtctggtaacatgcagagaacatagatttctatgccagatagactgagtctgagtctacttcctgctagcaatcagatctttggcagtgtaacggctcagtgctagctgattgttctggaccaactctgacatcagttcagctgtttatatgaaatgcatgctaaattcttgttttatcagtcagtatatggatgctcagagagtttagataatttgcccaagatcttaaaactttctattttaactgattcaagaggaattcttgaaaaatgtgctgtctttgtctcagtttacctatcaataaaatggaaccaaattgtgtattaaactgaaagctcaaacaagactgccccaaaaagaaactgtgacacttgaaaacatataattactagaatacgattaaatctctgcttttattagctaaaagttatgtatatatttacttacttttatgtgtgggcacgcatgtgctgtggcatgcacactgagatgagagcacagtttgcagatgccagttctctcccatcatgtgggtcccagggcctcagcgcaggctgtcaggcttggccgcaagcacctttatctgatgtgcctatcttctggccttttagtgcttgctttgaaagtagaagtagtggttttaggtaggcctcagcatctcacttaaccatttattactggcttttagctagcttaggttacatgggtgagcctgtactagtgcctgttgccattatgtagatgaaatataaagagaaaggcagtggaatgtggggtggaaaatattgtttgtgactgagcttttcagtagagaaagcaaatgaacaaaaccttgaacctccccatttcctgactggggactggcaggtccagaaccgttttacacagccatgaatgacactgagatggacgaagccccgtgactgcttggatgttgctgccaacacagaactacttgttaaacatggcacttggtgcttgcacatgaattacctatgtacgttggtatttccatcaaggctgtaccttgtctaactgccattccaaagggagttttattcacatggtcctttcagagtcctttaagctgtgagtctgtctgaagagtcttccattacggtcttgatcaccagtttcttatcagcgcatggtaagagagtccccgtgcgctatctaagtcccctttatgcttttggctgaatcagtcagtaaccattgtttgatagggaagtagagtgccatccgtaggctctgcctgaattctgctgcctgtcttgggtagctgccaataaattaaatcaattaattttggctcacaaagctggcattaatagattggaatttagctcagcttctttgaacacggcctccaggttaaccataatcctgggtgaagttgcttattgttcaatcgtagcttgtcagcgccatcacttcatgtaggagcccccctgactccccacttctcttccctggggagaagaatgagaaatatttctcttctggagaagcttaattaaattcttcattttagttttgcctatatttgcccttagtcacaactgaatggaaatatagttattcagagatttccaagcttattttgataaaatagcataaatatgtgggcatgatggaccctttcctcagtgctcaggggttggaattcccaggaaagaaggagtgtctcgtctcccccttgttgcatgcacacatatgcaggaatgagcgtgcacgcgtgtgcacatgtattaggaaactgtgttgtttccaggtttttgtataatttgagttctattttatatctcacgaaatgtaaggcaaattaatattcctcttcaatttcactatactttctagatcatatcgactgttagtgacctccctgaagacgcaggcagccatctgggtctaaggtccttggataggaacatccggcttccccttctgatgccgcagcttctgtttaatatctccttccagaaatagtccacatggtctttatgagaagggctttaggaaagaggagcgaaggcaagggcagtggtgatagctggcattgctcaatgactacagaatcacaccctcccacccgcttcccctcctgtaggaagagaaagttcatgagaacattgcctgccttggagtctccgtggtagcagaagcctctaattccacctcctgttccaccgaggcgcttcctctgcttgactcttcgtacttctcgggatctgtcacccaaggcagctacagactgttttattcaaataggaacaccccatgttccccttaggatggcaaggactcggaggactgcagccacacatgccagaggcttctcaggcctttctgtgctgggtcgtgtgaatagacccaaaagccccaaatatgtctccatcttggctgctttttctgtctaaattctagttcatgtaatgtttcactgaaccagtgtgtggaccagtcaggtttcaagcgacagttaagtggtttggacaaacatcccttgagcacatgttagcaatgagcgtgtggaggtggagtggccagcgtgagaggctggggaaagggcccaggcacaggaagagagggcagctggcagcaattaccttccttccctggactttctgactcattgtgttgctagacagagtagccaggtagcttgtggctggaaactcggagttcaagaatctcagaagccaagaaaaagtttgggtagagggagtgaaacaagagcagagacagtgcctgggcgctatgcgcgggctccctctgttagccaagaggctaggtatctcacagtcatgtcttctgcccagcatctcactggccaggttcaattcatcttaggaattcggagtgagtgggtatctgttagccaagtcttgggttaccccaaattagctcatgtcctttactgcttgtttcctctaattatatagtacatatccaaacccccaattatccagaatagaccaggctgcctgctccgcgtggaaaacatttgacagtggttatgattttcttgcctagaccttggcagtgccttcgtccctcaacctcctggccctttaagattgtgaaaccctggtgcttgtgtaagtcaggcacatctccttgaggaatttcttcactgggcagcttgcccctttgaaaccttagtcattctgagcagtacccaaagaaccttctcgactctaatttttctgccacggccctatttgtatataatatttgtggtgtctgactcttggtctcttattgccgaaacttatggttgtgaatgtctaggtcactccttaaaaccggacagcccttgattactaaagaaaggtgactcatttccttccaggcaaagactggcactgactgtcagagtcctaagtttgtatctacacacagttcagtgatgcgcttcacatagcccttctaagttgttattggtggtggtttgttttagagacaagatctctctccttaaccttctctctccttaaccttgcctggaacttactatgtagagtaagcaggctttgaactcaaagagatccatctgtttctgcctctgctgggattaaaggcttgtaccaccacacctggctcctccggttttattggaggtaatgacaacatcactgtgacctggggagggagcaggagaggccctcatgctgagttgaagggatgtctgaaaatgagttctggagaaaggccttccccagatttacctaagggttgattccctgtgaggggttcttcccagaccactgtctctcgcacacatgtcagccattaaaatgtctcctgtaacttacctgtaaggcttgagatgtctgctgccgtgtcattctgtgctgaagaaagcaggctgccacgctggcatgggggtttggggaagatgctaaggcctggaaggggacagaggtccctggtctctggatttcctcctggtgccctgatggtttgttagttctgttttgctcggtcttggcctccttgcttcctgtgagggcttagctcaaggtgacaccttagcaacagttcatctacataagcatccacaggccctttggagggactgctagactccatgaggggtgtgattcttgcccaaggagtgggacttggagttcttacatcctggggttgaagggtgctgaaggagttaagtgtcactattgaagtcacctcatttaggaggagggtaaagacaccttagagtccttcctactcattgtgatgtatatatgacaagctgacacagaatacaaccgagtgagttcctctgtgttcctctgtgtatccgactgactggaatatagacaggattcagttagttctcttgacctcattaggaagaaagctggacatcttatcttatttttttctttatggtagcaaccctttaagagctggtgtgggtagacatatgtgttatcatggaagcagaccttaaaaacaaaagatttgggtttttgtgaagcagtttgaaagaataggcattttcattttttaaaagtccagtgaatccaagcaatggggagatcacagctctcggtgaggcgtgtgtccctgtgactccagggctctgaacagaactgagggcacctgtacaatttcagagcaactgttggagattgtttggtccagcatcttacttttagaaaatgcttggggctcttggaaggccagaagagcgcatcagagtccctgaaggcagagttacagagggttgtgagctgccaggtgagttccaggaactgaattctggtcctctgcttgaacagcaagtgctcataaccaccgagccctctgcccagaaccaagcatcttctttttaacacaagggagactgaggatcagagaggtaaagtgatttgttcaaggtaacatgtccagcagcagagccaaggctaggctgaggaaagggctgtgggtcagcaactttaccagagagatctggggccatcctggagcccttggccaaacattgtaaaaactttaatattcatttagatagacaaaaggtcacaaccgttggacacacatggctatgtacgtttgcacacatgttttatatgtgacagacttggattgtgagtgtttacccacacgtgtatacacttgtgaatgcacccatgccctcagagtctcccatagaaccgtcctgaaggctgctgggcagtgctgaggagagtgtgggtccatctgtagtggctttgcccacatctctagtcagtgaagcacctttccagaaatgatgtagaatgtctgtggcatggaccatgatagttcctgctgtagactgtctttgcttacacttgtgaccttggccttgggctccatctggaagcacagatcagcctgggccggtcagctctggctttgctgtgcttgctgctactgccccacaagtgtctctgcacttccctttgccttcgctttgggcacagtggagtggtaagttcagcgtgtctgttggatgtttagtttctgtagtatgaaaggccacagaccactataaagtctcagataagttttactcccaagaattgatcttcctccctccccctgataggcaatgactctgtttttaagaggagtagttaggaaccataattattttgcagatgtctactgttttaggtatttatttatttatttatttaggtgttggcaaccaatctggagtcttgctgttgtcaaatgctctacctctgagctatgctcccagtctttgtttttctctatacagatggtgtggcattgggctgtctttctgaaattaagcatacttcataataactgcttctcaagtggcctggtttctataaccctgttttgttttttgtttttgtttttgtttttgttttttttttgtttgtttgttttgtttttctccttctctttcttttgctctggtcttgggagttaaacctagggactcacacaggggactcgagggttctaccagctgagcattattatctcttgcagaaatggccttatttgcagtgaacaagagttcacctaaactgtaagccttttgcctttatgatgtcagtggtgtcctgccctcgagcaagtgtcagcaaacttccttaaaaatgctagatatcacatcttttaggccaagagtcaagctgacagttctgtgtcactttatgcccatttaaaatgccaccagtgacagttcctgagctgatgatccaaacatagatggtggagtgtgccagcccaccttagggctcaggagccattggaaagcttcctgtttccccagaagtgccagatgccagaaagccactgtttctgctgtttgttcttgatttaatgtgcaatgatgttcttgaagcagaggagctgagatcacaacagtgaactacccttgatccctctgctgcccgcttttggtcgatgccatctctggctgaggtgatgtgtgctagttacagccagggtttctactaaattaacgaggaacatcattcaaagaagtgaacaccactcatttttctttggcaattaattgttctcattaccatcaaagtaataaatgttagttggtgtaaatgccataaaagttatcttttgtgtggacaagttttggggttgggtgttgtgacagtggtggtttaatagtcatgtttgctcttaagagcatcttgagaggcttgcaggtaaatctggcagagctggtgctgcctggtgtctgcttctgggcacagcaatgcagtgtgagcctcttacatgggcactgcaatcaatttctgttgtatgtgacagtcagagggtttatgtgcagcagatatgcactctgaaagctgagtaacacacacacacacacacacacacacacacacacacacacacatatatattaggaaaatgtgatttaaagaaatctattccatatggggtagggcagctttgaatagccttgggtttatgaaggttaagaggtaggtgctttgtgtatcaagaatcttaattagcttaaagatcctttaggtaaacagctcaacccagtggttcccaaacttccagtgtaattgaagtctggagcctttaagttgtaaagattatgtggacccttgcatcttgccctttggcatccgttaagaatttgaacagctgaatggcttccatatgctagtcactgtgtttggcacatagggtatagtagagaataactcttgtctattagagaagataaataattgtagtaaaggttaatgcactgtgtcagatttatgggaacataaagtggggatgtcccttccaaaccttctctttccctttctctcctccctcttcccctttcttctccttcctgtatcttcccctcctctccttcttttgggggtggggacagggtcttattgcctgagcctctcgagtgtgcttacaggcagcatgaggctgccagcaggaaataacgtttaggcagaggcttggaggaattttagggcatggttgtgacagagggtggagagagtgggggctttgtgactgacgtgtgcacaggtctggcaggaggcgtgttggattgtagcatgttctttgagctggaggaagctgagcacagagaacgtacagtgcatgaagaaaagctacattgaaaccgttgtttcaacacaatgcaccaggtcaaagtctacaaggaattcaggcatcttcccagggcttgggaatgatgcacagtgcaggagcaaggtctgcctccatcagcagtaatatggaagtcacccagatagaccgttaggttaatcgtaacagcatcttatatacattcaaatgtggaccagatagaacttagtggtgtaaggagtgcttgtcaggattacagcccctggcatgctgctgcaacacaacacttagagcacgcatctccttctctcagacagtttgtctgttatggtgaagggtgtgataagagccgctctgtgatgttttagtcacattctaatatttttcagggttcagggcacatggtaaaggactgattatttcttctgctacatcaaggacacaagcctcagcactgtctgtgtgtcccggttccatcattcaaggctgctgaagagcctgggcactccgcttgttctcagagctctgatgaatgcgctgagactctctgctggaagataagggcgctcacgacattccattgtaaataaagcatgtgttcccatctcctcactccttataccagcctcctacagagggtcgagttgctgtgaatgagtgggtctgaggtcgtgcctcttcagcctcttcagtctggatgtgttagcatcagtgtgcttgttgctttattcagatgagggggtggaaaaacctgagcacctgtgaaccaagcgaggtggggctccagaagacgagccctggcctcccggctcccatgtcggttttttcctgtgggaaacttttaatttggaagcattcagctaatgtgggaatcaagattaacattttctgaaatacttgtacaagaaaggcagaaacgtgctgtccaggaagcagatttacatagtagaaaaaaatgcctgccttgcagggtttggtagtctttgtgtgtcagatgtgagtgtgtgtgtgtgtgtgtgtgagagagagagagagagagagagagagagaatgtgtgtgtgagagagagtgtgtgtctctctgtgtgtgtgtgtgtgtgtgtgtgtgtgtgtgtgagagagagagagagaaagagagagagagagagtgtgtgtgtgtctgtgtgtagggttgattatatacaggtctttgtttcctttacatcaaaccaagaaggccctagaaagcatgttttaccacaaacagcctgtttggggctccactctgcacaccagcgcttccccttcttactaaggaaggtgtactgtttctttctctggttttctttatttccctttcatttctggaagtagcagtggggaatgagtgggagtgggaacatgggaagatgcatgtgatatgatatgcagcttccattttctctaattactaggatgttaactaagtctgtgcttaaaacaaaacaaaacaaacaaaaaacaaaccacagcaacaacaaaacagtcagcagtgagcacaacccatttagtttcttttgcatagagtcacagagttaagaggctgaaggtctagtgagatgtggggctgaagttcttgaaatgagggccatgtcaggttgcccagtggcctgggctattgagtacagcaggggcattttaggctggagtctgaatgctttggggcatctagatgttttcagcctggctttgggaaagttaaaagggaactttcactggttacgctagcttcgcctgttagcaattaattttatctactttaacaggggaacaggaacagggtaggggtgggtggcggtggcaggaaacctggctggcatcatggtcacaggaaagaacagactgatttggggcccttcaaactgtagacctttgttactgaccagtgtttaatttggtttgtgggttctgttagctcccaccccattcaccttaatggctgtctccgtcctgggctcagcagaggctggctgctgctgtagagtggagggctgagaggcccagggcaagaagaaagtgggctgaaagctgcgttctgtttaaagaattttctgctggaaaccagcccagagggagtcaagaggagctttaatgaggagcagctgcgctgcgatcagcccacaggagacattttccctccatcccacattctgcacaggttttgaaaactcaggattttgaaattgctgttgtgtgaagaatgcccctccctcttgcgtgtggtggggcttttctttgttgttgtttttaatgaccagatcctcaccaaaagtaaaaataaaactcctaaaaacaaaaccaaaagggttgcagtagagcctgggcacaatttgggctcaccctgctgctgaacatttggtggggaaagtgggggagcaagccctggggtttagttggaagagacgttgtttccttctcagacttcacccgtgttggagctgacagagcctctcactgctcttggcgtttctctcgatgggtggctattcacgtgggaaagttttctgccctgtattactggggagacagctattgcagatagactataggtgggaactgccattcacgtccctgcctcatgtcaagaatgcaggcctgtgagaggcaggggctgtttcagcgaggggggctgtactggaatcctttcggatggaatcttttctactgcgtttctctctttcctgccttcaccctgttccaccatgtgcatgtgaaatgaacagtaggttcttttgtgtcatcaacagtagacttttaagaactaggtaatggatgtagccgtggggaccaggcagcaagcacctgcctgtgtctgtggccttgcctgctgtgctcatctctaaggacagaataagacccgtggctgcctggttctgctgtcttttacttagcataatatttccagtgttgtaggatgtgacaggagtctatctcttttcacagacaaataatattttattgtgtggatataatggcttttatttctctactcatcagatggtgggcattcgggctatttctaccttcagctattatgagtcatgctggcatggacatatggacgaactttttttttttttaatgaagagtgctagtatgaacatatacttttagttactgtggtgtgtgtgtgggggggtggggggggcagaattttagagaaagatgtatcttataatggaaagaccaaagaatgttaaagcagcaagccagtagttttacttaaaaagtacatttgctacatagtgttctcagtgctgtgatgatgtgaagaccccaggagggcaggcactcatactgagtctgtgtcaaagagagggggccagtgctgtgctcccgaatccatggtgagccagctctgcagtccaggcggctggttctggggcacaggctcagcagcaccaagtgaccacttagtaatggaagtgtagtcaacatagtaaaggcctgccacgggcgtgtgttggtgcaagcagggcctggtgattgcctcttcggaatattttagaaatgcttatggcattcgatagaaatcaccttaaggtgccttaaggttctgctattcagggatgcgtggaggtgggaaaagagccagtaacaagatgtctggcctgaggctttaaagatgatctgaattgctatcaagagggaaactgtgaacatgagtgataagcgttacaggaattcggttaacaagacttgtcagacacagcaattatatataacttcaagggattaaataaaagtcgaattatgacccctagaaaattggaagagctgaagtttcatggaaaaatgatgttttcctaatgtttgtctttaagtcattggcaggacatagtatgataggtgaatggtttagaaagctaaactggtgccctagagtggtgtcctttggcatcttttgtgtttaaatcattgtaaaatgacaaacattaaatgtatagtagagagaagagcagtgtggcccagagttgaattgaaaatgaccatgatggaagaggaaagaggtagactaactttgccaggtcttgtgagagacatggtcacattccagatggtgcgggaagtgacccgcacagcttccagtgggaatggggactcacttatagtgagcagagaagtgtcagctaagcctgaccaagtcggaactctcagaaggtgatcatggagcctgctgggctgcaggctgtgttctgagaactgcggacggtgtggatggagagaaagaggactgtctgcccagcgtccgagaagcctgtttgtgcacaggatgcctccatagaaggaaagggcagagggacttagttgaaaaggtaagttagaagagacctgcatatattttaagctaaacacaaagacacagaggaatggtaaactcaggacattttaattaggaaattggatcttcaccaataagaaagtctagtttcatataaagcgaggtggttctgcccatgggctttagaggcctcttttttttgtttgtttccattttatttgatgtttccaaacgtaaaaaagaaagtcaagattcttacaattcttacaacagttcgaatacaaccctctcagatgagaccatgcaaagcaattcttgtacacatacccttttctctccttcacctttgctgcttcatacggtgtgactgacaactggatggcttgtccttggtgggaaaatgccatttctttacaccaccacccaacaatttctacttttctgcaagtcaatttttaacaagttactttgctgttttcttttaaacattaggaggcacatggaactgctgtgtgtcatcccaaggattctggagaaccctgaccctgcacctcgactaagggcttcatgtccttgccagcttgcagcttccctccgtcgttactccttatgcccttaggtgtggcagtacagggtcccttgccgctccttggctaagctagggttgcttccatccttaggaccttggtgcttggtgctctgtgtccctttgcctcacacactttcccctcagtcagcagcctcgggtaaaaggtacattaggcagaaggaaagctaaatcaggaagtggtgtggggctggagcaatgtctcagtagctgagagcacaggctgcatttgtcatggacctgggctattccctagcacccacagagtggctcataactactgtaaccccagttccaggaactcatcaccacactctggggaaccctgaccctgcaccacgactaaggcctcattgcctttgtctctgctagactttacatctatgagcacagaggtttttccagcacagttgttcctcaaatcagctgggcattggctccaggaatcccacagtctttggataaagttacacagtcttttttttttttttttagaattatttctttattttatgtatataagttcgttgtacctaccttcaggtgcaccagaagagggcatctggtcccattacagatggttgtgagtcaccatgtggttgctggcaattgaactcaggacctctggaagaacagtcagtgttcctaattgctgagccatttcttcagcccgacatagtttttttttattcaacctgtgcataaactcccacattaaaccatctgcatattacttttaatgcttaatataatgttagcactgtgtaaatagctgccatgatatatatttggggaatggcaaagcaactgaacatggctagtgcagatgccatcttgcccatttttgacctatggttggtcgagtccttggatgcggaacctatgtgtatccatgactactaggaaaaaaaaataaaaaacaaaaaacgcctggcacacagtcagtatttgctaagcgtttgctctaacagttaatgaatgggtttaatattttttgtactaaactagtattcttcatcatcattaatgtcatgattaataagcatattggatgctattaataggctccatgtcttctctactgaggaattggcaaacttctgcaaagttccagggactaaatatttttgtgggccatgtggtctcgctgtaaatactctactctgttgttgtggcagccatggccatctgcaaatgagcaagcctggcagatctccaacgtgactatttatggatgcggaaatgggaatttatatattttccaagtaccacaaaatatgattttttaaaagtttttcaagcatctacaaatgtaaagaccactcatggtttataggccatacagaaacagacccctaaacaccagacccctaaggactccttgcttcttctccactgtggccagcttcttaaacaccatctacttagtggaagcttatcttctgtacttggtagggaatggctatttggattaaaccctagaaattcatctcggaggtcccagaactttcctgctgatcgtttctgggttcctggggaccttgttctcattgtatgttcatgatgttgacatttaaatgactttgcattttctcagccgatgacacatggcagcgctgggggtggcgcaacagtcgaggagcagagctgggcagagcccacccgggtttacaggcacgccattcttcacacggtgcatggttcccaccctggaagatcaacaggcctgatgcccagaggcctgtagctgtgagtgggaggtgggatacagcttcttagcatcttccacaacacatttcttgaataagccgcaagtgcttttaataatcccttgcagggttaattttagccatgccacactggtgttctcagtgcctctatttaagaaaaagaaatccagcgaagcctcacagcctattgtcaaagcaagctgtgatttggataaggcaacatattttcctcagcacgcatgaagagaaaaatggtttttatttgctgagcattttaatgcttataatttttttttccacatacttgagtttgcctggttctcacacaatcccacagtgtaagtggcctttttaactatttaagatgtcagtgaggagaagcagttagcccaaagcctggactcttcttaaaattaagtaacttagttttcattctctgtctgtgcatatctgtgtgtgggtgtgtgcgtgtgagtgtgtctgtgcatatctgtgtgtgggtgtgtgcgtgtgagtgtgtgtctgtgcatatctgtgtgtgggtgtgtgagtgtgtgtctgtgcatatctgtgtgtgggtgtgtgcgtgtgagtgtgtctgtgcatatctgtgtgtgggtgtgtgcgtgtgagtgtgtgtctgtgcatatctgtgtgtgggtgtgtgcgtgtgagtgtgtgtctgcatatctgtgtgtgggtgtgtgcgtgtgagtgtgtgtctgtgcatatctgtgtgtgggtgtgtgcgtgtgagtgtgtgtctgcatatctgtgtgtgggtgtgtgcgtgtgagtgtgtgtctgtgcatatctgtgtgtgggtgtgtgcgtgtgagtgtgtgtctgtgcatatctgtgtgtgggtgtgtgcgtgtgagtgtgtgtctgtgcatatctgtgtgtgggtgtgtgcgtgtgagtgcagggcaggaagccagaggcatcagcttctcctggagctggagtcacaggctcgtgagttgtctgctgtgcggtgctggggaccaaacttggatcctttcaagaacagaatgctcttaactactgagccatctctcagccctgacgcctggactcttgacaagacctgtgcccttctgaagtgcactccctgtccacagccagtctgttggtttcatcactgtgaactctgctccttgcctatctggagagtgacttactgatgaagaagctcaagagtcctgtcctctctccccctcccccaccaccgtatagagttctgggaaggggcaggaggccttcgctgatgacctcacacaccgtccctgtttaccagctactttccccaccagtcgttatagctactgcgcaattcttctgagcatgttgtcttagttccccagtttcatgccttcctcatatttttcaaaaaccttctggctaatgaggtgtctttggtgtgcttggtaaaagcaggaaggaattcagtgcttccagtcatcagggaagacatgacaggagctgggtctgtgggtgaaggcttggtttaaagatgttttaggtaggagtggaacaggcttctatgtcattctcctgtcctccaaaaagtaaaattgacaagtagatcactcaggtatctggggttccagccaaacagcgcacattatagtgagaagcacagtctttaaatgtgttcttgttacgtagtcgttagtggtctcgattaaacaacttcacatccttcctgaggctgtttagagaacatttctgtaagtgattcctgtgtctatggggtgtctatgtgtcttacagacgagaggaacaacttctcaatgaactaattggaaaatgtgggagaaagttgttttgaagcaggttctcatacagttctggctgcccttgatttcagtgtgtggcctaggctggccttgaacctcccaaaccctggggttgcaggtgtgtgtcatcacgctcagctagagtgttgttcttgaattagttccctgctatacacagctgtttacgtgttacttgagattttctatgcattcttcattatacccagtttttcatttgcttagttatcaacatttatgatgtctctttgaacccctcctgaaccttcctttcctcctctgtgtcggtcttagctacctgaatgtaatccagcgaggcaagtgcagaacagagagagagagagagagagagagagagagagagagagagagagacctaccatgtcctagcactcagttgtgaaggagcccatgatggcagctatatgttaactgggaggtctggagggctcagtgtacttgttatcatgaaagcgtcatagtcctgtccactgcctcgccagcatgagaaagttacggccacaaaggaggcaggtcttcatagcactgtataaggagaccatctcagcctgtgctgatggacagatgtggtgggtatattttacctctgaggaagggtcgtgctgcctggctgtagttgaccctgctgggtcacccgtctggtattttgttacctgccaggactcacagggacttggagatatagtaaattctctgagtgccacttccgcagtcagggagtttgtagattgtacctttacacgtctttgtttacacttgaatattttcttgcatgtacaacatcgttttctggtctttggactcacaagaaatcaggtggttttcatggatttttcctttcttcttaatacagatgtccagagggcttcttgggagaatattgccaacatcgagacccctgtgagaaaaaccgctgtcagaatggtggtacttgtgtgccgcagggcatgttggggaaagctacctgccgatgtgctccaggattcacaggagaggactgccaatactccacctctcacccctgctttgtgtcccgcccttgtcagaatgggggtacctgtcacatgctcagccgggacacctacgagtgcacctgccaagtcggcttcacaggtaatgggttcagccagagcacgtgctttccggtctccgtggtgacctgtactgtgcacgtctagtcctcagtgccttaccctgtgttagctacttctcactgctgtcatagaacacttcgatcacagcagctcagagcaccacagctccaagaagagtttgttttctgttagttctagaggaaggatacatagtatctagggaaggtatgggggtggggtgggaggtgggggctgcaccctgtcagaaagttggctggtcaggtttcaaccccagataggaagcagctcagctcacagcctgcccttgtctctgggcttcctgcagtaggggctccccaggcagcagtgccagctgttagataccagcctgggagggatgtttctcattcaaactcccacacccgggtcccccaactccagtgcacgtttagcgttataatacaagttggaatatggggaaaaggctcagggacacttaaaaaaatctgttaatagataaatgttagctattttaaacaagtaaaaggttaaaaatatggttaagaggacataaaatatgtgagatcttttatatagtatagaaagaaaataattcaagaacattctaaaacatcttttatattgaggcactgagaatcttctaatttgtcagatgagcagtcagtgcgtcctctacctttggagagtttgaagggatagagggggagaaaggaaaaaggtcagacaccttgaagtttctgcttagacactggcttttctggcttctccaactcttcttctccctacaacttactgacaaaaggagaattgtttgtcattttggtccctgctggagacactaaaccaatggttctataaatctataagccaaaatgaacagggtgttcaaaaaattagacttcctctcttgtgcttgaagaagcatggtcttgtttctctaagaagtgctcaactcggcaaccatcagcagacatgactgagagctgtggggtctcagctttgttgctgtggtggctggcatgggtggaaggacacagcattgggtgggcattgagggcagtttgaagaggtggcagctgttgggcagagtggtcaacagccagtaaacaagaggcgttcccagctgagaagcagcttaacagcggacctggagctaggagagcgatggatcctgaccctgggctgcaggactaatggactcctgccggcctggcttcatgtagccaacactcagtcccctcaggtgccctgtcccctgagtctttgagtctcaccttaaggcctcagcctctgaaaaacaccatttgtctgaagatcttcaggtgacactgctatgcgctgtagaatccaaagtctaggggtctccatgtaaggtcttgttgttcgctggctgggagacagagctgctgagtgtggggctggctccctttgcgagtggtactaagttctgttacccttcctttagggaagcagtgtcagtggacagatgcctgtctatctcatccctgcgaaaatggaagcacctgtacatctgtggccagccagttctcctgcaaatgccctgcaggcctcacagggcagaagtgtgaagctgatatcaatgagtgtgacattccaggacgctgccaacatggtggcacctgcctcaaccttcctggttcctacagatgccaatgtcctcagggcttcacaggccagcactgtgacagcccttatgtgccctgtgcaccctcgccctgcgtcaacggaggcacctgtcgtcagactggcgacttcactttcgaatgcaactgcctgccaggtgaggagctctctcttggctatgggagtgggggtaaaccaacctcaggatgaaggtggagggtgtacttcccagagcctcctttaggaagcaaagcagggggaaggagaagtgagagctttgtgtggggtgggttgctggcgagggaggggttttatgggctcactgtggtccataagtagagcagggggtaatttaacatgtcaagagtttatgacgatgagtgcttagaaaattgtttattgtcccttttggagaaacagttctaagaaacggccaggaagatctggagtggggaagacggtgagaaccacacactctgtgtgtgtgtgtgtgtgtgtgtgtgtgtgtgtgtgtgtgtgtgtgtgtagtaagcactgtaagccaaagtgacaccaagacgggaggatcagctcccttttatgcttccgcacccccacccccacacagaatagttacctctcttgcgtcccttccttgacttggggagagggtagcccttcccaccttgatatagtagttaaccctttcaccttgacatgggagtggcccttcccaccttcaagctgtggagacttgaaagaagctcttctgttaaccaaggcattttctgacaagctctggttgacatcgtgggagaaactaatcacgacacaacactttgccattctcttggctgctcagggtcctaggtacacacacaacccaactctgacacacagaggagttgtgtttgggggcccagagtctggtgatccttagagggagaaaggcgcaagcctggccagctcacttcactccatataaaagtaatgaggatgctgaaaagcaagaattttgattgggaacagagcacaagcagctggagcagatgaattactaagcaacaaagattctgtttttatacaaatacccttagcacaaaaacaaaagagaaaactgtgtgtggggtgtggggtgtgtgtgtaatgtgcaaaataagcaggattgcctcaaaaagaagttgttcagccactcttcgagtgggagtcctagactccggtgttgagtctaggactcaacacataatcggtttgtgtgtgtcatctttaggggcttaaaggtcataggtcaatccttagtagaaaaccaaatggcaatttatttgaaactcttttggtttgtttattttatgtttaagagtgttttgactacatgtatgtctgtacactacatgtgtacctagtagccaaggaggtcagaagagggcattgtagtccctgaaaccggagttacaggtagttgtgagccaccatgtgggtgctgggaactgaacctggatccgcacccagaccagcaaatgctcttaatcactaagccctctctttagagcactgattttcaacttcctaatgctgtgaccctttagtacagttcctcatgttgtggtgaccccaaccgtagaattattttgttgctacttcataactgtaactttgctagttatgaactgtaatgtaaatacccgatgtgcacagtatctggcccgtgttgcagtaagcggcatgtcagaaccctaagtcaagctggtcacttagccaagacagaaggaggtacatttaatcatactgctttagtttctctttcaatcaagaataaataaccatcattctacatgctaaataaacatttagtaagaattgctgtcacctatattatcatgtagaaggagagactatgatatctttctttatatttgcatttgtttgcattttaggacttaaaaacagaaagagaaatataaacaacttcctttgtagatattttaatattgcagacattctaataacctaatgtaatggcccaagtggctcataattgaagttagtgtgatttatggctgggggctgtgcgccattttcagtttcaagaaaattgcttttaatagttgcctagaacaagaggctgtttggcagcaagatattgaccggaagttagagaggtcaataaaggaagtctttagctggggagtgattattcacccgcattgttctgcattgttatccactaggcacgataaagcacctcagggaattctgagagaggtcaggaaaggcttgtcaaatgagaatggctgctcctccttgagaaaggaaataaccagggattccacagccagcggactgccagggctggagtggtggagtaaggaggtttgcctgaattccatgctgtgcttggtgtgtgtgtgtgtgtgtgtgtgtttgtctattcgtgtgtatgcacatgcatgcatgtgtgtgcacacatctctaatactttggaggtaggtattattttttgagtttcctcagaggaagtgtctagagtctggcatgttaagtcacttaatgagccacagctgatccttcctatagaagcagagccctggaacccaggcaggtcatttccaaagccagcacctggtgtacctggtggccgtcacactgctcatctgcttctgaggccactttggcgtgtttgacatctcattaaatgtcttgagcagtttggattaaaattaaacgtagtttacatatgaggaaaagaagacacttccattataagcaattagtgtttgttttgcattagcccaggtgtactgcacacagcacagagggctcactggactagtgcttgtcttttgggatcacctgatctgaggcagatgactgccttctgtgtgtatagaaggagtgggtggtgcacagcactgtgagcaagttaggcttttccagagtgtggaaggctcatgctctattctatcccaggagaggcccgggcagtgttcttgcaggcctcctagactttctttttcacagttctttcttactgtagttcccttctcactccccttccttgttcctgctctggacaggggattgagatgctgctagaataggaatctctatgtgttggcacacccagcctaacagaattgtcatttctgttgtcacagtggggaaactgagtcagcggggcacaaggcctcctgcatcccctgcactgctgtttcctgctacagtgcaggtctttgcatttcatatacatacatatatatatatattttttttttttggttaggtattttcctcatttacatttccaatgctatcccaaatagtcccccatactctccccgctcactcccctacccacccactcccactttttggccctggcgttctcctgtactggggcatataaagtttgcaagtccaatgggcctctctttccagtgatggctgactaggccatcttttgatacatatgcagctagagtcaagagctccggggtactggttagttcataatgttgttccacctacagggttgcagatccctttagctccttgggtactttctctagcttctccattggggaccctgtgatccatccaatagctgactgtgagcatccacttctgtgtttgctaggccccggcatagtctcacaagagacagctatatctgggtctttgcatttctaatcgtactctgaccactctatttaaaattatagccatcccctccatccccataattactggccctggcctcagtctttgttttctttttctgtgacacttagagtcctactgtatgatcggtaccctgtcatttcctccattatacctgttggtttttgccagttgtcccccagatcgactgaaggtcaggacccttgtttttgtttattgatcactgtcccaaacacctgaaaacagggcccttgtggaacaggcccacagatgcttgccaggatggtggggtgactggtgtcatttcctgtctggaatcctgcatctcaggattggccgcttttgtccaaggacactctaatactggataaaagtgattttgagtgttttcagttctgaaagttggggagtaggacatgttagtgattctgtttgcatggttaaggtgcaggttttctgcaaagagcactgtagttactgtgttgacccaggaagaaggaattcataccacaaaagtcattcaagtttgtacaacattgagagaaatgttcacaattggcatggacagtcctggaaggtactggcttttttttctctactctctatatggtgacttctcagaatgccacctggtctgcccattgctgtcagtgaaagcctgttcttgtaaagtgcaagggcctgtatgctgtgcaggctgagtgtgtgtcatctcctggcaggaaaggccttgtacttgtgtgtcttctgagctctgttgttggtgagcagaagtacaaccagcagtggttctctctaccatttccacgctcaggagtgtgtgctcttgtcttgcacattctgatcacaccctacagcttcacctttgtgagatttctttccaggaaaaactgccactgaggtctctcagtctgcctgagaggcttctcctctcctgccagcagctctccaccctcattgaaagggcctgaagacaggccgacagcagctctcctgagagacctgctctctgcatgggaggacatgccccttactgaatgttgctcagcagggtggcccacagtttcctaaaggcacagtcttaaaatggcccttctgagtttaattttccccttttggccttttaaggatgggagttggctttgagcagtggactccttgcgagctcttctgtgactgacgcatctaccttcccgtacatctgatctgcgtgctactcctccgacagacttgaaatgttttcaagaagcgatggctgtaacttcctgtcccaccctcacttttggatggagagtttctttcaagaatttgctagcccttttcagaaagatttctagatttttagttattttaatgtgattatttgtgtctgcatctctatttttaaagtgtcaatcatgccttattggggaggaatggatgtggcttgagtttgctcagatctggggacttttaacctatgctctgtttttcaggttgttgtagggcaggcagctctggggtctcataaaacaggctggtgaatactgagtggtgctctggttccctcctggatgctgcccactagccttgcaattctgggctagtgagcccagcccaattaccctcagcttccgcatttataatataagaggcttaaaggagatgatccccagcggatgctctaatccccttgctgcaaaatggtatgagctcatacgtttaagaaccttcccctggactaacaggtttattgagatataatttacacaccatccagtttcctcttatagatgtacagtagctcctacttgctagacttacggatttgtgtcgtcatctccacagtcaggttgtaatgttctcacgctgcagaagaaccacatactgtctgtttatatcccgcccatgcttcctaactccctctagtactgggtgaccatgatggacttcgtgactctctttgcctactgtgggtattgtatatagatggaaacacataccgtgtggcccctattcactcagtgtgacttggatgcgctacaacatgcatggtagaatgcactgccatacctttccttttctcgatgcccaatagtctctggcacagtcttgccaccgtgtatttctcagggggtgacattttgactctgagttctgtccagtgggtctttacctgggagaggagtcgctgagtcatatggtaacgctaacttccaggcgtggccagactcacaaggtagtcacactgcactatgctccgaccagtagccaaatagtattccagttcccacctccgtggcggcattgttgccgtctgccattttgattataacagtccagagggatgtgacattatccatctctttgtttcgatttgtgcttccctgatggcttgcagcgacaagacctggtccttatgcttattgtttatgtgcttgtttggggagtgtccactgagagcctttatcatttagtgattgggttatttgtattttttgttaagctgtgtaagttctaaaaaaatacatcctagatccaagtcttattgtatgtgtgactcacaggcactctctcccattctgtggctgcccccttccttccccctcactgtttagatgtcccgaggagatctatttttttccctgcttgagcttttggccatatttaagcaagctttgcttagctcaagttagaaaagatccactcctattttagcacctttatctagggccaatggttctcagccttcctaatgctgtgactctttaatacagttcctcatgttgtgctgacccccaaccatacagttatttctttgctacttcataactaattttgttactgttatgaatcttaatgtaaatatctgatatgcaggatttctgatatgtgaccccctctaaggatcctgacccacaggttgaggacctctgatctaggcctcttacaagtctttgaatgaatttttatgtgtatgtgagtccacgttcacccttgtactcatggacatctgattggttaatttaagtgttctttacatggaactcatttatgtttggagccaggtcctgggaatcctagcagcaatgtaggtggggatgctgtgctgggttctcctcagtgactgcgagtctgaccttggaacctatgtttttaacaaagcaaattcacgttctttctccatttccttttcccctacttacccattgatgagaaagaactatcttgaaaattatcagctatgaaaactgtctttcttgcttcctatggttttgatgaagtgttgctgtttcttaatttgtacatgattggtaaattcaatgagttgtaacactagctagtacaatgtcaaggtcccagttaacattccttttggctgagctacaagggcactgccactagcctgctaccttattcttcactatttagccttagtcatgtgagactaagttagggagatgatgtttttcttagggtttctgttgctgtggtgacacagcatcaccaaaagtcaatggggaggagcggtttatttggtttatacttccacatcagtgtctgtcatcaaagaagggtggggctgggacctgagcacagacctggagcagaggctgccgagggaagctactcactggctgcatggtagaggtgtagtcagaagcctccctttatcactacttaggggtgtgctttagcagttctacatcttcttgtgcactggcccatttgtaagactttcatgtaatagacagaaatagaagtaatttgataattttaaaaaatgtaaatgtatgcttccacagcttttaattatttctgtcttctataaggtgatttttggttttgtctacttggtttatactcatttatatgactgtcacaacatcagtcactgtgccatggttcagcacagcaaatcggatgtagagtccatagtagcttgtggttaggaaagaagagagcaaggcatgattgaagtctgtacccaacaaatagggcatctgcctatcactctgtggtaccccaggatgtagtgtaaatagaatgaggaaagctgtaagagatacgttggggaatgcaaatgtttggtcacacagtgcttcaaatacgtgctcactggccactcttcttagagctgacagggcttctcttctttaattcagaaatttggtcacacaggaaggaaagaaacttagtgacagtgacagagaaccaccccacagggacttagggtgagcctagtattttagagttgcagacgtgtggaagacaagccatgaagccttcacatggagagaggagcaggaagtttggaacactggcagttctagtcactaccagtgccacctctcccaaagcctgtgttactgtggaggactcttcctgatgtggcacttaccagtccagaaaggcaggctgggcaggtgtgttcagactccctaccaaatgaccgacgctgactcagagtttgtaatgctgtgcagtgaacagcttcaggtggggacgctgtgactcagctctgctcttcctacctcaagctcagtgtctcccctgtgtcctcccacccaagtcacctgtgtagttttggaatcctctgacctgttgtccaagaaaaaaaaagagagagacttaaatcttgttgttacaacactgttttctcctccagtttatttgttcattaaaacatttttcttgggttaggtaaaatttaagtccttgaagtattttcattccttcttaaaattagcgtgtgaaagtgtgggttcctttttctatttcatttggttgatcttctccccatgtgccccttacccgcctcccctatgtgaccctgactggccttccatgcttgcccccaacctgccatttcttctcacttgcatgcttttaggtccagtgctcctcctttaggtccagtgctcctcctttaggtccagtactcctcctttagctccagtgctcctccttccccttctcagaaatgtccggtttccctctctccctctcttttctccctcttccttccctctcattcccagcttcctccctctcttccctccaatctctctctgtccttttttttgtggaactggggcctatgtcctctagacaagcactctaccaccaagctctatgtgcagcctcaaagacttaattaatcattgattgattgagctgttctttttagtaatctagacaggagcttcggaaaatccaataccctggtgtttggaaccagttaatggttgtccaagtatacatttgtcttctctgattttatttcacagaaatgaatgtgaggtaactatgaacgcaagaggcatactgaatgactttcattgtctagctgtgcttaaggccaaagagtagaggactgggtatttcttgtgcagcagttgctgggatatgcactgaaattgcaaagcaggtctgtcctgtgaccatgtcctgctagtgagagcagaacactgtgttgtgagatcctcattgtcttttgttcttctttgatcaggttttgaagggagcacctgtgagcggaatatcgacgactgccccaaccacaagtgtcagaatggaggagtttgtgtggatggtgtcaatacctacaattgccgctgtccccctcagtggactggtaggttcagggtagagtacggcacgtggcagacgaaactcttagcaaagtgggtattgtgttcatgttaccataggatgcttagctgtcagagtgtgtagcctggcttcaattcccaggccttgagtgggactctcccgtgattctttgcccactctgaagtgtgttcacaggcacccctgggcaagaagagctctgagctcagagctgggacaagcactgttctgggttggagagcagagcttagcatctgtcagcctgtggtctggacacagaacgtgctctgtaggtatttgagagggaaaaaaattgtactttgatgcacaacaaactgtgcatatcttaagaacccagagcttacggtttatcttggacagacagctgtcctttcacaatgccaggggcaatgggcagggactcttggtgacatcatttctactatgtctttctccttttttgtatcttttttgcacagtggtttaaagtaagttttttccctaccactgacatgagtaggtcagttgtgcttaaatccttagccgttttgaagtttcttgtgtttcttaggtttgtaacccattttttaaaaggtgagtgatcttatgtaggtatttgtctttagattctgctcatgttgacctgtttatgactgacacagagataagtagaaactggttaagaaatgaagagctgaataaatagtctttaagttaattatgtccagatggtggtacacagttttaaccccagcacttgggaggcagaggtgggtagatgtttgtgagtttgagccagctggtctcatagcatgttccagggcatccataatggcacagtgaaactctgtcctgccccggccatcaagtttctatttgtgtacatgtgtgtgtgtgtgtgtgtgtgcatgtgccttcatgtgagcacacatatgtatgtgtgtgtgtgtatgtatatatgtatgtttgtgtatgtatgtgggggtgcatatgccatagcatcatctggaggtcagaggacacatcctggttgtgtctttatgctctcttttcaccatgtgtctcccggggattgaactctggacacggcttgtgcaacaggaacctttcttctctgcactgtctcaatggtctacactgaccttgttttgaaagaagttgattggcttaatgcggaagagggaggagtgagttaatgtgaccagagaaacctgaactatctccttcaggaaacagccagggctctaggtctctgaaatgtataattatttagagtgcctcagtactatagactatggatagaaaagtctaaagaggatttaaaacttagtgctgtgattgttttctggaagagcccgtaattctacttctaatccccgttcttctgagtgctttcccacaggtctagagttggacttctgcagtttcttcatgacgccctggtcccgggacatcattcctaacacctcctgacaggttttcttctctctagcttttaccactcctgtggcacattttttcagaaactgttttctcttccagcttagaaatttatcagaaagttaattacatgagaaatagtcactgctaatattggaccttattcttctgaagatgcagtatacagggttgggagaaatgcttgccagctgtggctctgttctaacctctgcttgttctgtggagtgtgatgcataggcattaggctgctgtcgccagggctcagtaactggtggtgtaacttcataactgactcttctgatgctgcatcaggctgcctgctctaaccttggttaacctggaagtgtcatgttagggaagggttctctgagaaccagtgtttaaccctggtgtacaggcagtgctttcctgcaatagcggtcttctatttggagtgccattctcccagttccttgtgtctgtagaaagggcagcagaggtcatggagaagtttcctcaggcagagtttatttctgctgatcactgtcatgctatgaccctcagcctctcgcttgcctcctccttcactcagaccagttctttgatttccaatgacgaggctgtgtctgtccttagatgaaaatccaagctcttccttggttgtgtgaagcaccacgccttgtgtctgtctggtttctagtctccgcatgcgtgtgtcagctcttctcaccctagcaattctgcccaacagtcctgtctgcacaagcaagcttccacatccggtcctcagccaacttccccttcctcaggtctcccctctgttcctctccctgcctcactcaggtgctctcctcccaggaagccttcccctccctccgtccaggctgagtgaggctcttgctcccctctggctgcctttcatttggatgtgtctatatagctgtggaagcatgctgtggtggagaggtggagtcacagggggttgagccgctgtggcagacattggtagctgcatttaatggctgccttctgctgatgctgagaaggcagaggtagttgtgtttcccaggagccctgtttttattgctgctagtgctctgagctctacataattgacaggaatgagcagagcttcaactcacgacttagatgtgtcagcatcttaatgtgctaattgcatattttctattagcggtataacctattgagtatccttcttattagatgatgatgatgcacaatgcatacctaaaagaattaaattatctgcccttggtaaataaatcgtgattgggttcatgttttaatctagatttattgagtttcaaatctgtggtctctttttttctgtatcaagagggctctgtgaggtggccttttattttttatcttttacggataaagaccattgaagtgcctttaatgctcaaaaattcaatttctgatttcattattctaggatttcatgatttgttttcccttcttgggaacctcaccggtgactctgaggttaggagttcacaccgcgtgaagggttcattgccagtgcgctgcctcttgcctgtacctaagagcctgctgcaactgatcataacccccctcggctcccagctgtagttgaagtctgcgctgcttggcctgcgtttgataggcaaagagggctgtacgggactagtgggagaggagaggaggtttctagcctgccccaggagagtggcagaggttacttggtagaaggaaccggcatgggtttgcacatccatggggaaatcgggaggttgcctcgtccttcgtgaggacagcaggacagttttgctccataagtgggttagcaggaaacaccacccttctcggctctagacctccaggtgaatagaagcatctccagttcggttcatcgttgatttgcagtgaagagtttctttttcttgggctttgtttatggcctgttataccccgtgtatgttacgtactctgtgggggtcttgacaatcagggtgcagcagtaggtcttgtagcctttgtgtttcttcagcagcatcagttatgatgaacactctggagcaatttgttatgatagctgctagtcatgtgcctgagagagtctgacgtgtgacatgtctgaattcaggggtgttgtaagtgctgcacaatacctgatttctgaggaggttgataggaaaaggttaaatattccatttgggaatgtttagagattaagtctcacagttacagtgttttagatgtattgagtttgaagggttaatttcacttttttttttaaagtggctgttaggagttttagaagcacccgtgtgcatctctgttgtttctgtgtgagaggtgctgctacagcttcaggggctgtgcagagctggctgctgctggcccctcggcttagggcagagcaactctgcctctgggtactccatggtgagcaagccagcctccttctgaccttgtttggcggtagctcctccccaggggctgggtggggctgttgtagctcagtacagagcttttcatcttcagtcactagtgagggttttcccaagtctacaggcccccagaactaggcagctctgctcacgtgtgttgggggtgggttgactgatggagaaagtgaatatgcagatattccttaggcaggaaagtacagagggttggtgcaggctcagcacagttgcatttattatgcagccgttgttggactcctgccttcttatcaggatagctctactctggcaaatgtccacggaagggaagaactttaaaaagccccaaatttatgagggcagtgtagattaatgttttgtctacatagatggttatttgaattttcttcttaaaggttcatttccttcagaattaaagttgactctaagctcaactcacaaattcctctgtgtggctgcttttggttttgagttcattcccagggcagatgtgattgattttcctgctctcattattaatccagaaatgtaatttcaacttgggcttggaacactgctttgggacacgaagcagaggcaagcaatgaaagttaggtaaatttgagtcaatcaagtggaccacatcttctcttcactctcctatataataaaggcagtgagccttcagtgggggttaggattgctcttgctctggtttcagaaagaacatctggcctgaatttgagtgcttgtgccagaggtgggccgcgagctccagggttttcgagcagagtctgtgtgctggagtttggatgctgagtgaggtggttctgctttggtcactctgattggtgagttgccctggaaacactcaccaccctgtgtgtgtgtgtgtgtgtgtgtgtgtgtgtgtgtgtgtgaagactatagggatggagcgggaacatatcttaggctgagacactctgtctgagaagatgggaaaacactcctcacacttcaccttctttgttcaccggttgttacaacttgacctccagcccaccttctggaatgctgccttcccacccccagttttggtttcctgtcagttgacagatcacccgggtgatcacctgaagcatccacatcctagaggcccctttacagctgataggaagccatgtgggtggaaacagctgcgaaggcatgggctagaccaggaaggcctcctgcccgtggttccttattcatatctagcttgggcctcactataggccagcagtgtattccaggtttttaagcccttacggaatgacagtgaggaaactcagaagcagacacctactgaacaactcacagtccagggcgctctgtgagtctataaagagcacaaagctaagacaagtcctaccttgtaagttttgtcaaaagaagatgcaaccctgcatggaatcactataagagatagaaagcatgaacaagacagagtcagaaagaggtgcggtgtgggttagaattaacacacccagtgaggactgagaaggcaaacctatgctttgactctctgatgttgactttgaattaagttttcagaaaacattagcagaatagaggaatagaggcaggtagagggagatagaggcggatgaggtaggtagagacaggcccagagcctcagatctagagttgtttttatttgggggggggggcagtgagttttcatgagaatctattacgtctgtgaggcaaacactgtccagtgagtaaaacaagattgaagccagaactgtgacaagtgttcagactgaagaaaatggaggaggaagttggaatgaaggaggaagttggtgcagagaaggaagctaagaaacggggatggaagagattggaagagagctttgtctgaggcaccactgagtcacaggctatcccacaagaaggcttcacctgctcacctctgcctgcctctgctgcagcctctgcggtactctgtctgctccatctggcttataggttcagcttacctggtagatcactggtcttactatatgtagcacactcctgggaccatttttaataagtgacagctcctggatgagtgagtgaaaaccaggagaggcaagagtgacaagatcccactctcttttgttgttgttgttaagaaaaccgatatgtgggtatgtgcacaggagtgtatgtgcatgcgaggggcagttgcctacagagtccagaggtgtacgatactcgtgttgctggagccgcctatgtgggtgctgggacttgaactcaggtgctctggaagactaatatgtgagcttaacaactgctgtctctccagctctgatcacatgtattctttacatggttgaatcatggtctgtgatgtgcacatagcatatttttgtatgcattgtccgttgatagaagctttcgttgtctctgtctcctgactgatgtgaatagtacttcagtaaacatggaaacagatgtctccaggatgtattggcttcttttccccatatgggattgtgtgtgtgtgtgtgtgtgtgtgtgtgtatgtgtatgttccatgtgcatgcagtgcccatagaggccaaaagaaagcatcgaataccctggagctggagtttcaggtggttgtgagtcaccatgtaagtgctgggatttgaacccagttcctctggaagagcagccagtgctctttaactactgagcggtttctcccgcccctggtagttctgttttcaaactgtgagcagcttccatcctgataggcattcctatcaacagggtgtaggagcccacttttccctcatctccacattatagtcagcgtttgctattggtgtgtttttgatggagcagctcttctggggtgagagtatctcctggctctggttcacctttcctgctctcatgggttttccatttgtaatctgggttgtaaaaattcactttatagtgtagttatgacttttgaaatcttagtgcatcttaatgccttgggctgtgagtgcagctttggtgcaacacatcagttataccacaggcatctcatgtgtgtggcttcttcatcttggctgagtttcagtcaattaggtaactgtgagtgatgtgacgtcttcagggatgcactctggtagccatcgggagctggaagctcttggataggctgtcttcatgtgtgaaagcattttgctggtatagaattcttgggtctccagtgtaagctgggattttaggcatgtctcctttgcatctggtgatgagtcctgggtgggatgtttcttcctccttgatggtcagcatcactgctcttgatgttctccctgtaatctcttgaaggccatccttccctcccacagagcgcagctcctctcccttgctatttcagcctgtcttccttttcctttacatcttaggagaacatttatagttccttgtcttctgttctgtccttcacagcctgtgaccctgagttttatttgcagagcatttttgttttcttgtgacacacagttatctccatccttcctgtctcttctgctgcttctcagccccttccactgaccctgctgttcagtgttgttttagaacccgagtttgttagtgtcttgagagcggagaaccaactctttctcagtgtgctagttcctggcaatggatatttttacagtgtgttctttatctgatcgtatgtggcacacatccatactttatattgcagaaccttataatagccccatggtggagttttccactctactcattctgcacaaagtaactacttgtctgtgaatagagaaattctgggctgtttggatcccctcaccctgaacctccctgtgaggtgagggctctcccgtgtcaattggcttagaagtgaggagcctaaagaagtgggtatggagccaacacatgggccttccagaggcgagagtgaagcttggcattaccttcctctctggagaagcctctgtgccaggggtcagcttcctgaatgccagctttggctcagctctccacagaggccaagcccggctgtgctttggtgctgttgcatccggagtttgccccagatgcaccacagactctcttgttgctatagtggccacagtggccttcagctcctctgtgctttaaattgctgttgacctggaggggtgaggtggagttcagcgcattcttcctgtagctgggcaggctttctgaaacacaaatcgcatgtgctgtttctttccttaaatgctttggtggtgagtccttggtttgggatggagttgcagagtgctgcatggaaccagctctctgcatctccccactacccatgcacgccttgcaattcagctgcaccctctgcttctcattgcctcaagtgagccatggtccttcttattcgaagtgcgtactccatgtcattctttgagaaatgttctccacgccttctttccacccacacatacactcgtagacagcctgccctgcccatgtgtccctcgggctttcatttcccagttttgttctctagctctctgttctcctgaggcaacaggtacccattaaaatacttgacaccctgtattatcgttgtttgtgtgggatacccactatttgcctaaacgtctacagggtaaaaaccagggctgctttgttcatgggtaatcccagtacaaatagtccagacatgacacagcatgtgtgcgtgtgtgcgtgtgtgcgtgagtgcgtgagtgtgtgtgtgtgtgtgtgtgtgtgtgtgtgtgtgtgtgtgtgtgtggtgaggcaatgaatgaatagggaaattagattttctggtgtttctcatgccatttcccccctggattctttgttgagaacgtttgtaaattgagctcacctcttggaaagatgatgtttggcagtaaatggaaagagcttacagagatgtctggcatctagaaataatttaatgcatccatttttactgttggaggtcagtaattgtgagacgggacctctcttagtgcacccttacaaagatgacggtgctcttaggaggactgcaggactctactgcaggccgctgtcttggaagatgtctttagggatggggtagacttcagttaggaagaaaattgtcatcgctgcatggattggtcttagatctagtgaagtagattaggacagaggcaaggggaacttggtgtcacattgagatgtcgtttagcaaacagggtaagggacttggatgaggagttcctgagctgattggtggatgtagataaggacagaaggagactgaggaatggacagaatcgataccctctgttgctgttggaaaagtaaggttgctattctattgagattatgataataagagaagacagatcaatcacttacttaataaattaacattcctggatattattagctgggttttttgctaagctgtggggattcagcaatgaggtagatggctgccatcatttctctataaggtttaaagtcctgaattaaacaatagtgagaaataataatctatgtataaaatctgatctgtagggaatggcttgcaaggttagtagagggtgagaggaggtctattaatggggaaaactaattttgttttggcagaaaaggtctctgggggaagatgacatttcagatgtagactgtgagtaagagttatgtggggaaggcagggtaagaatgtccccaggcacagggaaccacgtgtcctaacgtcaaggtgaaggacctcgaccactttgaggtatggacaaagaagtggagaagctggtacagaaagcaggacaagtggcggaatcgtatcccaccagagacaccatcagagggctcagagaagaggtggctcaatccggtttatatgttaagatcattctggaagctctctagaaaatggcattggtcatgatgtaggaaacaaggttttgaggagtcctgaaggagatggtggtatggaattagctctgtgaacttcccttcttccttcataccttagccactcccaccctcctagggagcaggtacttgggcttccatcaagtgcatgtacactgcaaaggactagttcaatcaccaggagtcctgcaggcctgtacagccatatggcttttcctctgctctttaacttgagaaataaactagagtctgcatagagaaagtctatagaataaaactggagaaatgctctctgtggcctggactcgagtgattgcgggcgggaaggatgtgtcagaggtgaatttaccatagaaaggaagggaacagggtcagggacagtctaactaaactttatgcttcttgtgtggggattattgtcaagatgtgtgttgactcttaatgtgcttgaatattaagagtcaaaatattccctgcagaccttgaagtccacagattggggggggggcgggggggcgaggcatattcagagctcaggtctctgtttccctgagtggcctcccgatctctcatcccatcttgtaactccaagtcagagagatgttttttgtgtggtgcattgagaagtaccctggcctgttatagttgctaaatgttttttgtgttaatggactgtggctcatttggcatggcccaactcttacaaacccagtgtagggccttatttacaaatggtgggctggtgctgtcttcacctgcaaccctgctgagctctcttccgagcttctcaatccttgctgtccctcaggagtcagctcagattcctttcccattctgaaagttgacttctgtagcagtctgtcagtcccacccttttaagcacatatttccattttgaatctgtgtttctagttcttctgtaaagagctattcacagttgggcaggttagcatacttctctggccctactcctcatctcgagcataattggatttgttgctgtctaaagtctgtttttccaccaaccccaagtgtatctggcataccttctgaagcagatggtagatccagaccctctccttgtgaaacctgtagcctaatgggaggagggatgagagtcgtgggataaagtccagctctgccagattccaggacagatgactggaacagtggcagtggtgagtctccgggagatgggcatgtagaggtatggctgagtcacaagcaacgtctgagggatggtgagtagctaaccctgcaattggaaggggtagagagcataggatgtgcggagccctgccataggaaaaaaacccagcattagatgagctgccagaagctgttgttggtcagagaagatgtctgaaggggagggctagtcttgtgtgacgtacagggacaagccagaaagttttcggtagcttcagctggtgtccgtgtttagagtatctgccagctgcagactggtgagtgtgatgtctcagaccaaatggatcagggccccctgtgactgtgttagaaagacaagccctactcttttccttctgcccgagggagtcggagagggcctgagcagcccattgctctggtcccaaggttaagtggtggcagcctgcagcatctccaagtgaaaattactacgaggtgattattgtcctctgaagacttgcctcactgaactctgcagtctactcagggagttcacagcgtggtttgtgttgacccagatgacagggttgccaagaccggggccgggcaacaacacaagtctcccttcccaccgcacactttgatttgctaggtagctcaggacttagtattctccctctcttcctgctaagcatcacttgtccttgccctccctgtattcacagatgatttactgtcaatcatgtcttcccccaactgttctttacctgttacatcaagtccagagttcatattcaaatttaaagtcttaaaccatctctggccttttaaatctccagtaggagagtacaccgcattcatttgctgtcttctagacctgcctgtgttgggtctttcttctgaagtaagcctccttcctcccacaaaggcaagcactgtgttcctgaggggaacgagaaaagtcgaatgagcagagagcatgcacccagtgtcctttgagtgccgaattttcccatcctaatctctcctgacctctgctctgctgccttcactaggatggtctttatctcagacagctgcgccttctcactggactttaggaactgggggcagggatgaagatgtagctgagaggtagagcatttacttagcatgtgcaaggtgctgggttcaattccctggtactgccacagaagcccctgggctgggggaggggctggggtttagagttggcatggtaacggttttggtgacagcgctccctgagcttgggaagcttccttgatgctgaaccccccccccccccccactgtgggcttctttctgcctgggttttctcctgctcaaagcagatgtggacacgaagtgtggtatcctaggaaacgtcttttggaagttttggagcaaggggttgtagtaactacccaggctaccgttttcagcatctttgaccatagagcttggtgacagacttgtatgagggagagggaaagaactatcagaaaggagtctaggaggttcttgttctacaacctaagagtaaaaatgatgtggtttgcagaaaatcacttctaagctggggtgtccttagctgtctgtttttgtgtctagcagtgtcaaatggacatatagatgcagcctcattgaagcagccgtgagctgcccacccctcaagcatgtttccatttcaggcagtgcattgctgctgtaagttccccctaatccagcagagtgactcatggccttggtcttcacatnnnnnnnnnnnnnnnnnnnncagcccaccccccaccctaacgccaccccttgcatgcctgtgcccttggaaagatgcagcctgtagcgctggtccgatcctgtccgactcacaccacgagtctgtgttaagtttagtgcaaggtggaccagttacagtcccagcttccctgcccttgctgcctgccagtgactcctctgagcccgttgttcagttacaaatgacatggtttgggtggcagctcacaatgtctgcttcattgtagacaatccagctattactatcgtttcccaggagtgtcaggtttctttcccaaggaaatattattttacctactttttatttcttactcagtctctcttacgatagtatgtataaagtatatttttaaacacaacagtgtctcatacccagatttatctcagggcctcactaaagaatggtgacacggaccatgctagcattccacacgtcagggaggttcaggggcagcacagccgactgtgttagtgtaagtgcaatggctagactcagcaattacccaggttacaacagctctttacctactttgtggtcatgtatttatttctcagccccgcctgaatcctaataacacagctgtcattctttgaagtagcatttttgctagaagcgtaagggagcaaatgttttgtaccgaatgacgtcatctatcctggggtgggtgtttgcactctgagctcttcagccttcgatctgttgcccgctctctctctctctctctctctctctctctctctcctttactcagctcctcctcccttcattctctacaccttccatcttctctcctctccctccctcctctcccctcccttcatcacttcctccttccccttcttccttagtcattcactccttcaatctttcagcacgttgcttaccacctcactcattcaccccatcactcactcaccctatcattcattcaccccatcattcattcaccccatcattcattcgctcactcactcattcattgcttttctctttcactcgttagcccccttactccctcccttctcaattagtctggctggagtcattgatacttctggtagcaatcggtagaacctcctttcagatcaagaagcttgctgtacaccgagagcctgctcagaactgtgtgctgatgggtgggctcccagccagcttctcaggagtgacaggagccagtagtcttagtgctgtgatgatagtctactttgctctacactttaccatttccctgcagaccagccttagccagtcagtcctgtggcagggtggtttcagtccaataatggaaagagacacagtgatgtaacttggattggatgccatcctgcatccagcagtagggctagatcatggtagtcatatgcattctctcagaggccctgcaagtgaagcaaggggaggaacaggaaggtctcttaggggagaccccaaacatccacatctatcctgtcaggcaaggtaatggcctctgctgcaacgacacagaagccccagacagattgtttgcagcgagggagcaggagaagaatatgtaactaagcaagtgacagttatattgcttctatagtagagaggctgaaggccaaaccaggctgaagtgtgggtggtcagactcatttagcacaagcatgaagggaagcggccacagctgggcacagtatgggccttctgtagatatatgacttaggaggtattccggggactgtggggagctttagtattttttaattcattaaaattaatctaataaattaataaattagctttggagacagggtttctctgtgtaatagccctggctgtcctgggctcgctttgtggaccaggctggcctcaaactcccagaaatctgcctgcctctgcctcccaagtggtggaattaaaggcctgtgccaccaggaccaactggctttagtatttttaaaattcaagcagtctatgctttttttttcataagtagattcctaatcagaatgccccttcaattgatcattgacggtttatttatttacttacaaagggggaatgaatgactttttgttgttgtttggttttagaatttgttatggtttagagaatttagatagtctaattttaatagcctttgaagaaaaagctggttttaaaatagttccaagaagacctgcttattaatttgtttataatccaggtggtctgagaccaaactgcttttgtggatcatgaactccttgttgtaaggagcacaaaacatcccctctttctgtgcccaggacccttccagcagttcagtccccatggtagccagcactcatagctcatctgtaggagcacatacccagcagtggtccttcagtgctctgtcggacgacacagtgggcctcactcagctcctgtggcattgggtggaccgtgcccctggggtgagacacttgggtgaactgtgccccttgggtgagacacttgggtggactgtgcccctggggtgagacacctgggtggaccgtgcccctggggtgaaacatctgggtggaccgtgcccctggggtgagacacttgggtggaccgtgtccctggggtgagacgctgtgctccattttcattctttgtggctttttctttcacatctgtactttatggaggcttttgtttattcttgctcatccacacttttaaaattgttatagtctgttttgggagaattcatgagagataccggggaccctttcctagtggtctttgctatgtgaggtgtgtgtaccgtgtggaagccagggcactgacacaagcaccatccatgtctctccttgctctgtccactttcaattgcttacctgcttgcattctttccttcctctctcctttccttcttccttccttccctccctccttccttctttcctctctttttatgtgtatgtttgcatgtatgtctgtgcaccacatgtaaaccctcagaggccagccagaagagggcatcagactccctggaactgagttacacacagctgtgaagtgggtgctgggatcaaaccctggtctctcagagagcgcagtgagtgctctgaatgcctgagcagcctctctagccctacttttctatttcttggcccaagaaattggctaagacaaggcacctacagagtttggctagttggataggttttcatgttgccagagcttcgagaaaggccatttctgttctgataagtgttatttggataactcagggtcaccttaaatttcataagaggacacagattgctgtaggtaccatttacatcaggctcaggcagctcagtgaagggctgttagggtgccagtcatttatgacctaagggtcctaacccagcatctttccccccacagggcagttctgcacagaagatgtggacgagtgtctgttgcagcccaacgcttgtcagaatggaggcacctgcaccaaccgaaacggaggctatggctgcgtgtgtgtgaacggctggagcggagatgactgcagcgagaatatcgatgactgtgcctatgcttcctgcacgccagggtccacctgcattgaccgcgtggcctccttctcctgcctgtgtccggagggaaaggcgggtaagaccaacagcacagctgagctagaggtggcggaggccggagtgtgcacactctggccttctcttccctgtggcacctctgaggaccattctggaatgcagtctggtagtaaagggcagtcatcttccctagacattctgttccagtagaattccccaagactctggccggagaaatccagactagatggccaatccgtggactcagggagacagtttaaatgaaatacccatttattcagaagagtgtgcctctaggagtctcttaggaagaactctttagagggcacaggtcaccttgttttctggacagcatctagttttaggagtggcggagcactgcaggcaaacccactagaagaagatagctcagtcaagaaacctgtacctggcagtcttgagacatccttgtgtttctgcctttcccaaagccacacctctagctttgtggaagaagtcttggccaattgcagactggaaaatccggttcccaccagaactctgcagagcagggagcctgatgcctccctgcttggcttcctcatgcctgggcacttggcaggtccccacccccctccccctggcacctgatccaggaatgtgctgatgtgattccttgggtgctggagaacagacaggtggtgctcagctctgaggctcgtgagatgccagcgagccgtgctcactagggagtgtgacactggagaaggaagatgctgggtcaaactctggaagcacggagtatttgacacatacttacatgaacacttaccagaaatccagatttaactggacacctgcaatttttgtttgctaatgctggtactctccacaggatagctccattttcccgtgttcctccacaaatacatgcccggccctgagagctctggcccagagtgctcacctatgcccaggttgtcagcggcagctgagggctgtggcatgtccctagtgtagaatcaggtgaaggcaatgttgcctctgggtcttaattggtttgtttggttctgcttttgacaagaaaaagcatttctctaagagagattttgtgtgtgtgtgtgtgttttctctcgctctaccctgagacaggtctcctgtgccatctggatgatgcctgtatcagcaacccttgtcacaagggggcgctgtgtgacaccaaccccctgaacgggcagtacatttgcacctgcccacagggctacaagggcgctgactgcacagaagacgtggatgagtgtgctatgggtgagtgtctggcatctcttctagacttggaggtgtgtcgtgtcggctcagaaagtgctgcagcgggagtgttctgtacgttagcgactgctacacccaaacctgaatttctgtttcctgttctacacacgtaatttacaatcaacctttactgtacatgcattctgggaattcagtgcaacggcaagtctagacttgattattaatagacgctcctgagctgggatgatggctcagctgttaattatgtactacgtttgtagaggatccaagttcaattcctagcacccacatcaggcagctcacaattccgtgcaactccagctccagggaatatgacctcattttctggtttcagacatatatacatgcacatagctaaaaataaataaataaaatgaatataaagtcctacctcagtaagagtttaaaaaaacagcacacatttggagaccactcttgtcatttcttcttataagttaacaaataaacctgaaaacagagtgatcttgtttaaagtggggccttgggttgtagattcctgactgccctgtgttatctgtctttgtgggaactctggcaagcgctcggtcctggtaactggttcttatgtgttacagccaacagtaacccttgtgagcatgcaggaaagtgtgtgaatacagatggcgccttccactgtgagtgtctgaagggctacgcagggcctcgctgtgagatggacatcaacgagtgtcattcagacccctgccagaacgacgccacctgcctggataagatcggaggcttcacctgtctgtgcatgccaggtaaggagggctggtcagctgctgacaggactcactgactccatgcactgagccagcgcggggttccccagctgactaagagagctgagcccgggacccctgcaagccccatgattgcagagaaagtaggagacaactggggtggtcagagcagagcagaccaagtcagacaggagctccacctcaggctccagcttcacacagtgggaagcctccggagccgtttcccaccggaaccctctaaacatggagtgtcctgatgctctgaaggatcccgtgtgccatcccatctcacttacagagctagtcgttagccacacttaatgcaggcatctgctgcttacccagaatgagcccctagctcagttgtgttctggagcgactcctcagtggacaaaaacagaacgacgacgtgacagcacaggtcagctgttctgttaatgactgaagccagcgctatagcctcggcaggagctccccctagtcctgaccggcaccccaagttgcaccacttcagttggtcttaggaaggcagtggggaaggggtccagaaactagaagttatccaaaatgtgggagtcttggtttgcatgctgtgtcctggggtgtacccttgcattggccttttttcttgtcgctgtggtgatgtacctgacagaacgaattaaagtcccacaggcaagtcagtccatcgtggcagaggaagacatggggcagggcatgtggctgcagctcctcatattttggtgggttgggaagcagagataacagaaacaaaagcaaagctattgtcctaaggtcccattgccagtctaccatctaggccccgtctctctcccacagctgtcctcgccgccaccagctgggactgggtgttcaagcacacgagcctgggaggggatttcacacctgtaccataccaaccctgcctcttcctcacattggcaaaaatgtcttacggcatctatgttttgtccactacagcgactactctatcatagtgaagactcgctttctttggagagctgctcatgcttgcggaggtttttagctctctctgcacatttttgcttccttggctggaatgcccctttatttctgtctgaaccgcatgtgtggtccatttgtgcaggtttcaaaggtgtgcattgtgagctggaggtaaatgaatgccagagcaacccgtgtgtgaacaacgggcagtgtgtggacaaagtcaaccgcttccagtgtctgtgtccccctggtaagcgcctgccacctgcccctgtgctctccaaaaccccaagccagccaaccacaggaaggggagggggagcgagtgcgtgtgggccgagcatgaggaagtcattaaagtggctacttgggaagagactttgtgtatgctgaggtggggaactgtttcagccagcatgtcttccaagacttttgtggcctgaagtccaagtctgttctcgaacggcccctgacctccctgtctgtgtgtatatttcagagtgctcacacctcacagaagcgcaggattttattttttcctcatgagtcatattcctaaatcccaagacattttattccattaagtccaggccggcaccacacatcagatttttttccaaggtcctgtgcctctgctgatgttgaaggcctgccagctgtctgctgtggacggtggcttttctacttaatctccaaagagaagatcctttcagtctggggatacagttactggtttgagactccatcttcagtagtgtctcagttcctcttgctttccctggagatggacctgagagtcaggggtagaaccccagtacctctgacctccgagctttgccttggtgaccccttggcatacactctgccagtgattcaaccactgtttcagtaaaggaagatgggtcagtctctgatatgtgtcacctcggtgcctcttccaggcttcacaggaccagtgtgccagatcgacattgatgactgctccagtactccctgcctgaatggggccaagtgcatcgatcacccgaatggctatgaatgccagtgtgccacaggtaagtgtcagcccctcccatccctttgaggcccctctgtgggcaaggcgactgtcttcccctagctgctcggaggtagagcataaagggtgctgccctcctctaacagccaggggctggctcatgctttcgctgcagacctcctactgctgcagacctcctgctgctcttacagtccttacctgtagcccctggctcattgtcaccacacagtagttctgcccacatgttcagctggtgtctgtgtgtttatggaaagggtttgggcagcagtgagcttctagcttgcttccctggtaccttgggaataggagaattctagaagaaagctgttcttcactgaggctctctacagggtctctgtgtctctgagtccaacctttgtgcagtgtagatacagatgtccttgagagttggctgtgtctctctaggaaggtgctccctgcatgatctgattctgtattctgagaaactttggtaacacatttctgggtcttggaccatatttctcacatgggaatgggctttattgagctgaatgactacagcacacttgctgtgcagatgcatggctcatcaatatggagaaagccttaaactattcaaaaaggaaacctcttccttatgtgattctgagatagaagctatagggagagagggctggagcaagagcatttgctgctcacgcagaggacctgggcttggttctcagcacccacatagcaggttccaaccatctgtaactccagtctcagggaatctgacaccctcttgtggcctctgtgggcatcacacacacacacacacacacacacacacacacacacagagttcgcatgcatacatataggcaggcagactctcaaagtcatgagtaatgtcagagcataagttagaaacaggtttttagcatgtaggccttgtgcctctgatttctctcaggtctcaggaaagcacactctgttcccatagtggtgcagagctgatgtctgttgtaggtgtggactctgctgagctgccttttcctcgtaggaacgttgcctcctgttggagatgctccagacgtttctagcctgcttctgtggagcgtgacttcacagcagtgaggtttaagtcctagatctcatgtttaagggacaggagggtgctgaggtgctcagtgggtactaacacctgccgcacacccctaaaaacatgaattcgactcccagacctcggggagcaaggagggaacctactcccaaaagttgtcccctgacttcaacatgtacacacccacaccacccatttgaaaaataataatttaaaaaataagtttaaacaataaaagggaggaaagacctccttggaccctttttaggaagaggtgggacatggatcaagttacacctcagttgtgggatgcttacttctctcattgtctttcagagagtcacaagtggatcattcattttatttaatgaatacctatttagaaattagtagcataacactcttggacgggctctgagactctgttctccagactcagatctgtaagacggaatatgtgaagtcatagtcagtgcctgtgtgctgggaggagagctgctcagaggcagcatgcaaggaggaagtgtggagtgccttccttccctgcaggccaggaagcaagcacactgagaagagagcagcagaccccaggctcaggcacaggggcatatccgttctgcagactcctccaagaatctgtgagcacggggtccccaagctcgaattataaatcagacaggcaaggccactgctcaaagccacctgtgaagattgctccagacgtggggcatgcagggcggctgggcaggccgcctttgggtgtagactcagcgtgctccctggtttcaaaggctcctcactaaaattctttctgcaggtttcactggcatattgtgtgatgagaacatcgacaactgtgacccagatccttgccaccatggccagtgccaggatgggatcgactcctacacctgcatctgcaaccctgggtacatgggagccatctgtagtgaccagattgatgaatgctacagcagcccttgcttgaacgatgggcgctgcattgacctggtgaatggttaccagtgcaactgccaaccaggcacatcaggtaggacagtccctccttctctcagtccctccatccagggcctgctctttggcattgtcagctaaaagtgacagctttcttcctgctctgtgtctggtggggcctcaggaatttcaggcaaaggtaagaccttggtagtttcgaagtcaaatgcctcaggctcctcacaggccacctgagcctagagggaggctgcttgctagacgagggcctgctctgtcctattaggagttctggagctagttcactgggcagctacatttcccagatttcccagaattccattttacctgtgagaggaacgatcttggacacagctttagctggagacagagggatactgtgagagatcaaagggaaatgtctgagtggaagattaaccagtgtgagccttgcggagcagagggcctactggatacacggggtgatttgtaggggctcatcctggacttaaggaagtcggcctatggagggggcagaggcaggggagtggggagctgccctgatttcattgtgttacttcaaatccatttcttcaaacttgtcaaaggtcctggtcttcatccagggcctcacacatgccaagtttgaaaacaaagtcctttttgaattgctcaagcatacgaaaaacatcccatgccttcacagctgagaatgtgggtcccctccccacatttagataactccctcaaaggactgaatagggctttgtgaaaccttccaaaagcaatttgcttccgggctggtccccagacatgagaaattgcagtacgaaggaaaagtgagagatttacaagcagttgaataggggcctttagaatggaggggctgtgttaggcttgctgtctccctcattgtaacaaacacgctggaaacctggcgagtggtgggttggcaagaacttattttcctctgggattatatccttgtgccagagtgtatcaggtatactttccttcagggacagaggcaagaagttaatattcatggtttgcagcaggcagcatgcagagagaggccagacccattgctgcagctgtttgaagagttagagcaaagagctgcaggcaacatacagacttgctggtctgtgttcagtagaaaggagctggcaggtgctgccggcctggctggaaagtccatttaggggacagtgtggatagactgtcacggagtcacgatttctgatcgatccaggtatcatgcagtctctgttggtagtttgatgtttggaaggaaggaatcatcatagcttgctcaccgttcctgtggtttccactgtctgggtgctcaaagggagagacacgctcactgttagggtcttctctcatctgtcctttataatgataaactcttggaataattagttctcttgagtttcaagtcacctaaaatggcttgatctagcataaggaagagaaaacagaaaagcagccaattcagcaacagcatagaagtctcctcgggctctaagaaacagtagaaccccagaccttgtcagaggagagctgcagacctgaggccccagagggctgctctgccagtgtagacgcttgtgggcagctcagctgaaccaggacctcagggtctggagctgtactggcatgctaggacttcatggactgggggccggaggctaaaaggcccacccctgcatacaggaatatggaagcttgtctctcattaatggtcattgtggttagcctcagcgacataggagggctgcatgacattctggagctagcatagaggtggtaattattaacaaatgtctgatcacttacagataggacggttggtgagtgactcaaatggtgacatttggtctaggagctttatctgtattcttacatgagattttacttttacactttttataccacaaaacagtctatggaccccacatagcttgcttagatgcactttaatgattgcagtatgttttcttgttttgtttgttttgttttagttaaaatgggattctagaacggtaggctgccgctgtttcagttcatggttcaggccatggctgctcctcctggctgtgatgctctctcaacctgagggctgagagttaacaagttacacagtgacagattttattgtcctcaccaaagccatgaagcgggcatgtgtttgtttggctgtgggtatgtagatatgtgtccatctggttggggcctgcagcctggatcctggcagagatgctgacagttttgcctatattgcctttgtaccgtttccatgacaacagagtagaagggacaaatcatggctaagtatgagtaatccagtcctcttggcttctcagttctggcttctgtggactgtacttggcgatgcgtcgctttgttctgatcggatggcctggatcccctacagacttctgactgagtagcaccacaggcggaagtgctgacattcctgtggtaacacagaatcatttctctgggtctctttacaggccttaattgtgaaattaattttgatgactgtgccagcaacccttgtatgcacggagtctgtgtggacggcatcaatcgctacagctgtgtgtgctctccgggattcacaggtaacactccttgtctttggagggggcctcctttagccccatcaagctgggaaaggggtccctcagtgaaaatcactttttcacctgtttcctgtttctcatcgtctctggaaggtttgcagtctgctctgtacttctctttctgttccagaccttcctaagtggaaacacagcctttcctttagcgtttcaggccacgcgtgtcttgctccctgagacttcctagcagatggtaactttccatccccgtgcttgggttaatgcctgcaaagccacctttgcttccccacaggcagaggccagtgccttctgtaaggctgtgtccaaggtaaacgtgcatggaaacactggctgctcaccctggggtctcgcctctcccgggagcctgtttggggagggcataacttgaggagaccaccacatagtttgtctacagtgagcaagatctttttgcccatgaaaagaaagtagattagaattattctgcattgtgactcttccttaggtatgaacctctagagagtttgcacatgtgcccataggtgaagtataatccacacattctctcttcttccttttccttgttaacattaactttgtcatttatgtttctggaaaaattatcgtagaggctccagaggaagcctgggccctcactgatacctcatatcggtgacagtcccattgttaggatacactgtgtgttctgctttttctggacattaccacacatgtgcagacatatataatattaccctttagtaactgccctatggtcatctgctccccaggtgtgtagcccacttcagagcttttggcagagcctaaggacagtcagagccaggtgaagagagtgctaggtacccagttcctctatgccagcggtatgacatgtcaggaacttttgtggctttggtggatctcagttcttcctggtgactgagacgccagtgtggtgaaggtttcatgccctgacccactgaggtagcccgatgaatttgggcatcctgaaaactgttctctcaaatacgtgggagctgactaaatacacagacctgttaagtgtaacaggaagaaaatgcccaatttgtatgaacggcttattctgagctaggaaccaaagatgctgtctcacctcacttagttgggatagatgctactgttcctgtggtactgaggagagggcagagagcgagagacgcagggtgatgttcccagtgccctgcaatcagggtctttcccaggcgtctacgccagagcccaggctcattcccattacatggccaagggggagcctgttacggtttcttctgggatttatgtaaggcttctcaccggttttagtttttttaaatgtcagggaatcatattctgtctgtttttaacatttagcaaatcaacggggtcaaagagggggcacataggctaaaaatactctaaaataaacataaggtgtagcatgaaaccacataaccaagagatggaatgttttggttgctgggtggtgcccccttcttgggaactgttttctggtccaagaggctgttttgtaaatcggttgctggaaatgtctaagagtcatgagccataactgtgaagtatttggggcttttccttctattttattttaatcatttcccctgctgttttcataggagctttagaatatccgagggaggcctttgtctcttctcttcctaaggctgttctttattctcacaggagctctacatgttctgattacatgggagaaagtcaggcatcatgtgatcctataaactccttttcattttctaaagcccctggtggtgtttgggttacagcctggtggcagacacccataatcctagctgttgtagaagctcatgcaggatggccacaagtccaaggtctgcctggaccacggactgaattcaagtcagctgcccaacttagtaagagcttgtttcagaatgaaaagtgaaaaggcaaacaacaaaagcaaacaacaagaacggggcagagaggccaagcgcagtagtagagtgcttacccagcatgcatgaggccctgggttccaacccaagtaccaaaaactaaacccaaactacaagaacaacagaacccaaaaagtaaaacaaaccaaaaacaaactaagtcttccagaaaacaaacaaaaagcccagcctaccccagatctactgtcttcctacatttcctcaccatccataaatggagttgtgcagtgctcagttaacgaatatggctgcagagatggtgctggataagccagtgagctacagagagcccatgcactcttcccagggctgggaccctctttctcatcctttggcagtagttatcgcaggagaagttctcaggacacattggcaaatgaatagacaacttctgctgtccagcctagacccgtggtccacactgcagcatgctgtcatatccagcctagaacccgaggtccacactgcagcacgctggcatctattatacactaactaatttactgtaaatagtaagaaacatgcagtaattctcatgttgatcaacgcttagccccacaaggtgcagagctgacactagccatttctgatacccagtggacactgtgtgacaactatagaagaacactacagaagtagctgccaacctacacacaggctgcacaagtagggatggtgcaaatgcacatgaaaatggcttaaaactttatctttgaaattgtttaaaggcaaatgaggagctgggaagagtgcttgcagatcctaagttttatcccagtaccacaacaaaaagaaaaagaaacagaaaaaaaaaaaaagataaaaaagaatgaggtggctcatgttgaacacttggaagactgaggcaagacatacagaggaaaatggcagctatcccagactgtgggtctttaccacaggagccaccagagatggttcactgtgcatggaggctggcagcctgctaatgccttactttaaagggtgtgtctcttttatttggaactttttgaactaaataaatatagtgttattctttcttaaattaattttagaaaaagacttttaaacctgatttagaacactgtgtccttgaagttcataaattccttcataatagttgctagatttcactcccaatactatagggagaatgttaattctcaactattagaaatataaaaagacatctgtatgcttagtctatatacatatacagcataagacaacggtgatgaaggctatagcagacaggccttcaaaatttagccgcaggtgtgttctggcaagatcacgtccacttcgatttcaggtactgccaggacctatatttttagagactctggtgtctgaaccacataaatcgtatgaaatgtggttggcaggccaggccatcatagtctatggcaatgcggcctagaaatttgttgtcactgtttcaaaaaaacatacatttattcattcatttatttatttgtttgtttatttatttatttatttatttatttatttatttatttatttctggtgcctacgaaggccagaagaggacattggatttcctgagctggagctgagcacttttgagccatctaacatgggtgctgggcgctgaactctggtcctcagtatgaacagtcagcattcttaaccactggaccataaaaccacatttcaaagagacgttcttacagtaaagtttgaaaaccactggtctggactgggagtcaccaaagtgttttctcagtttctggagggcagtaaattcttgcttacagactacttacggaggaagaaagtgagtgggctctgttctaaggatgaaaccaaagtgtctattttttaaaatcagtttaacattaaactagcagtccattcatatcccagctaattgcgattaactagagatagaaacgtaaaaccttgactgaggaaaagtgacagaacacgtgtgaggcagagctctgcacacatacatggcagtgccaggaggggcagcagtctctggtgacagaacacgtgtgacagaaacagaaaagtgacagaacacatgtgaggcagagctctccacgcacacacggcagtgccaggaggggcagctgtctctggtgacatctggtgttctccttaatgcctgtgaagttctgaagttctaagctagatgcagtctacccgagagtgccgtggcttcgatctgctgtcattagtaacttcccttccttattaatagcaagtgctcctcgagccttccttgcatggtgtgacatgcttctccgtgttagtccttgaaccttacagcctgcctccgtgaagtgtctgcatatgcgtctcatcgttctaaccccgtcccttgagaatttaagtttgagtgacatggcccctgacccctctacaggccagaggtgcaatattgacattgatgagtgtgcctccaacccctgtcgcaagggtgcgacgtgcatcaatgatgtgaatggtttccggtgtatatgccccgagggaccgcatcatcctagctgctactcacaggtgaacgagtgcctgagcaatccctgcatccacggaaactgtactggaggtctcagtgggtgagtagctaccctgtgctagctagtagttactgattggcccagttggcctttaaaaccaactgaaggaaacactaacacaatagcttcagtttgtcggttgggaacttgacctgatatttaggtaaaggttttgaaggtctgtgtcaaagtctttcaaatcaccgctctgtctctagaagctggcctgtctcctaggactgagagcttacttgagaaataaacactgtctcctttacatgagtaatcaatgaggaccccacaggagggtccaggaattcatacatgtagcagttgtgttttacactacaggattgagatctgacgagtgttctagagccacgggcaccttaacaccgtctattcctgttctgtcatggagcctgggataatgcatttgcagcctgcatgccctcagagttgtgcagcatgtgatggttttagaacaagagtgtcttagacactatgaggggcatggccatgcctcaagcctaaaagaatggagagtgtgttagataacttccttttcttactggcttaagctagatttctgatccagaacatgatgatctttaaagcaccctttcacggctctcccctcctccactctctctccatccttcccccacttcccagctccccttctctgcctgatctgatattatacttacgtactaatgatgttgaagtcagatattatatgtgttgcagatatcttcagctttttggctttttttggtctgaagaaagtgtgactgacctgttaagactccagtcaatcctcagcaggcttaagtggcttattttctgatgtctactttgtactagcgattctgagctttgttcatgttcatgtttccttcagattgccccagtatatttgacaagccatagcttgtgcttgcaattcatcagcttcctcatgatccagggaagcactgtgtaggtctcccatctgaacatactagatggattcatgactcttaccatgtggtgatgattccagtatagatccataggaatatagaaatgagctaattcctgtaatctttgtactagggaggcttaagcaggaggattaccatgagtttgcagcaagccaagaccacatagtggttctaggccagcctgggcaacagagtgagactctgtcctcaaaataccagacaaaaggaaaggtgaaactggctttcacctatctcttatgtgtctcttatgactcagttgtacctttggaccacatagtcacacctctctcttcttgcagctataagtgcctctgcgatgcaggctgggttggtgtcaactgtgaggtggacaaaaatgagtgtctttctaacccatgccagaatggaggaacgtgcaataacctggtgaatggctacaggtgtacctgcaagaaggggttcaaaggtgaagtgaagtctcggcttgttatacccgctgtttgtcttcccttgtggtacacccctccacatcttggtttccatttctttttgttgtagtttactaatacagtaccatgctgagcagttagtatgtctgagatatgtggggaataaaaacaagagtagatatctttctactttcagcttagcagagaggtaaattgttgggacaataatacttaaacagttaagactcgacttaggggcgtgtgggtaaaagtgcgtgctgcctgacaacctaagttccagtgtttgtgtaattgtaagcttcctggccaaggcttgattctataataagcttctcagaagtgagatgagagtgttgtacttactggatcgagccctgtgctatgctcaggacctttccagcaaatcctcacacatgagctattctggacactcagtttcctgtgctcttttgggaaaatacatagtagaggaacatgtctcaacaatattttacagtcagttttccccgagttgggctgtttgacactttggcatcttttagaactactcattttgattgcaggttgagtatccctaactccaaacatggagtcttccaaaatcgggaactttttgaatatcagcatgaagtgcaaggtcgtgacgctctatttcttgtacagtattactctaacagattgcattaagtcaccctcagttgtgtgcaggaggataactggagagagacacaatgacatccttcaagtagcttgttatttatttgtaagaatcctcactctgtcctacccctaaaaaatcctaaacagataaaacaccatgaccaaaagcaagctggggaggaaagggtttatttagcttacacttccacatcactgttcatcattgaacgaagtcaggaccggaactcaaacagggcaggaacccaggggcaggaactgatgcagaggccatggagagtcctgccttgcctcccatggcttcctcggcctttcttcggcctttttagagaccccaggaccaccagcccagggatggcaccacctataatgactgggccctctgtcatcaatcactaattaagaagtgctctgtaggcttgcccacatttatttattgaggttccatctgtcagatggctttagtgtgtatcacagtaacataactgtccaggacacatgctaagtatgtcagagaaaggagattttttttcccaagacgacaccagacagacttagaaagtctctacatcagatactaatgttattacattttctaggaaacttgtagattcaaaagctcttttcttttctttcctctcctctcctctctacttccnnnnnnnnnnnnnnnnnnnnnnnnnnnnnnnnnnnnnnnnnnnnnnnnnnnnnnnnnnnnnnnnnnntaaatctcactgtaacttaccatttatctcatgggaaatgagaatatacaatcaaaccccgtttgttcagtgagctatgagcccctctgagcccgccatctccctgctcccttctgctaacagtgctctggctttgccatctttatggtccttgttgggtcacattggaggtgcaaagacaggtggattctggtcttgccttagtcccactctgttctttttctttttgatcttttagtgggaataaattttctgccttgaaataggagaactatttttaaggctttggaacctagctcactgatagcagagactataccggtggaagagtgggcaggcacttcagggcttttcttcatgagtttgccctttttctgacgaaccagagacttctcttaaagggtgcatgtttaggtagagcagcatgcttttcagcatagcgagtgctcagttcattatgcagaatccagttccataaggaggagcgttaggcctgagtcaggccctccctcacagttttggccaaccgtcaaactaaaatgaatgagcaggtgctcccatgacccaaagaaatgagtgtcagtctgtgacttctaattttcacaaccaccaggagagctggtgagtaactgaggctgacagtttgagtgtgtatgtgtttctcctcctcctcctcctccaggctacaactgccaggtgaatatagatgagtgtgcctccaacccgtgtctgaaccaaggaacctgctttgatgacgtcagtggctacacttgccactgcatgttgccttacacaggtgggtactgcaggtgccagcatggctgggggggggggggtgtgccctgtgacttgggtaagtgacgatactctgaggactcagtttggtgtcactcgtggtctccaaggcttccttcctttatgctttttagtgtttggggttttgtttgttggtttttctggtgctgggggttgatcccagggccttgcatctccttagtattgttttgttgttgttgttttcatttttttacttattcttctctcagcagttgccccttcctcctctcctgtaagttgttcagtgagcttcaggggcgcagctctcctgagtcaccacccatgttggggtgaacttttagatgacatagccatgctattgtgggtcatcctcaagggctctgtgactgacctccacccccagccctgtgttttactctttggggttttaaatttatgtatgatatttagaaccagatgcctacttggtccagaggcatctatccttttgacattgtaacataaaattattgagaaaattcatggtaatgtgtttttctttctatatacaaagttttaagatgactgttaaagttgactttgttgtcacttgactttagaaacaactcaatatcctgtaaacttcctcagtaagtaaaagcatttgccaccaatcctaagaactggagcattgagtctgcaattcaccttctcaaaaactaatgtgttttaaaacataccttgatcctttttttagtggaatcatttttaattttaatttttctctaagtgtgaattcagtattctaaggcaggaagcacccactagcaggcagctgttagcacctggtgatagcagtagagattgcctggcaacagagatgcaggtatagagccggccccagtgatagcaggggaggaagcagccagcagagagactgagttcactaggtgctagacaggacttagagtgtgcttcccacttagtccgcagaaatcctccctgaggacaggctagggaagtctcagggagataaatgagctgcccacggtcaccagattagctgcagtgggccaatattggaaggagcaggtgtggttatgtgcatatcagataccctgcacatcagatatttacattaggactcataacagtagcaaaatcacagttacaaagtagcaatggaaataattttatggttggggtcacctcagcatgaggaactaactgtactaaagggtcatggcaccaccaagctagaacctctcagttgctgctgtagcctgggattctgagcacacctgtgtttgcagtcttgggacgccatcttttcctcggttgattctttatcacagactgtcatttgttttccaggcaagaactgtcaaacagtgttggctccctgttccccaaacccgtgtgagaatgctgctgtttgtaaagaggcacccaattttgagagcttcagctgcttgtgtgctcctggctggcaaggtaatgatgctggatgcatcctgcactttaaacaaagccatcggccctcagatgacatgggagaccatgctgacacctgtaatctctgtagggagcgactagctggaagggctcataacaccttctcagattccatctttatagtcctcaagtagctgagaccctccaacccaagtgtttcaagctgtgagtagcagttgggaggagtttccgaaggacctcctgcatcggaccaatcaggtggcctcctgcaccaaaacaccctaagctcacagtggactgaaactcacacccacctaagcttacaccctgccttgatttctatgggaattttcttccaaggactggctgttcattctcctgtcttcataggtaaacgatgtacagttgacgttgatgagtgtatctccaagccgtgtatgaacaatggtgtctgccacaacactcagggcagctacgtgtgtgagtgtcctcccggcttcagtgggatggactgtgaagaggacatcaatgattgccttgccagtgagtacacctgccctcagggtcccagagagagagggccacgttccctacactgacatcgatgtcccacactccaggatctttaagtcttccttctgaagctactgtctttagaaatcaaaatagtagaatctgtcttgagcatctctctacagcatcttaaatgctgacaaactacggacagtgctgtggtagctttgtgagaacatagatttttgaaaggcagtaaacagacaaaagctacaagtattttaatacctggtagaattcatccaattttggcaaaatgatagagaaaaccatcaaccatcatgaatgttcctctaaaagtcgcttcgtagctttacctgttctacttccttgtctcacgccagcacagaccagcctctgccaccatagataaattaatactttatatagatgcatctatataggcatgctcttgtcagtaatatttcaggctggttcatgtccatatcaccactagggtcttccgtcttattgctgagtggtctccactctggttgtgcacattgagcatgctcagccctgaaggacactcacccgttccaggccttttggttttagagtattcacatcttagggatgtgacccaagtgggagcatgaggtgtgttcatgctttcatatgtaccgtgcatgagtaggccgaaggtaacttgatgcaattctttcaatgcatctgaatgctgactgtgcaatgaattttagttgttcttgtgacatggtgctgaccctcatagggtttcagactttggagagctttgcattttagacttttggattattttgacctgtgctattgttacttgtttgcttttccagtttttaggcattatagataaaaatgttatgataggagtttgccttctcttccttcttaaagatattgtgcataatgggtgtatactcctcccaaacagcaagaaatggactctttatcatcgtcatcatcatcattgccaagttttaaatcttttttaagatttactctttttgagtcttaacttttgactattttagtttggtttggattgagctttggtgaaatgtgtttcagagattccatctgtcttagttaagtttctagtgctctgatgaacactgtgactgaaagtgatgtgggagagaaggattcatttcatcgtactactatagtcgttactgtggaagtcagggcaggaacctggaggcaggagctgatgcagaggccatggaggggtgctgcttactggcttgctccccatggcttgctcagtcttccttccttccttccttccttccttccttccttccttccttccttccttccttccttccttccttccttctcataatggaaatccttatcccacattattttttattattattttattgatagattgtgagtttcacatcatgtactccaaccctgcttctctccatcccttcatattcaccccattacccttgcaacctccttcctaaaataaaacacacacacacacaaatgaaaaaccaaggcatagaaaacatctccttgtggaaaccgtagtgtgtcacagtgtgtcccacagtatacccacccctttgtccacacgtctttacttgcaaatgttcattacagtcagtcattggtctggtttgaggcctccagcttctgtgacatcaataatattgtatcctcgcctggacttctcctggttaacctgttgttgcgcagggtcatggaggtcctgcagctttggttcaacagaactggccccttttttgtgtccctgcgattcacagatgatatagattttgttgtaggccaactcaggccctggatctgggcctgggtggtagctgagctggttagcctacaggctctcccttatcctcatcactggggcgagctcttcagcactactttggctgggccacctatgtctctatctgcaggaggcagggtcacctctcctgcactgaactcagctcctttgtgcttcctaggcaaggtgcagggtgcgctcccctaaatgctgtagccactgagggggcagggctagctctcctgctctctcccatgccctcctgccagctcactctgcgagctctcctgactaactaactgcaggtggctgggaggtaaggaggcagggtatcacactcacacccacaccctagggggctggctcacctgctttaccaccaccagggtcagatctgctgtttagcctgctttctcatagaatccaggatccccagtaggctggggtcctcccatgttaatcattaataaagaaaacgccaacacagacttgcctacaggaaaatctgataatggcgttttctccagtgactgtggtttgtgttgagtcgaccgaacaaaacatgaaaacaagaaaaacatgcatggcacattacctaactgacttattttcaattttttggcacaggttcattaataataagtcttattttaccctgaatagctatgagatgtatgctaattttccctcttggatctggtagggaccatttcttccttctctcttggagaagaatctgggtagaattcagtccctcattctcagggctcagcctgccctgggagtccctgtgcagccggtgctggcctcgaacttatggcagttttcccgccatttaaatgctgggcttacagtgtgaagcaccaaggctgactcttttcttcttgaacatgttttggagtgtgttaaatggctctctgataaagcagagcgcacttgacctttcaattcactgcttaaattttcatttcatatttgtgatggtttctgccactataacttaacactctgaatgccagcagcaatgtcacggttttcttgatttagcccctttgtcattagattgtgtgaggccctgctgtgattataactcaggacctgttgacatttctccgactgaagcaatttacaaaaaaaagaaagtaagagagaagtacaggaaagtcgattgatttatgcagtgttcttggaacagactgagtttataacctgacccctcagcctccacaaacatgttttgaaaatacttaccaatattcccaatattgtatgtgttaggccacataattgatttacgtatacgtggaggatcaatggaagttttatgactattaatgttataaaatagtgttaatatagattagattggtcttgattttcaaacagataaaaaatctcaggcaaacgataactgaattaattttcatgatagggttcatgtcaggataaatgaaaggggtcaaatgtgggggatggaatgcgcttcttaagggtgtggcttggcctgggtcatctgccttcacagtgctgctgtcctgagtcccacttcttttgtcctgtctcagacccctgccagaacggaggctcctgtgtggaccatgtgaataccttctcctgccagtgccatcctggcttcataggggacaagtgccagacagacatgaatgagtgtctgagcgagccctgtaagaatggggggacctgctccgactatgtcaacagttacacctgcacatgccctgcgggcttccacggagtccactgtgaaaacaacattgacgagtgcactgagaggtgagcagggtgggcctgggcaccagtagctcacaggacggggaggcaggggaggtaacatcacagcatatcacaatacaatgccaggattgtagggcaaggatgaaccgcacttgaggccctttctttccacagtcctctctcattgctcagtttttgaaagacatgtaattggaaggtcaaaggtcagaggttgaaaggctttagtgggatagactgaatagacagcatcgcttctttcttgccatggagcagaggagccctcagttctgttctgttgccctgtctctttgttccagctgtaagatttctctttctttgtagatctgttaccactgtctaagtagtttttagaaggtttgtttgatttctttttattattttagcaatgtgtttattccctttcataaagaaatctagagtgaaaagctatttaggacttttcctgtaaggctgattgatttaatgataaaataatgttatggaaaacaactctcttcaggattctaggcagatctgtctttcaaatgctcctaagatggatattgggaaggaagttgatactgcaatctctgacctccagtctagtttagaagactttaaaacttactgggcacaggcattggagtctcagaggtgtttgtccagttaaatcctctatttctctgctttttttttttaagatctatttattttatgtatatgagtacactatagctattagcagacacaccagaagagggcatcggatcccattacagatggttgtgagccaccatgtgattgctgggaattgaattcagaaactctggaagaggtcagtcagtgttcttaaccgctgaatcatctctccagccccgacatcctacatttcagcagccagactttacagtagcagctcagggcctcagctcacacagctgatgttgtctctcatttgctcctcagctcctgcttcaatggcggcacgtgtgttgatggaatcaactctttctcttgcttgtgccccgtgggtttcactggtcccttctgcctccatgatatcaatgagtgcagctctaacccgtgcctgaatgctggaacgtgtgttgatggtctgggtacctaccgatgcatctgtcccttgggctacaccgggaaaaactgtcaggtaatcagcctccctcccgttcacccgctcacctggctccccacagtagccgaggactctgtctagtttccaggtggggtgaaccatttgagaagagagaacagcatctcaggtggtccctgaggtggctgggtcaccttcttgatagctagaagagtccagactggtgacaccagcaatgccatatgggctaacaagcttctgtggaaactgtgactgacagtgagcacgtacacaccttcacagtgcatatgcaggaagaatggatgtgagcttttcattgctaacctaaaaaacaaaacaacagcaacttaataggaggttggtttgggtttgtggttttagagattttaggcttcactggcttcttttgtttatggacctgagacaagagtaagtgtcattgggacagagccggtgtagaactcttcatggtggcctgaagcagagagggacaggagaagaggagggggagggaagggaaaagacaaaggaagagagggagagaggaggcaggacagacagatgaggtagggaaagccaagaacgagatgtagctcccccagacatgtacccagtgagccctgtttccagctggcatttcctctagttctcagaattgttcagaagtaataccatctttgagaactaaaccactagtgcacgagcctctgaggacatttcatattcaaacacaggacagaacaatcgaagtcaaatcagtaaataccagggagagccaccagggtactgctttacagtgttataacatagccatcaccaaactgtgtattcttaaaactcaaatatagaaatatgaatctgttataatcttaggatggaagaagccatcataggaaactgactttcaattcatggaggagaaacagcctccaccttgtccccagaaaggatagtttttaaactatccaaggtcacatacaaattgtaatttgtgccgctttacatcttctgtaagagtgacggaactcagagctcatgaatacgagactaattagagaccacattggatgacactggacccagaagcagccaccccagccccgctccccacatgaagcagcttggtcttgccccatcctccactgaccatctctcagccagcagcagtctgtgtcaggaaggcaggcccctctctgcctcatgttatttgtgatcctggagttgaaaatacggttgtggaccgtttaggcttttgagttggatcatttcacccatctccccccataggcaggagcggtcaaggcatatgtggtcctgcggggttaacataggaagcatgggcccaggcagcagctatagctcttgccagccttgcaaggaggccacatatgctcacatagtcatgactaatgctctggggataacagcttactgagcctctagagtggttaggttcctgaggtaagggcttttaaaatgacactggccagacaaacgaggctataaagtgacagagtgtgtctaggacagggtgcccagtgaaggcttctgtgaaggcgtccctttctttctaaaaccagtcctttcctttgacatctcgtgacacactgtaacttagagacttcatttatggcatctgggttttgatgcatgtacacccttgcctccgcttcagaccctggtgaacctctgcagccggtctccgtgtaaaaacaaaggaacttgtgttcaggaaaaggcaaggccccactgtctgtgtccgcctggatgggatggtgcatactgtgatgtgctcaacgtgtcctgtaaggcggcagccttgcagaaaggtgagctctgccccaagcatcaggtactgacatataggccatcatcttagggcacagtactgaaaggacaagggtctgaagaaaggctagaggaacatttagagatcccaaagagaaaggtggttgaaatgaagaactagacacagatgaagcaaaccctagagcagccaccagccaggctcacttgcttttgggttgaacctgccgtgggccgcactctctgatgcttctctctccacctggtgcccaggagtacctgttgaacacttgtgccagcactcgggcatctgtatcaatgctggcaacacccatcactgccagtgccccctgggctacacggggagctactgcgaggagcagcttgatgagtgtgcatccaatccatgccagcacggtgccacctgcaatgacttcatcggaggatacagatgtgaggtgaggagatggcttagcccagagggctccaatgacgtagtgccggtgttaaaaacactggctactgagttcatccgtctgtgtcctacagagtatgaatgtctactcgtccttatcatagtgtttgcagccagcatttttattttcagccatgctttcccatagctctggtaagatgtcttcatagagtctggaccatccctccttaactggcttgctctttgtgttggcatcctgcaggctcacctagtacagtagtccccttgcttcctgaagagcaacacagttcatcagccaatgagtaattctctcacaccaaaaaaaaaaaataaaataaaagtgtggtctcacctgctatgccacagcaccatgctcagggttactgtaatgtttaagaatgtgtcttttgctggatggtggtggcgcacacctttaatcccagcacttgggaggcagaggcaggcggatttctgagttcgaggccagcctgatctacaaagtaagtgccaggacagccagggctacacagaaaaaccctgtctggaaaaaaaccaaaaaaaaaaaaaaaaaaaaaaaagaatgtgtcttttttcagcgtctgggctgatagatgttagagccagtgttagacaaacaccagaatgggaacccgaaacccaccagaccaccgagcaacaacagaaggcttctctcctgctgcctccgttgtttatctccgagcaggccactctcggagcaggtcgcagtctgttagttcaaaagcctgccgctgctgaactcaaacttctccacagctgactttttttaatagccaaaatgagcagaattatagccatttaatatcgcttgcctcatgtggcctgcaaagagacacacagtgagtgtatcctaggtagtcaactctggaggccaaggagcctaaactcccccgggagctccctcaccgtaagactggtgttgctgggtcactgaatgtcaccacacacagttttaagctatggtatcccctctttcaaagtttgcttctcctcttactctgtcgtcttgtgctgtgagggacttcctctgcaggcactgttggggtagcagtgtctaaatgaaacttcccccacagttgtctgtttccttatcaagacttgtttcttccaattcctccattgcccaccaccctccattnnnnnnnnnnnnnnnnnnnntatctccccccaccttccattgcccactaaccctccattgccccccaccctctatctccccccaccttccattgtccaccaccctccatagtctccccctgccctccgtcgcccactgccttcagcctcattgtccattcacacaatcctgcaatgggcacagcctctttactcctgcatgcacgtgcggcttgagccttaggctacacatcatgtgtgaaggggtgcgcactacatggatgaggaaatccttacctggaagttttgcttgggggatgccatgaaaatgaccctcagaacatacagtcctcactttcctttaaagtggctttggggggcgaaggggctagaagaggaataggtaaccgtgaccctgcaccaggaagcagcagagaatgcagtggttatagaggggcggatacacagttgcttagtgggatggaagcaaagtcatggtaacctgacctctcgcttggccctgtggtcggtctgcagcagtgacccctttctccgtgtccttctatcctgacagtgtgttccaggatatcagggtgtcaactgtgagtatgaagtggacgagtgccagaaccaaccctgccagaatggaggcacctgcatcgaccttgtgaaccatttcaagtgttcgtgtcccccaggcacccggggtatgcagtcttcagtcttcgttactctttccaccagggacattccctctaggcatacattcttagtgctgaagcaacttttaaaatctgagacaatttaaagaagactagcttcattggagccacttactcagttatctgctctcactctgatctcctgccagcttccattcaggtttggttgtttcttagcttatgttcaggaaaacagaatgcagaatgaacataaccctagataaccaggtttttttggtgcttcaagtgaaatcaactgtcaaccttttaaaggaagcgaatccacataggcctgctttttaattgtttaagctagccaagtctgtccatagaacgagggaatctatgagatgtgtttggctgctgtcctgggaggcagcagacaggaggctgtgctcctgcacctgcacctactacacccctggactgtggaccacagagcatcagtgtgctctgggaattgccacttgctccagactgcctcctggagagagcattgcttgctaacattgcttgttagggacatctggtgctgaaggaaatgcgtagcctgtgagcaacatggcaaagatagcagtcgtgcgtttaggcagcaatcaaacagaggagaccctcatagctggctttgtgtttacgtagacttttgtgccagtgcatttgaataccttctttttcctagagatcaaatttggctaaattgaggcagaagaatactccattaataggtatgtaatacagaatgagtcttagggaagggaaagctgaagactagcctacaactaactgttttaaaattcattacatggtttctagtctagaaataggaaattccatggtgcaaagttccaggtgcttactagtgtattcctttgtatttacccatccatctacctgtccgtccatccgtctatccatccatctatccatctacctgtccgtccgtccatccttccatccattcatctatccatccatccatccatccatccatccatccatccatccatccatccatcttttgtgacagggcatttttgagtagtaaagctaaatgcataaggtaagaagcaaattgattctctgtcttctcctttgggaggttcatagccatccccacccccatctgatctccccttctctcccccaccccatctctctttgtctccctctgtcttctactctctccctcttcccctctccctttctacatcccccactccatctctctccttctctctttctccagtccctagtcccatctccctcttttcctctctatcttttcccatccctcctcctttctcccctcagtccctctccctatctcttcctcccctttccctcccccctcttgttcccgctctcttcccttctcccctatgtcttctcctctctttcatccctcttctctcttcttacctcttcccctcctctctttctgttcccagaattccaagtagcctcagcctcaaattcactataggcatgtactaccatgcccgagtggttaatgcctttaaataatggtattggttagaacaagctacaattctagtggtagctaattatatatatcaagtctcagatagcacaatagtggttttgttggggttttttgtttgctgttttggcactcagacttgcacaggtgttgggttgctgcctttctttctctgtgctttggggctgcaggctccaaggcagccacagcaaaggtggagaaactgcataggggctgtgcaggggcttttannnnnnnnnnnnnnnnnnnnnnnnnnnnnnnnnnnnnnnnnnnnnnnnnnnnnnnnnnnnnnnnnnnnnnnnnnnnnnnnnnnnnnnnnnnnnnnnnnnnnnnnnnnnnnnnnnnnnnnnnnnnnnnnnnnnnnnnnnnnnnnnnnnnnnnnnnnnnnnnnnnnnnnnnnnnnnnnnnnnnnnnnnnnnnnnnnnnnnnnnnnnnnnnnnnnnnnnnnnnnnnnnnnnnnnnnnnnnnnnnnnnnnnnnnnnnnnnnacacacatcacgctcccagaggtgtgtcagaaccactcattactgttcttccaaggcctgtggaggctgagaacccaggaaagggcatgcgtttgtactgtaccacagactaccacatagacatagatgcatccagtcccagagtggaacatctcctaagccaatgagatttttgtcttttctcaatcaatcaatcaatcaatcaatcaatcaactgatcaatcaatctctttttctctccccctccttctcgtctatttcctcctcttcctcctccttctttttctttgtttttgttgttgttgtattgagacagagtttctctgtatatccctggcttttctggatcttgttctatagaccaggctggccttgaactcagggatctgcctgcctcttcctcctgagtgctgggattaaagccttgtgccactgcttggctcctaaatacttctttgtggtagcttagaataataatctagtatatctattgatctgttgactgtttctgagccagctcctcagatgtgtcttctcgctgatgttcctgccgtggtcttcaccgagaacttagcagttagtcttactgatggtctctcacgatacctggctctcctttgcagtgtttccaagattgccttttaatggtctgttatagtgtggttctcttccagtgtggtctgtttgaatgtttgttggattatatcctgtgtgctgatctttccaggtgcctgacatagtgtatatttgttctgacttttcctctctggccatccaccctgtccacctgtgactgctcccagcgactctggagttctcttacagtacagtgagttattccagtgcttgttctcagcactgtactcccaggccttggatgttgcctgcgcatacctcctgctcccagtgcataggctaacctagaacacttctgtcatcctgtgtttgcttcaggctaagaatgaggtcacgctcacatgataagctgtgcatcactgatagttccgtctacatggaagctttatgcttattttactcctcatgccaaacaccaagtatcctgtgagactgggagcacgtcctggctttgtttgcttccactttctggttcccattttaatctaatctgtgagtagataaggtgatatgtgcatgtggacagggtaaacatgtccacatatgcatggaaagacatgcagtaaagacacactccccactgtactcacccccagcaccgcgccctccctctcccctcacactgcagacagcctcttgtgtgtttctagaggagttaaaaggctatctttcagaattgcattatgtatgtaggagccaaattcaaagatagttttaccccctccatttttaactctaaagatgtatcaaagatgctgtttttctcttgacctttttacttaattggaatattttcatatcaaaatagggaacttcttcagtattttctcatagcttcagaattcccctttatgacaacattatgtattgtgcttaactggtcctctagtgatagacattggtgtttttttttttaaaggacacatataagtgcacgttacagaatgtgttttcagaaatagagtctgctgggccactataccgaggttaagtgtcatttaagtggcaatgctggctgcatcctctctatgtaattcatcatctagcatatttacaagttcctgttttcccactgggatttatcccttcctcctttctgtagatgctgtctgtccttactatgtgcagaagttgtttgtctttgctgtgtgatgtggatattttcctgatgtactggggttgcaatctttcagacgtcttattctgaggtcggaatctttcagatgtctctggggattttttacatgcagattatttctaatcatattgaatttatccatcttttttatggctgcttgcatctgagtggtagttgattttatcctccatgcttcaagatttataaagacattcttctgtgtttttatcctggactagaatcctgaagtggctttcccatgtgactggatggttgatgttttctacaatgacttgagatggaactttgatcaaattctaagctccggtgtgcatttgggctgttgttctgtccgtcgattcacaacaaacttttaaccatgaaggactctttttcatgctctcctggctgtgatttggtttttctatatcattttttagtcagtttgccattaaaaagtattgctgatatctttttgagatcatattaccttcatatataatacagtgagcatgccttttcatggagtcgcataatcagataatgtatgtcttccatctgtccacgtctcctctgtctgtccttcagagcacttgcctgcaaggccacacagcttgctctgatgctctcagccatttgccttttgacactgctgctgacagtgaggtacatctgtgtctccttccctttttatgtcttgcttctcttaaagtataccaaagtgctatagaagtatcttcatttttaaccttttcaaattaccttgtggagtagtcattgattttgttgtttctaaacgtgttcacagatattttaactagatggctcctagatcttcagtgtgttacttagccagaataatcttcaaattcttagcaagatatttccactctgttgttgtcttaaataaaagatattagtgtacctatcctcttttaaagaaaaaaaaagtcagtgtttataaaacataaaatactattgcccaaaatctaaccccagcatagcctatgtagtgattagatgtgctccctgttgaactgtttcacagtttgatgggagttgataaggggtggaaaactcccacagtctcctgagctttgactcccgtgtgcttgcgatggcgcagttgtccctgctgctctggattgggtgaaacacaagtggagcctcagggtgcaacttcctctcctgttgctccccgggaagcagctgcacgagctgcatgcagctggcatgggctaagaatattttttgccttgcccaatttaaaagctcccactgtagattaaggattatactcaaattaatctctaaagcccacaagggcatttatcccttgctaatggcgggttcagtggatttttgtaattctgtctttcttctctcataggcctgctgtgtgaagagaacatcgatgaatgtgctgggggcccccactgccttaacggtggccagtgcgtggaccggattggaggctacacttgtcgctgtttgcctggctttgctggggagcggtgtgagggggacatcaacgaatgcctgtccaacccttgcagctcagagggcagcctggactgcgttcagctcaaaaataactacaactgtatctgccgcagcgccttcacgggtgagaacctctcagcccttgctagtctgatgtgcaggagtcttgagtaagcaaaccatgatctctatggaaatgtctgacctcctgcagcaagccaagaccagcttagggcaaggacgcagggcccaggtttccttaagtctttataccatgggcatcataactaggctcatctttacctttgcttttctgagagactcttttgtggtatatggattatatcatgcttggcaagaatatgaaaaataatctgttggggtacagggcaaaattaacatttttcaattgagataaattaaacaagacataaaatctgccatctttatcatattaagcttgttgtgcaataactttcagcactgcagtgaccacagtagcattcagcacacccccactgcagtgactgcagtagcattcagcacacccacactgcaatgatgcagtagcattcagcacacccccactgcagtgactgcagtagcattcagcacactcacactgcaatgatgcagtagcattcagcacacccccactgcagtgactgcagtagcattcagcacacccacactgcagtgactgcagtagcattcagcacacccccactgcagtgactgcagtagcattcagctcacccccactgcagtgaccgcagtagcattcagcacacccccactgcagtgaccgcagtagcattcagcacacccccactgcaatgatgcagtagcattcagcacacccacactgagtactacagagatcactgtatactctcaaacttttatgtgacaatacaagggctggcaagatggctcagtcaataagagcactgactgctcctgaggtcctgagttcaaatcccagcaaccacatggtggctcacaaccacatgtaatgggatctgacgccctcttctggtgtttctgaagacagctaccatgtacttggatatattaataaatctttgggcctcagtgagcagggactgagtgagcgggccaaccagagtgagcgaggttaactggagcgagcagaggtcctaaattcaattcccaacaaccacatgaaggctcacaactgtctgtacagctacagtgtgcttatatacatttataaaataaatatataaatcttaaagagagaaagagaaagaaacaaagaaaaagaaaatacaagacgtttatcttcaggagccgtatatctgagtctgggtggacccactaccctgcaccttttgacactctgtgctgagttactttgctgtgtctgtgcctgtcatctttctaactctgggaggcctgttaaaagatcaggtccaaaaagcagccgatgcgaaccccagggaagctgcagtaagcatggtcctcctgcatgactaaggcttggctgtgcgccgagcctgctcttcatagatggcgtgaagagagcaagcgctgcctcggaacaggagctctgtaggccacctagtcacttatggtgacatttggagctaaagtagttgcccgtacagagatgtgtcatggtcataggctttgaaatctgtcttgtgctttctggaacctgcttggacttcttatgctgggtgtgtcctcacattctagaagcctgggaacagcacagtcctctaactaactggtaatttccagtgtggatgctggtccatgctgagcccctgtccagcctgcatgccttccgtctcttttctctcccaccccccaccccttccttcttttcagtctgaaatacatgccacccttaaaatgcttggaattctacagagaatggatgggatttcacagtgtgaaagctgcctcagtgcagtaactcccaacaagaaactgttctttccagctgttatagacgctggggcagtgtgggctctgaggatgctcatatgtcaaacgctgaccagaacttaaaaaaggagaaaaaggcagaggggcaggacagggcgaggcaaggtgtggggacacctgagtgagtttcccaaagtcaggaaatgctgtctgctcgtgcccatgttggaagtggtccactgagctgtgctctgagatgtcccctctaatggtcagcgggggctcttgatgctgctgtccccatcagccgtttcaccttagtgtctgcctctgtgatctgagacatttcatattcttgtttctcaattctgaatggcaaaagcattgcactttaaagcttttgttagtttaaatcttcaaatggccacagggcagatgggaccctttttctacgatttgtcaagagaccccagcagagccccacattccctctgtgattccaagcacctgtccagtgtatcagggagaagcagccagcaggtgtcctctgccttagagctgggtttagagtagatgagctctgggcaaagtcagatgtattgtaaagcaatttggccagagtagctaagacaagatgaaaattctctccaaaattctctccaaactatcagtcccggttgggtgcatgctttggcctaatgttgctgcttctgtgaggtagctgaacaaaatgctaacaatagtcttcaacttaaaaacaagacgcgtactaaagctgaggtgtaacctccctttgcctgagaggatttaggttttttttttttttttttttttggtgttttgttttgttttgttttgttttgttttgttttgttttgttttgttttctgagacagggtttctctttgtagccctggctgtcctggaactcactctgtagaccaggctgacctcgagctcagaaatccacctgcctctgtctcccaagtgctgggattaaaggcttgtgccaccactgcccggctagtttttgtttttattggagtttgtttcacttttctgcctgtcactttgggggtcaggctgggatagatagttcttgtgtgcttgctgtcttagcaagacacttgagggactcgtctgagtagagatgggccctttgtgttgaggtccacagagtgtcctctcgctatcctgtaggcttagaactgccctgccctgccctgcctcttgctgcctctgaggctgcttcctatcccttagggtagtgtttagtgtctctgagttaatagttataccttgtaaatctgctgttcatgttctctcctaaggccggcactgtgaaaccttcctagatgtgtgtccccagaagccttgcctgaacggagggacttgtgccgtggctagcaacatgcccgatggcttcatctgtcgttgtcccccagtaagtggcctgctgctgacataagggatgcaccgccttccatatgctctagggagctgagattgagcctgtgttttcgtgcccccagaaggatgctaaggtgttagtgtcttgaaggtggtctgggtcttccctggctctagttgttccgctgcgctcagcaactaagcttcccagtgaagcctgtcagccttcagagcattaagtgggaaccacaagtggtctgctgtccccctgaaatggggccagcgcccttggcttcccagcctagccctggtgctgtggcatggcggcctccctgccccgctaggtgagcgccattctgctgctcctgtcctttagcagtggccattggcaagtaagcgcttctcaaacgagaaggaagcttgatgcagtttttgctgtgcagaggcctttgccagtgccaaaggccagaagtcccctcacacagagagtgccatgtagggcgatactcagaggacacctgtctagttaggaccttaaagtgacagcctgccacattcatcccgtgagccatcagccctcacctgttgactgatctgaagaggttatttctagaacactggtgaatattacccgtgggcaagctcttaagcccttctgccatcctcatttccttgccgtgtcatacaggggttctctggggcgagatgccagagcagctgtggacaagtgaagtgcaggagaggggagcagtgtatccacactgactcgggacctcgctgcttctgcctgaaccccaaggactgcgagtcaggatgtgccagtaacccctgccagcatgggggcacctgctatcctcagcgccagcctcctcactattcctgccgctgccctccgtcgttcgggggcagccactgcgaactctacacagcccccaccagcacccctcctgctacctgtcagagtcagtactgcgccgacaaggctcgggatggcatctgtgacgaggcctgcaatagtcatgcctgccagtgggatggaggtgactgttccctcactatggaggacccctgggccaactgcacctccactcttcgctgctgggaatacatcaacaaccagtgtgatgagcagtgcaacaccgcagagtgcctgtttgacaactttgagtgccagaggaatagcaagacgtgcaagtaagagccccgggcctcagaggccgaggggggctgtcactaacacactcagtctcctgttcttgctcctaactgctcgggtgcttcggcccaagccgcctctgcctttcagatggtgccagccttgtcccggtgcacgctgccccttgctgacagagggctgggactgctcactgcataacatcccctctctctgcctatctctgccttctcacatgctgctcttgcgaccgtgggggaaataatcttggaagtggcgttgccactctcaggcagcctccagcctagcctgctgcaggatggatggaaaggtctgtaccactgtctccctgctcatttctttccttaagactagctttcccatctagttaagaagcgtgaacttagggtgagctcgggcctcttggctctctctccttgtcgtcagtgttgtagacagagtccttgtggacgttcctattaactattgcacttcaccccaagagagtctcagcagctctgtgagcttaggtgttgttagtgatcttccctggaaggtaaagaacttgccacgaacatacacagctgttggagttgcctggttttagtcaagcagatggcaagaaaagccctccaaataacaaaggtctggggtggcagaaggaggaggagagagaatcagtcatgcctcagggggacctttgcagttctcattcttttgcctgacatgttagtggtagttgtgtatatacacaacactgtgtgtgtgtgtgggtgtgggtgtgggtgtgagtgggtgtgtgttgtgaggcagggttccatacagcagaagctggccctaaactcctgagtctagaacttctgatcatcctcctgccttcccaagtgctgacgttataggcatgcaccaccacacccagatttttcttagcatttgaaagagagtaaatgagctagatctcacaccctgtatgaacatctctctgccccttaccttctgtaattgtcttactccagaaagagaaagaaacagacagttttggcacactcttctgaatagcacttagatagttggaggtctgggacaagcttggactccttctgtttctagaaccctttgctctgactgagtcagtggggagagggaagtgtgagccacattgactttggcttcagatatgcattcttatacaaaattctgcccttgtagtatgattagttcagtgggacctactaaacacatgcaggatgatgggtataacaatattccccattccagggataacgtcgagtgccatagctgtatagcccatggtgttggagtgcatgatttatgggaagtttctctagacattgatgtgctgaaaatgagccagaaaagatgggtaggaaagtgctcggtcattctgagtggaagccgaggctgcagtgtgttctgatgccctcctcctctctcctgactaggtatgacaaatactgtgcagaccacttcaaagacaaccactgtgatcagggatgcaacagcgaggagtgtggctgggatgggctggactgcgcttcggaccagcctgagaacctggcagagggcaccctgatcatcgtggtgctcctgccccctgaacagctgctgcaggattcgcgaagcttcttgagggccctgggcaccctgctccacaccaacttgcgcattaaacaagattctcagggcgctctcatggtgtacccctactttggggagaagtcagctgccatgaagaagcagaagatgacacgcaggtctcttcctgaggagcaggagcaggagcaggaggtgatagggtaggtttgtgtttctggacttagaagttcccaaaggaccagcatttccaggccagttcatacagctgggcactttgatccctagtacagatactcagcccatccaaatgaaaagctcaagtagagtacccctcatttaaaacacacatcttggcctcttaaatctaaggatacagatctgccttgactgaggggtcctaaagatcagctaagcaagaaagatgcaggtatgagaaaggactcctcagatctgagattcgtaatgtttctccagagttgccgagaaccacattcataatgtgtcttttgggttcattattgcctcattttcaaggccccccttcacgcctgtgcttgacccgagcagtaatcctcagtgggtgggcctgtcgttcacgccccactgtgtgttgatgctctgtaactttcagccttttccttgctgagatatgagtgtagacacataggagaacaagggggcaccaatctgcgctgagcaggcggggctgggggagcactaggaccgcttccccagttacttgttatgtgtcacccagccaggggcttatgtcagctggacatgagccctcccaggcaggagtccatgttcagcatctgaagcatcctgctttctgagttctttctcccgaaggtggaaagcttgatgctgaaggaggggagggtggaccacgtgagcctttctgaccgagcctgccagacctgacccttcgtttcttccccccattctccctctaagctctaagatatttctggagatcgacaaccgacagtgtgttcaagattcagaccagtgcttcaaaaacacagatgcggcagctgctctcctggcttctcatgccatccaagggaccctatcctaccctctagtgtctgttttcagtgagtggcattagtgctggagtggggctgggaagggccttcactggggctcacccttctggtaggaagaggttgctgtttctacatcactgtccctatgtctgaactctcaggtgaactggagagtccaagaaacgcccagcttctctatctgctcgcggtcgctgttgtcatcatcctgttcttcatcctgctgggggtcatcatggccaagcggaagcgcaagcatggcttcctctggctgccggaagggttcaccctccgccgagactctagcaatcacaagcgccgtgaacctgtgggacaggatgccgtggggctgaagtaagagggctttacaataagacacagttcacagggagaagcagagatgagcagatgggcatattactgaatcataatctcaaattctaaattcacctttagtcaccttgaccacagctcctaatggcttgtctaggtctttgagtatggccgcctctttctgtgcacacctgacgaagtgccgctcaatgtttgagtgggagaacactcaaaagacatggtcttttagtgagaagagaaagaatgagtgctcagaagtgtcacatctcacattgcccatcagagttggtgtggtggccctgtaggtgaaagtgcccccgccacgtctgctgacctgagtgtgatccccagtgcccataagctagaaggacggaagtgacttcctcatgttgtgctgtgagtgtgtaatataattagagggctggagggatacttcagtagtcaagaaaggaactgacctgggttcagtgcccagcacccatgctgggcagcttacagcccctgtgattccagctgccacgggatctgtagacacctgaactcacatgctcagatacacacagacatagacacttaattttgaaaaatgttaatataattttgaaaaagtgctgtgcatcctatcccgttggacagagtgagaggatgtgtgggagtgctggtgaagtgcagaaagctactgcgtttgcccagctgtaacctctcctcttgtttctcccctgaatatcatcagaaatctctccgtgcaagtgtcagaggctaacctgattggttctgggacaagtgaacattgggttgatgatgaaggaccccagccaaagaaagccaaggtaagctgtcttaggaagccatgttactagcagtcatgtgaccacattctcagtgtgtgtctttcctggagccccatcatcggcaggggcccgtagagcacagtctttgtggctcatgtatgttcttcaggaagaccttttaaatagtaaagccagcctgccttctggctcaagtgtcacacttgtgtttactgagtcaggactggtggtgtagatgctcacagttccatttatgggtgcttctctgatacttctataagaggagatggagttatcccgtgaagaaagccaagaccattaacttctggggaggtcactgagcatgatggtcaagaatgttgctttaaaccaccattctagaggctgtgtcaagggaatccaagtttaaggccaacctgagctacctctaaaaccaaataaaataaacaaatgaaaacatatacagataacattgtacaaactgagcaggttgtatttagggatatataagcatttaacaacaactgataataaaagaaacctggatttgaaggagagcaaagaggggtatatgggaggacttggagagaggaaagagaagggagaaatggtgtaattataatctccaaaaaaatggaagtggtaaaagcaacaggaagcattgctctagtcaggctacttgattgcagctactttgtatttaaattaaacctttgtatttaatattccttgcctataagatagcaataataataacaacagtgatagctcttttctcgctgagttgccagagtacctctggcctatctgctttcacagatagagtcaagtaaagggcagatgctgatctctcgtcctctccgcggtgctcccctgagcactgtcccacagagtttattccccttctcaagaaccttccagttgaaagagaaatagtgtgtgccttctctcatgtgcagagtctgtatttaactatggagacggacaggacagagacagtacacacaaggggctgttaggatggaggacaggaaaggggtgtgaggtgaatgtaccagcaaggtacaatgatttgtaaaaacccattgtttggggctggagagatggctcagcagttaacagcactgactgctcttccagaggtcctgagttcaattcccagcaaccacatggtggtccacaaccatctgtaatgggatctgatgccctcttctggtgtgtctgaagacaactacagtgtacttaagatgaatagatgaatgaatgaatgaatgaatgaatgaatcttttttaaaaaacaccattgttttgcatactaaactctttgaaaggaaggaaggaaggaaggaaggaaaggggaagggaaagggaaagggaaaggggaaaggggaaaggggaaaggggaaaggaaaggaaaggaaaggaaaggaaaggaaaggaaaggaaaagaagctagcaaccatggttgacaggtgatgcagtgccaggtagcacataccacacggtcagctgagaagagagaaaccacttattaaagtcaacaagattaaaatttcatttgaagagcaaataggagtcagccaaacaaggtggaggggaccatcacaggcaggttagaagagatgggaggagaccctgccattcctcagccttgtctgcagctcctggagggctcaggttaatgaggggaacctttcttccctctccaggctgaggatgaggctttgctgtcggaagatgaccccatcgatcgacggccctggacacagcagcaccttgaagctgcagacatccgccacactccatccctggcactcactcctcctcaggcagaacaggaggtggacgtgctggacgtgaatgtccgaggcccaggtcagtagcggtccctgccctccatggttctggctggtcggtgagcgtttctccccctggccagctgcccctgccaattgcagacctcgaggaagctcgagggaatgaatatgtgagaaacattgtcatgcggaaattatgaacctgggacaatgacactggtggctcatgggtaaaagtatttaccatgaaagcctgaccacctgagttcaagcctcagcgtccatgtcaaagttggacagagtcgtcctctggcctccacatacgtgttatggacatgcacacgcacgcacatgtgctcatacataccataccagtaatttatgtgctaaggcatatgtgcacatatcatatacatacaataagataaataaatatttaagtgattttaaattatgggctggagagatgctcagtggtaagagcacttgttgctcttacagaggacctgcacccacatggtgccttactacctcagtgccaggggctccaacaccattttctggcctgtatgagcactgtatgctcatggttcaaaaatacatgtaggcaaaacactcgtactcattaaataaatccttaagtttttttcaactgaaaatgcagatttcaaagaaaaggaaggattttgcagtgcttcatatacagcatactgagaaaattaaacaaattggattttagggggatagaaaaatagtatctgtcttagtcactggtctgatgttgtgaagagacactgtggcagagagagatagagagacagacagacagatagacagacagagacagactgggcctggcatgggattttgaaacctcaaaatgcatcccccagtgacacacttcctccaataagaaccacctcctaatccttctcaaatagtgtcgcttcctgttaactaagcattcaaatctacgagttggtgggggccattcttattcgaaccaccacagtatccgacagcagactgtggggaactactataattcctgtcttacaggcagattaaaatattgtctgtctagtttgagatgtcataattgcacttaaactcaagcagaaaagtttgtcagtttgaggaagagcctcagggcagaaggcagctgcttccctacactcttcacatagctggtgctgtcatgtaaaacctgtcatagttctacaagcacggagagtccacagcccacagcatgatggcggtcagcagaactgttcctgtaatgggttaatttgaatgtgtttgcaatattccctccctacagatgggtgtactccactgatgctggcttctctccgaggaggcagctcagacctgagtgatgaagacgaagatgctgaggactcttctgccaacatcatcacagacttggtctaccaaggtgccagccttcaagcacagacagaccgcactggcgagatggccctgcaccttgcagcccgctattcgagagctgatgctgccaaacgcctcctggatgctggtgcggatgcaaatgcccaggacaacatgggccgatgtcctcttcacgctgcggtggcagcagacgcccaaggtgtctttcaggtaaagagccaagagttggtttgaatctgaaagatgaggtggctcagtgggtaaggtgtatcgtggtaaatcaccatgtttacggcaacttataatagagcaagtctagtggagcctatgctttcagaagatcagagtccatcatggcagagtgagaacaccgggctgggggaaggtgtgggggctgtgggggccaggaacagctgagagctcacatcttgaaccacaaatgggaggcggagagctactgggagtggcacacattttatttcaaacctcaaagtacgtccctgtgacatacctcctccaacaaggccatacatctttcccaaatggccaccagtctaaatcaaatgcccaagacttaactggggacatctcattcaaaacaccacaggtgtttgccaccaatcccgagaacccaaggacctaggaccttcagcccctaggacccacatagtaaaaagagagaactgatccctgaaggttgttcccaaacctctgtgtgtgtaccattgcacagacatgcctgcacacgcacaaaataaaataactattacaggcctgtggtggttcagcttaactaacacacttacccgctcattgaattcattcagaacttctgaatgagtgttatgcgggacagaaaaggggggaaggccagctgacctactgtgagtagccagagaaaagggggaaggccagctgacctactgtgagtagccagagaatgattcagtcagcaacagggttctgaatctaatcagcaatattttgatgtgcagtgatgcctcgcagatggcggtcatatgggagtagtaaatgacccaactccttggattactgttaactctctggatagctctgcctgtctgtgggcccacggctcatccctgacatgagtgggcagtgtgttccttgatactcgtattttaacctgaagaggaaattggaaacattctagctgtatgcatgattgaagttgtgacacctgtacatacctttccctatatagtggttcattcacttattcagcaaatgcctaatgattagccattatagctcctagggcatagaatagcctgcctcccagggacacctcatttggagtgctcttatttcattctttttccttatctaagggacacttctctgcttctcttctagattctgatccgcaaccgtgtaaccgatctggatgccagaatgaacgatggtactacccccctgatcctggctgcccgcctggctgtggaaggaatggtggcagagttgatcaattgccaagcagatgtcaatgcagtggatgaccatggtagggacaaggacgtggctccatctgcagagagcgtctctaaacaagagacttgctacccttctgagaggactttctcagatctgaaactggagagtcccttgtccttccccatcatttgcacatccttcagtctgcggggctcagagactgaggtgataggagccccacattaagatgagagggggctttagttgtagtttttttcagtaagagggttcttggacctcaaagaatgttcttgaaaagtttgcctgtgggttcctagtcataatcactcttactgtgggagtggattcactgggggttatgagatatcctcaatatgtacttggtgtatagtagcatgtttgctatcttcagtttgtgaagcttgggcatgtggagggcatggatgtcccacaccagggatcctgttagctagaggctcccagcctgtgccaaaatattctgagaacacaaggaaaggaaaatacaagtgtgctttcctgtgggctctcttggcccctgacctcatgctgctctctggggagttcaaggtttcttgaaaaaaacaaaacaacagcacagcactttccttagtgtcttacttacaaaatgtttcccctgcaggaaaatctgccctccactgggcagctgctgtcaataatgtggaggcgactcttctgctgttgaagaatggggccaacagagatatgcaggacaataaggtacagctcttagctcagagcctgagtatgctcacagcagtgtctctctcacttaggaggacaaatggggaagcttgtgcgggagctgggtccagagagcctgagggagggaggatgcaggccttgttgggaggcagcccctggttgtccggtgctcactgcactgccctgggaatcacttggcgcactccttcctgcctttttccttcagcagtctgtctgctctgggaggtgcttaccgacctctctcacgttcctcccttctctctgtgcggtagtttgtttctctgttcttggataccgaggtacacttgtgtttgagctgcctgtcgtggccccgtggccccgctcttgttgtggctcccctcctctccttacccctcctgttgtgcccccctcctttcctcacccctcctttattcctcttgcacttactgttttccttcttctcctcaagccccacccccaccccgcgcccctgccatctcatgttctgaattctttgtacactttggcttccctcctctttcttattggtagcccagtttccccttggcacttcgtgttgacaagcccatctcttttcagtgaggctttggctctgaggctgtctaaaaagctggtggtcctgggagcagactgggttctttggaatagagaagatcgctgtggaagtcaaagatacacaatatgtagaaaatgatactgtctgtctgtggcattttatagaggaagcacttaggaaaagcactaaaaaggttataaaagagtaaaggttagaaacaatcctgtgttctctgggtattaaaatgtattctacggtctttcttcaggaagagacacctttgtttcttgctgcccgagagggaagttatgaagcggccaaaatcctgttagaccattttgccaaccgggacatcactgaccacatggaccgccttccccgggatgtggctcgggaccgcatgcaccatgacatcgttcgcctcctggacgagtataacgtgactcccagccctccgggaacggtcttgacttctgcgctctcacctgtcctctgtgggcccaacaggtctttcctcagtctgaagcacaccccaatgggtaagaaggctaggcggcccaacaccaagagcaccatgcccacgagcctgcctaaccttgccaaggaggccaaggatgccaagggcagcaggaggaagaagtgtctgaacgagaaggtccagctgtccgagagctcagtgactctatcccccgtcgattcgctcgagtctcctcacacgtatgtctccgatgccacatcctctcccatgatcacatcccctggaatcttacaggcctcgcccacccccctgctggctgctgccgccccggctgccccagtgcacacacagcatgcgctgtctttctctaaccttcatgacatgcagcctttggctcctggagccagcaccgtgctcccctcggtcagccagctgctatcccaccaccacatcgcgcccccaggtagtagcagtgcaggaagcttgggcaggttacatccagttcctgtcccagcagactggatgaaccgtgtggagatgaacgagacccagtacagtgaaatgtttggcatggtcctggctcctgcagagggagcccaccctggcatagcagctccccagagcagacctccggaagggaagcacatgtccacccagcgggagcccttgcctcccatcgtgactttccagcttatcccaaaaggcagcattgcccaggcagccggagctccccagacgcagtccagttgccctccagctgttgcaggccccttgccctctatgtaccagatcccagagatgccccgtttgcccagtgtggctttcccacctaccatgatgccccagcaggaggggcaggtagctcagaccattgtgccaacctatcatcctttcccagcctctgtgggcaagtaccccacacccccttcccaacacagttacgcctcctcaaatgctgctgagcgaacccccagtcatggtggtcacctccagggcgagcacccatacctgacaccatccccagagtctcctgaccaatggtcaagctcttcaccacactctgcatctgactggtcagatgtgaccaccagcccaactcctggaggtggtggaggcggtcagcggggacccggaacacacatgtccgagccaccacacagcaacatgcaggtgtatgcatgaagagtctgcctcagccttagagatggaagtgcctatcacacatactgctgaggggcgagtgaaggttatccggagagaaatgaagagacgtcccgtccgtgaccatctttcggaggcaggagagagaggctccaaacctgaggcaagcgtgagaagccttctctccatcttccctcgctctctgtgcagttttaggggaggacgcagctcctactgaccttcacccatcctgcaagttcatggagatgcaagatgagtgacaagccttgagaccccttgctctcttttaatttggagaataccgtggatgccttttatcgcccagacattctcgcagcctgagtaacattttaagccccggggcttctgactgagtgccccgggactctgtccaggctgacgtgtccagtcttctcagccctggaagtggccttgacgtcactcggtgctttcctctctgcgcccgtctgtggttgatccccgtcagtgtgtcataagcgagatgtctgtgctcttaatcattcctgacctggaaaccgacttcagcctcctgttcccacattcccggcacctcacaggtgcctcacagggtttactctggccatgggtctcagccctggcctctgaagtatgcttctatggaaaatgcacacactagtcttcatgtcttattcctagaaggaaagaggaagcaaaatatttggggactagaagcctccttctgaacctgcaccttaatttctctcccctgcatgtggggccccatatacactcatcagggggaaggatctgaattgttcttctgtcagttggcctagtcagtataaaattgaactctaggaggcttaggtactgtgatattcctctcattttgttgtaaagtaggaaaagtgggtgagtgttggaatgtccaagaaataagctaacttgctcaagaagcaatcgcccccctccaggccctccattgactgccactgtgaagcacatttatcacctgatcttaggactcattgatccagcagatgaaggtactcttggctgctgcactgctcctcatagatgcccgcagaagaaaatgcctctccatttgcccttgccatttaggacagaacttgcctggggcacaggggacccagtgactgccaacttccttaggaccactttgctttccgatcagaagccagtttctttccacagcgtgtgatctgagagactggtgcacacacagtaggttctcagtgaagacgtggagtctgtatttgggttccagatgtggagaagggacagtctcctgagctcacgaggcagcctttgctagtcgatgctgcattctcttccttccctagagtccccttccgatgatgacggctccccattgtccttgtgttcagattaagattgtacctcatccgaacctgcttcctgcagtgtggtctcagtgacttctcagactctcaagagcagaaacatttttatctgtggtaatctaggatgatagttttctcctcagtcatagggctaataattgcccctatggccatgccatcagtcactgcttcctggtgccatggcacccaggacacaggaaaatgagttctgctggagcatttgtgtatattattagggggaccacctgggggtgtttgttttatgggttttgttgttgttgttttaataatagtctttattcctgtgatagttaaaataagtgcccttcgcctcattcatcagtttgtgaacttagtaagtctgtgtatctgttacacagcagtctataaacaagtgaggattttagtcccattcaagttcactgaatcaacaaaaataatttgttctgtcctggtctatggcagattaagtttgatcatttgactttattctcatgtggtgacatcatcttaccagcccctttcatggaatagagacattttattgccctaaatggtgactgtctccccacgcacccgtcagttagtcccagataaagagaacctgtgtgtggacctctctgccctaaagctctagtgccactgcctgcgaacagtaaccaagaatccagccactgggtctggtcactggacctaccccagacacagagaagaacaaacttgctgtttctccttcaaggatccctcaaagaggatcctttgggatttaggaggagggatgtgaaactgccgtgacagacaacagactacagagatgaagaagacaacactgccagtcatacatctatctgatcagtcccttaggtgttagaattcttgacctgtgtagtgtccaggaaaagaaagggggatgggcagtcccttactccgggacctgagtcaagaggccgaggttgtatgaggcacatcctttattccatacacagagccctgttttgggcttttttttttttttttttttttattcctatgaaatcttcctttgacttttacctgcctttaaggatatttttttttaatttgttcttttttgttttaagcataattttctgacttatgcgatggtggggggattgaaggaaagaaagactgagttaaagattttcaagaaagccgtcagcacgagttggttatatcattttgttaaacttggccacttgaagtcttgcatagaaatgaaccaaaggtgttcagtgttcacgtgtgatttcaggacccggactttaaccagcgcgttgaatgtacgaggactgtttggaaggacacgtgtctatgtcctgaggcccccacccttaactgttttggtactatggcaacttcctcgtgtatatttccctgaaaagtgacattatatctgtttgtatgagaaactcagtaaccagaaaatgacttcgtgttcctgactaaatataggaaggaatatgcacactgtttttactttttaaagtttcattctaaaagtagattaagatgaaatttatatgaaaacatttttatcacaaaataaaaaaggttccatgtcaaagctcagtgatagcctactgtgcccttccccattgctggggccctggttccacagtgatcacctcgtgacgtcacagttggcgagagagacttaaatcctcctcatcccgaatcttcagcccagtcctgggcttcttccattttcttgtctagtttgatcacaaataaatgctgctgaggggaaagttttcatccattcagaaatgccataatacagggtcattcctctacaccctgaccgtaggatgtgaccaacagacagctgcttgggaccaggtgccccccacagacgtggggaatgtgtgctggggcaaggattgggatagaaacacttactggttcatttgcccgagcactgctagtctgtgtgggcttgtgtaggatataatttacaataggattatatggtaatatcggggtatagatttgaaacaggtgcattagtttatagaggcaatcaatgagagtatgcacacaagtccctggggttggcacagaacgatgccagcagtaacacagcaaccgaaccatctagcttattttcacttcctggtgttttatagacacttctagatcgagtgtgcataattacaaaaagataacagttcggtttttctcccgaaatgacttgatttcaaatcttgggagatgctttggttaagtcgggacttcacagctcattcgcacacatcagttagtcctcaggttttataattgtacataagacatgtcggcctccacgtgggttttttaattggtgtgtgaagatcataagagcctcagagggatgccccaccgggccgttctcggagctggagttgcttcttgcaaacgtttgtggtgctgaatcttgcttggaggacacttccttccatggatgtaggctgaaggtcaccggtctgttgatctcctgcccttgcacctgaaagccttgcagccttgctctcaagtgtgcactgctgtagatcagcaggaccggatactgcccacaatcatggaggaaagggagtgaattgtctccctcagccaagcatcagtcaagcctcacagcctaagagctgggaactggcttacatcaggttggaatgaataaaatagaacagtctcctatagtaccagctttccaggatgtggggtgcctgggatctgtgagctgatcactgcctttagtgcctctgtcatggagagggtgaggaataaagaatacaatgtttctttcggtatagaatagttaacaacaaaactaccaggtgacagtattcccaggacttgggaatgaagtcatgtggatcccaaattttaagattatcttcatttacatagttcaagatcagctagggttagacaagactgtgtttcaatagcggagtggatgcgtgagtgttagaaacacaacatggagtgcagagaccccctccccccctgagtagcattgaccagtctattaatttttaggacaaaggaatggaagccaagaggagttactggaacctggaaagaaaactacctagcacaggtttcctatcaaggcaaaccataaaccttgcttgtctcaccccaccctgagagatagctcagagtcctgggccagagtttgaatggggaggagggtgtatttgaaggcacaggtcttcctcaatcgttgttgtccaaccacattttgggggaaacttccactgtcactgatgtgttagtccaggggacacaaagtaaaagggattctgtgttaattgtgacaaaactgctgctcctggcctgctgctgggtttccttagctgtgatggcacaacctggagacagtccagcagcaggatagaaaatggaaactcttcaagccctataaagatgaaatggctcaatgggtgaagtcacttgccaccaaaactgacaacctgagttccattccagggacccacatggtaagacaaagagaaccaactcctcaagttgtcctgtgacctccacatgtgtgccgtaaaggaaaacatgaagaaaattatagattcatcttacttctagatacacaaatctaaatcagctgttaccaaactaaaactacagtgctgatgtgttttgccccctatcaccgtggtaaactccataatcaaaagcaactcgaggagggaaggattgatttctgcttacaattcatgaagggagggagagcaggacagaactctggcggcaggaactgaagcagaggacatgggcaaacactgctgactggcttgatgtttgtggcttgccagggcggcaccatccatggtgagatgggtcttctcacatgtcatcaatcaatcaaggaaatgacccataaacttgcctacaggagaatccggtgggggagggtcttgtttgtttgttttgttttgttgttgttttttttcacttaagtttcttctctgatgactttagcttgtgtcaggtagtaacccaaattggcacaagtgggtattataacattccatctcctaaggaaacaactgcaaagaagtgtattgaaaggactgaagagatgcttggtggttaagatcacgtgttcttccagagaaactggatttagaatccagcatctgcatagtgggtggctcacagtgctctgaaactccagttccaggggatctaatgccctcttgtagactgtggggatcctgcacacacatacatgtaggcaaaacacccataacaaataaaataaaaacaaacatttttaagatgctgctccatcaagaaaacacaatcagcttcagagaaatcaagaatgtgctgataaaattacatgctcatgaaaaactatgaaataaattatgccagggaatgtcacaaaataaggtatcaactaccatctaaaacaaatgctatgctcattggtgaaagagtaatcaaaggggttaaacacaggttccagctgtcccttataccttgtactcaaaaggatcttaaagtggtacctgtgttaaggcaaacaaaaagaatagatattagtcggttatatacatttacacagagatagccattaaaccacactcccaactattgacatttgtctccactgcaaagagtgaacacaagaaatgtgacgatgtattttatagctgctgtggggtgaggactatgttgggtaggaaggctggtttgtggctgagcaaaaatttagagctgttagtaatctgataagattggggatcaggaattatgagtttgagactactttgggttatacagcaagaccctgtttcaaaagcagatgggtggctggagagatggctcagtggtcaagagcacttgctacacaatcatgaggcccaggtctggatcccagtaccctcaagccagcacatgcctgtacttccaggtttgaaagggtagagtcaggagctcaggaattgctagtcctctgggcctacctgagaacacaccaatctgaggtttggggagagagcctatgtcttagaaataggtggcatgatggaggacacccaatgccagcttctggcctttgcacacaaaggcacatgtgcacgtgcacgcagtcatacacaacacacatcttcttttggatattttatgtatttacatttttattttggttgaaatttgattttatttgatattagaatggctactccagctatttcttgaaccatttgcttggaaacttttttccagcctttaactctgaggtagtgtctgtctttgttgctgaagtgcatttcctgtatgtagcaaaatgctaggtcctgtatacatatccagtcttttagtctatgtcttttttattggggaattgtgtccattgatgttaagagatattaaggaatagtgattgttgcttcctgttatttttgttgttagaggtagaattatgtttgtgtggctgtcttcttttgggtttgttgaaagattactttcttgctttttctagggggtagtttccctcttggtggtggagttttccatctattatcctgtgtagggctagatttatggaaagatattctgtaaatttggttttgtcatggaatattttggtttctccatgtgtggtaattgagagttttgctgtatatagtagcctgggctggcatttgtgttctcttagggtttgtatgacatctgcccaggatcatctagctttcataatttctggtgagaagtctggtgtaattccttttttgttgttgttggtttttttttttttttcttcgagacagggtttctctgtgtagtcctggctgtcctggaactcagtttgtagaccaggctggcctcgaactcagaaatccgcctgcctctgcctctcaagtgttgagattaaaggcatgtgccaccactgcccggctgtaattctgataggtctgcctttatatgttacttgaccttctttttttactgtttttaatattttttctttgttttgtgcatttggtgttttgactattatgttacaggaatttctttcccagtcttatctatttggagttcttgtatgtctatggccatctctttctttaggttaggaaagttttcttctataattttgttgaagatatttattggccctttgagttgggaatcttcactctcttctatacatattatccttaggtttggctctttcattgtgccctggatttctgagatgtttggggttaggagcattttgcattttgtatttgtttttttttgtttttttttgtttgtttgttttttttgactgttgttccaatgttttctatggtatcttctgcacctgagattctctcttctatctcttgtattctgttggtgatacttgcatctatgacccctgatctctttcctagttttttttttttttctccagggttatttccctttgtgatttctttattgtttctatttccatttttagatcctggatgattttgttcatttccttcacctgtttcgttgtgttttccagtatttttaaaggaatttttgtttttcctctttaagagcttctacctgtttacttgtgttctcttgtatttctttaagggagttatttatgtccttaaagacctctatcatcatcatgagatgtggttttaaatccagttttcggtgtgttgggttatccaggacttgctgtggtgtgagaactgggttctaatgatgccaagtagccttgatttctgttgcttatgtttttgcacttgtctctcaccatctgattatctctggtgttagttggtcttgctgtctctgactggagcttgtccttcctgtgggctgtgaactggtgatcttaggtgtgtcagcacttctggggagaacagttctctttgagcaggatttgggtgcagagggctgtaggacagccttagctcctgggtacagatggagactggaagccacaacacacacattaaaaaaaaaaaaaagatctattaaactttttttttgctggcactctgctaagctttatcagcacactgagctggaaagaattttaagagtgagaacttttccttgttggttctaatagctccataaacaaactcttcctacattatttcaagcacattcccaagtgccaggtttccagagtgttttctttttaagggtgtatgtaagagagagatgtggtatgtctgtgtgtttgtggtgtgtctgtgatgtgtgtgtgtgatatggtgtgtgtgatgtgtgtgtgtggtgtaatgtgtgtgtgatgtgtggtgtatgtgtattgtgtgtggtgtnnnnnnnnnnnnnnnnnnnnnnnnnnnnnnnnnnnnnnnnnnnnnnnnnnnnnnnnnnnnnnnnnnnnnnnnnnnnnnnnnnnnnnnnnnnnnnnnnnnnnnnnnnnnnnnnnnnnnnnnnnnnnnnnnnnnnnnnnnnnnnnnnnnnnnnnnnnnnnnnnnnnnnatgtggtgtgtggttgtgatgtgtggtgtgatgtgtgtagtgtgtggttgtggtgtgtgtgtgtaagtgcatatggaagacaaagcaggagaagaagcatcctcctatctttccctgccaccttattgccttgaggcagggtttcttcctgaaccatttcagctgggctggctggcctgcaagctcctgggatttgccctcggtgccccacccctcggtgccccacccctcagtgcctggaatacagggacaggacagctgtgcagctctcaacgtgggtgctggggatcggaagtcaggtcctcaagctgcaggctcacacactgagccctctcccaacccctagaaatgttgatatttttgacaactaaaagcagattcactttcagttactaaatataccccaccttagtaacaatccaaggacgcaaggtaactattgaactacattctctttctagtgaaaaatcttagctattatacaatgtggagaatggctctcaggtgcctgtgttctctcaggtgacagctactggcacatgctgctaattagatggtcttaattctaatatgtaaaacccaagtgtgcagtgtggctcttagtttgtaaagaacaccatttctaaaggtgagtcaatattagccagtatgaacacgttcactttctttgatctattcatttcaattctagcaatctaatacaatggaagtagtttcaaagggcaaaaaaaaagtgtgtttatatataaacatacatcttaattgctgtacatattttgttcatgctcactagcataatacaggaaaactttaaaacaggataaacgcgaagtttttgactagcataactgtggcacacgagagaactggtcaagtcagagagcagtgcatgctgctagaataccatgcacctgtcgggccgttgaagtaaatctagaaaattatttgcagtatttgttgttcattgggaagagccaatcttacaataaaatgaacaacaggcactattttctagatttaagtcactttctaaaaggggcttcagaggacggggtagagaaggcaatagaacacatgaaataaggaagaaggagggagacttaccaggagcagaaacaccatgaggaagtggtgcag

SEQ ID NO: 722 - DNA, 7588 bp, Mus musculus
agccaaacttcgggcggcggcctggctgcgcggagtgcaggggcggcgcagcgggagctccaggactcagcgagccgcgggggcagggtagagcacgcgagagccgggctcctggtcgggacccgctccccatgcggatctgctctggctgcggccccgaagatgcccgctctgcgtcccgccgcgctgcgggcgctgctgtggctctggctgtgcggcgcgggccccgcgcacgctttgcagtgtcgaggtggtcaagagccctgtgtaaatgaagggacctgtgttacctaccacaacggcacaggcttctgccgatgtccagagggcttcttgggagaatattgccaacatcgagacccctgtgagaaaaaccgctgtcagaatggtggtacttgtgtgccgcagggcatgttggggaaagctacctgccgatgtgctccaggattcacaggagaggactgccaatactccacctctcacccctgctttgtgtcccgcccttgtcagaatgggggtacctgtcacatgctcagccgggacacctacgagtgcacctgccaagtcggcttcacagggaagcagtgtcagtggacagatgcctgtctatctcatccctgcgaaaatggaagcacctgtacatctgtggccagccagttctcctgcaaatgccctgcaggcctcacagggcagaagtgtgaagctgatatcaatgagtgtgacattccaggacgctgccaacatggtggcacctgcctcaaccttcctggttcctacagatgccaatgtcctcagggcttcacaggccagcactgtgacagcccttatgtgccctgtgcaccctcgccctgcgtcaacggaggcacctgtcgtcagactggcgacttcactttcgaatgcaactgcctgccaggttttgaagggagcacctgtgagcggaatatcgacgactgccccaaccacaagtgtcagaatggaggagtttgtgtggatggtgtcaatacctacaattgccgctgtccccctcagtggactgggcagttctgcacagaagatgtggacgagtgtctgttgcagcccaacgcttgtcagaatggaggcacctgcaccaaccgaaacggaggctatggctgcgtgtgtgtgaacggctggagcggagatgactgcagcgagaatatcgatgactgtgcctatgcttcctgcacgccagggtccacctgcattgaccgcgtggcctccttctcctgcctgtgtccggagggaaaggcgggtctcctgtgccatctggatgatgcctgtatcagcaacccttgtcacaagggggcgctgtgtgacaccaaccccctgaacgggcagtacatttgcacctgcccacagggctacaagggcgctgactgcacagaagacgtggatgagtgtgctatggccaacagtaacccttgtgagcatgcaggaaagtgtgtgaatacagatggcgccttccactgtgagtgtctgaagggctacgcagggcctcgctgtgagatggacatcaacgagtgtcattcagacccctgccagaacgacgccacctgcctggataagatcggaggcttcacctgtctgtgcatgccaggtttcaaaggtgtgcattgtgagctggaggtaaatgaatgccagagcaacccgtgtgtgaacaacgggcagtgtgtggacaaagtcaaccgcttccagtgtctgtgtccccctggcttcacaggaccagtgtgccagatcgacattgatgactgctccagtactccctgcctgaatggggccaagtgcatcgatcacccgaatggctatgaatgccagtgtgccacaggtttcactggcatattgtgtgatgagaacatcgacaactgtgacccagatccttgccaccatggccagtgccaggatgggatcgactcctacacctgcatctgcaaccctgggtacatgggagccatctgtagtgaccagattgatgaatgctacagcagcccttgcttgaacgatgggcgctgcattgacctggtgaatggttaccagtgcaactgccaaccaggcacatcaggccttaattgtgaaattaattttgatgactgtgccagcaacccttgtatgcacggagtctgtgtggacggcatcaatcgctacagctgtgtgtgctctccgggattcacaggccagaggtgcaatattgacattgatgagtgtgcctccaacccctgtcgcaagggtgcgacgtgcatcaatgatgtgaatggtttccggtgtatatgccccgagggaccgcatcatcctagctgctactcacaggtgaacgagtgcctgagcaatccctgcatccacggaaactgtactggaggtctcagtggctataagtgcctctgcgatgcaggctgggttggtgtcaactgtgaggtggacaaaaatgagtgtctttctaacccatgccagaatggaggaacgtgcaataacctggtgaatggctacaggtgtacctgcaagaaggggttcaaaggctacaactgccaggtgaatatagatgagtgtgcctccaacccgtgtctgaaccaaggaacctgctttgatgacgtcagtggctacacttgccactgcatgttgccttacacaggcaagaactgtcaaacagtgttggctccctgttccccaaacccgtgtgagaatgctgctgtttgtaaagaggcacccaattttgagagcttcagctgcttgtgtgctcctggctggcaaggtaaacgatgtacagttgacgttgatgagtgtatctccaagccgtgtatgaacaatggtgtctgccacaacactcagggcagctacgtgtgtgagtgtcctcccggcttcagtgggatggactgtgaagaggacatcaatgattgccttgccaacccctgccagaacggaggctcctgtgtggaccatgtgaataccttctcctgccagtgccatcctggcttcataggggacaagtgccagacagacatgaatgagtgtctgagcgagccctgtaagaatggggggacctgctccgactatgtcaacagttacacctgcacatgccctgcgggcttccacggagtccactgtgaaaacaacattgacgagtgcactgagagctcctgcttcaatggcggcacgtgtgttgatggaatcaactctttctcttgcttgtgccccgtgggtttcactggtcccttctgcctccatgatatcaatgagtgcagctctaacccgtgcctgaatgctggaacgtgtgttgatggtctgggtacctaccgatgcatctgtcccttgggctacaccgggaaaaactgtcagaccctggtgaacctctgcagccggtctccgtgtaaaaacaaaggaacttgtgttcaggaaaaggcaaggccccactgtctgtgtccgcctggatgggatggtgcatactgtgatgtgctcaacgtgtcctgtaaggcggcagccttgcagaaaggagtacctgttgaacacttgtgccagcactcgggcatctgtatcaatgctggcaacacccatcactgccagtgccccctgggctacacggggagctactgcgaggagcagcttgatgagtgtgcatccaatccatgccagcacggtgccacctgcaatgacttcatcggaggatacagatgtgagtgtgttccaggatatcagggtgtcaactgtgagtatgaagtggacgagtgccagaaccaaccctgccagaatggaggcacctgcatcgaccttgtgaaccatttcaagtgttcgtgtcccccaggcacccggggcctgctgtgtgaagagaacatcgatgaatgtgctgggggcccccactgccttaacggtggccagtgcgtggaccggattggaggctacacttgtcgctgtttgcctggctttgctggggagcggtgtgagggggacatcaacgaatgcctgtccaacccttgcagctcagagggcagcctggactgcgttcagctcaaaaataactacaactgtatctgccgcagcgccttcacgggccggcactgtgaaaccttcctagatgtgtgtccccagaagccttgcctgaacggagggacttgtgccgtggctagcaacatgcccgatggcttcatctgtcgttgtcccccagggttctctggggcgagatgccagagcagctgtggacaagtgaagtgcaggagaggggagcagtgtatccacactgactcgggacctcgctgcttctgcctgaaccccaaggactgcgagtcaggatgtgccagtaacccctgccagcatgggggcacctgctatcctcagcgccagcctcctcactattcctgccgctgccctccgtcgttcgggggcagccactgcgaactctacacagcccccaccagcacccctcctgctacctgtcagagtcagtactgcgccgacaaggctcgggatggcatctgtgacgaggcctgcaatagtcatgcctgccagtgggatggaggtgactgttccctcactatggaggacccctgggccaactgcacctccactcttcgctgctgggaatacatcaacaaccagtgtgatgagcagtgcaacaccgcagagtgcctgtttgacaactttgagtgccagaggaatagcaagacgtgcaagtatgacaaatactgtgcagaccacttcaaagacaaccactgtgatcagggatgcaacagcgaggagtgtggctgggatgggctggactgcgcttcggaccagcctgagaacctggcagagggcaccctgatcatcgtggtgctcctgccccctgaacagctgctgcaggattcgcgaagcttcttgagggccctgggcaccctgctccacaccaacttgcgcattaaacaagattctcagggcgctctcatggtgtacccctactttggggagaagtcagctgccatgaagaagcagaagatgacacgcaggtctcttcctgaggagcaggagcaggagcaggaggtgataggctctaagatatttctggagatcgacaaccgacagtgtgttcaagattcagaccagtgcttcaaaaacacagatgcggcagctgctctcctggcttctcatgccatccaagggaccctatcctaccctctagtgtctgttttcagtgaactggagagtccaagaaacgcccagcttctctatctgctcgcggtcgctgttgtcatcatcctgttcttcatcctgctgggggtcatcatggccaagcggaagcgcaagcatggcttcctctggctgccggaagggttcaccctccgccgagactctagcaatcacaagcgccgtgaacctgtgggacaggatgccgtggggctgaaaaatctctccgtgcaagtgtcagaggctaacctgattggttctgggacaagtgaacattgggttgatgatgaaggaccccagccaaagaaagccaaggctgaggatgaggctttgctgtcggaagatgaccccatcgatcgacggccctggacacagcagcaccttgaagctgcagacatccgccacactccatccctggcactcactcctcctcaggcagaacaggaggtggacgtgctggacgtgaatgtccgaggcccagatgggtgtactccactgatgctggcttctctccgaggaggcagctcagacctgagtgatgaagacgaagatgctgaggactcttctgccaacatcatcacagacttggtctaccaaggtgccagccttcaagcacagacagaccgcactggcgagatggccctgcaccttgcagcccgctattcgagagctgatgctgccaaacgcctcctggatgctggtgcggatgcaaatgcccaggacaacatgggccgatgtcctcttcacgctgcggtggcagcagacgcccaaggtgtctttcagattctgatccgcaaccgtgtaaccgatctggatgccagaatgaacgatggtactacccccctgatcctggctgcccgcctggctgtggaaggaatggtggcagagttgatcaattgccaagcagatgtcaatgcagtggatgaccatggaaaatctgccctccactgggcagctgctgtcaataatgtggaggcgactcttctgctgttgaagaatggggccaacagagatatgcaggacaataaggaagagacacctttgtttcttgctgcccgagagggaagttatgaagcggccaaaatcctgttagaccattttgccaaccgggacatcactgaccacatggaccgccttccccgggatgtggctcgggaccgcatgcaccatgacatcgttcgcctcctggacgagtataacgtgactcccagccctccgggaacggtcttgacttctgcgctctcacctgtcctctgtgggcccaacaggtctttcctcagtctgaagcacaccccaatgggtaagaaggctaggcggcccaacaccaagagcaccatgcccacgagcctgcctaaccttgccaaggaggccaaggatgccaagggcagcaggaggaagaagtgtctgaacgagaaggtccagctgtccgagagctcagtgactctatcccccgtcgattcgctcgagtctcctcacacgtatgtctccgatgccacatcctctcccatgatcacatcccctggaatcttacaggcctcgcccacccccctgctggctgctgccgccccggctgccccagtgcacacacagcatgcgctgtctttctctaaccttcatgacatgcagcctttggctcctggagccagcaccgtgctcccctcggtcagccagctgctatcccaccaccacatcgcgcccccaggtagtagcagtgcaggaagcttgggcaggttacatccagttcctgtcccagcagactggatgaaccgtgtggagatgaacgagacccagtacagtgaaatgtttggcatggtcctggctcctgcagagggagcccaccctggcatagcagctccccagagcagacctccggaagggaagcacatgtccacccagcgggagcccttgcctcccatcgtgactttccagcttatcccaaaaggcagcattgcccaggcagccggagctccccagacgcagtccagttgccctccagctgttgcaggccccttgccctctatgtaccagatcccagagatgccccgtttgcccagtgtggctttcccacctaccatgatgccccagcaggaggggcaggtagctcagaccattgtgccaacctatcatcctttcccagcctctgtgggcaagtaccccacacccccttcccaacacagttacgcctcctcaaatgctgctgagcgaacccccagtcatggtggtcacctccagggcgagcacccatacctgacaccatccccagagtctcctgaccaatggtcaagctcttcaccacactctgcatctgactggtcagatgtgaccaccagcccaactcctggaggtggtggaggcggtcagcggggacccggaacacacatgtccgagccaccacacagcaacatgcaggtgtatgcatgaagag

SEQ ID NO: 723 - protein, 2503 aa, Mus musculus
SQTSGGGLAARSAGAAQRELQDSASRGGRVEHARAGLLVGTRSPCGSAAAPKMPALRPAALRALLWLWLCGAGPAHALQCRGGQEPCVNEGTCVTYHNGTGFCRCPEGFLGEYCQHRDPCEKNRCQNGGTCVPQGMLGKATCRCAPGFTGEDCQYSTSHPCFVSRPCQNGGTCHMLSRDTYECTCQVGFTGKQCQWTDACLSHPCENGSTCTSVASQFSCKCPAGLTGQKCEADINECDIPGRCQHGGTCLNLPGSYRCQCPQGFTGQHCDSPYVPCAPSPCVNGGTCRQTGDFTFECNCLPGFEGSTCERNIDDCPNHKCQNGGVCVDGVNTYNCRCPPQWTGQFCTEDVDECLLQPNACQNGGTCTNRNGGYGCVCVNGWSGDDCSENIDDCAYASCTPGSTCIDRVASFSCLCPEGKAGLLCHLDDACISNPCHKGALCDTNPLNGQYICTCPQGYKGADCTEDVDECAMANSNPCEHAGKCVNTDGAFHCECLKGYAGPRCEMDINECHSDPCQNDATCLDKIGGFTCLCMPGFKGVHCELEVNECQSNPCVNNGQCVDKVNRFQCLCPPGFTGPVCQIDIDDCSSTPCLNGAKCIDHPNGYECQCATGFTGILCDENIDNCDPDPCHHGQCQDGIDSYTCICNPGYMGAICSDQIDECSPCLNDGRCIDLVNGYQCNCQPGTSQCEINFDDCNPCMHGVCVDGINRYSCVCSPGFTGQRCNIDIDECNPCRKGATCINDVNGFRCICPEGPHHPSCQVNECLSNPCIHGNCTGGLSGYKCLCDAGWVGVNCEVDKNECLSNPCQNGGTCNNLVNGYRCTCKKGFKGYNCQVNIDECNPCLNQGTCFDDVSGYTCHCMLPYTGKNCQTVLAPCSPNPCENAAVCKEAPNFESFSCLCAPGWQGKRCTVDVDECISKPCMNNGVCHNTQGSYVCECPPGFSGMDCEEDINDCLANPCQNGGSCVDHVNTFSCQCHPGFIGDKCQTDMNECLSEPCKNGGTCSDYVNSYTCTCPAGFHGVHCENNIDECTESSCFNGGTCVDGINSFSCLCPVGFTGPFCLHDINECSSNPCLNAGTCVDGLGYCICPLGYTGKNCQTLVNLCSRSPCKNKGTCVQEKARPHCLCPPGWDGAYCDVLNVSCKAAALQKGVPVEHLCQHSGICINAGNTHHCQCPLGYTGSYCEEQLDECNPCQHGATCNDFIGGYRCECVPGYQGVNCEYEVDECQNQPCQNGGTCIDLVNHFKCSCPPGTRGLLCEENIDECAGGPHCLNGGQCVDRIGGYTCRCLPGFAGERCEGDINECLSNPCSSEGSLDCVQLKNNYNCICRSAFTGRHCETFLDVCPQKPCLNGGTCAVNMPDGFICRCPPGFSGARCQSSCGQVKCRRGEQCIHTDSGPRCFCLNPKDCESGCNPCQHGGTCYPQRQPPHYSCRCPPSFGGSHCELYTAPTSTPPATCQSQYCADKARDGICDEACNSHACQWDGGDCSLTMEDPWANCTSTLRCWEYINNQCDEQCNTAECLFDNFECQRNSKTCKYDKYCADHFKDNHCDQGCNSEECGWDGLDCASDQPENLAEGTLIIVVLLPPEQLLQDSRSFLRALGTLLHTNLRIKQDSQGALMVYPYFGEKSAAMKKQKMTRRSLPEEQEQEQEVIGSKIFLEIDNRQCVQDSDQCFKNTDAAAALLASHAIQGTLSYPLVSVFSELESPRNAQLLYLLAVAVVIILFFILLGVIMAKRKRKHGFLWLPEGFTLRRDSSNHKRREPVGQDAVGLKNLSVQVSEANLIGSGTSEHWVDDEGPQPKKAKAEDEALLSEDDPIDRRPWTQQHLEAADIRHTPSLALTPPQAEQEVDVLDVNVRGPDGCTPLMLASLRGGSSDLSDEDEDAEDSSANIITDLVYQGASLQAQTDRTGEMALHLAARYSRADAAKRLLDAGADANAQDNMGRCPLHAAVAADAQGVFQILIRNRVTDLDARMNDGTTPLILAARLAVEGMVAELINCQADVNAVDDHGKSALHWAAAVNNVEATLLLLKNGANRDMQDNKEETPLFLAAREGSYEAAKILLDHFANRDITDHMDRLPRDVARDRMHHDIVRLLDEYNVTPSPPGTVLTSALSPVLCGPNRSFLSLKHTPMGKKARRPNTKSTMPTSLPNLAKEAKDAKGSRRKKCLNEKVQLSESSVTLSPVDSLESPHTYVSDATSSPMITSPGILQDTPLLAAAAPAAPVHTQHALSFSNLHDMQPLAPGASTVLPSVSQLLSHHHIAPPGSSSAGSLGRLHPVPVPADWMNRVEMNETQYSEMFGMVLAPAEGAHPGIAAPQSRPPEGKHMSTQREPLPPIVTFQLIPKGSIAQAAGAPQTQSSCPPAVAGPLPSMYQIPEMPRLPSVAFPPTMMPQQEGQVAQTIVPTYHPFPASVGKYPTPPSQHSYASSNAAERTPSHGGHLQGEHPYLTPSPESPDQWSSSSPHSASDWSDVTTSPTPGGGGGGQRGPGTHMSEPPHSNMQVYA

SEQ ID NO: 724 - DNA, 88445 bp, Homo sapiens
  misc_feature (1)...(88445): n = A,T,C or G
tttgatttacatttccctgatggttgatgattttcaacatcttttcatatacttattagtcattatgtatcttctttggagaatgtctgttcagatcctttacctactttataattggtttatctttttaatattgaactgtaatagtttttaaaaaatatatcctaaatacaagtctcttatcagataatatgatttgcagatattttctgtcattctatatactgtcttttcacattcttgatgatatacttttcagcccaaatgtttttaacttgatggaatacaatttattttttcttttgttgcttgtgctttcagtcatatttgtgaaaactttgcttatcccacattacaaagatttactatttctaagtgatttataattttaccacctacctttaggtctccgatccattttgagttaatttttatgtgcgaggagggagtctaacttgattcttttacatgtggatatttagttgtcccaggaccatttgttgaattaagtgctgtttttatctaattcgtttaatctttacaataaccatttaaggtgggtcctgttaattccccaagaaagtttaagtatattgcccatattcactcagctattgcatggcaatgctgagagttgagcctagacagtttggccccagaagccatgcttttagctatgaaataactgtcttacctacctcccttcttacctacctatctacctattgacagggaaaaagtacctcaacaatagtcaatcagttataaaaagaaaacactttatttcttttctgttgtggttctgctgaaatgcttctgctttcttgtctgtggttggtgaattcagttagttgtaacattggctaatataaagttagagtcacagtttctattccttatagttgagctacaagggcttcgctacctccctgacaccctagtcaactgtatttagtcttactcatcagagagatcgagttaggggaggatgatcattgaccttctactacaccaccagacctctcaagtttagcagttgtaggccaggggccccattttccccaacaatctaaaactatgtctttaaattttccaaagaatatcttcatcaagagcaccagactaggggcaaagaccctagttcttactcaaggacctagtagatcccatagattctgtaggggtgggcttcaatggctcatcattttctggctcattggtctatttgtaagactcatatttctgtatgaataatatgaaatatgagtaatatgatacatttttgaaatttgagtaaattttcatagtctttttcaggcttctttagtgattcatctgcttgaatggactgagtaccaaatacttggagaaatataatttccttcaataaagccttcagtgatttctgtcttccatggagtgatttttggctaatgtttttggtcactcagtttatacttatttatatgactgccattgtatttagagaaatcagccatgttccagtgtagcagagcagatgtagaatgccacagtaacttatggtaaggaataaagcaaagtgtgattgatgtgtgtcccactcacaaggctgtaaatgccacaaaagcagggactcactgctgtatcaccagtgcctaatgtaagtcccagtaagtattttgagtgagagagaggaaccttaagggatatttcgaggaagccaaatatgtaatcatactatatttcaaataggagaatgtttagaatagaagctggtagtcttctatttaattagctcaggagtttggtagcaaggaaagagaaagtaagaggcccaacatataaactacaaaggaccacactgtgggcagttagagtgaagtttggtgtactagtttcatttttcataaaagaaaaagtcaagaggaaggaagcaatgctgtaagtttagagaagagcctgatgaatttgaagtgctggtaagcttagttagtaataatgccacccaattttcagataccttttaacatttgtatagcactttactcatgatgtggcacttataattagaaagacaggataggcaagtggaattagcctcattttttacaggtgaggaagttgatgcagaactttagcttaccatgtacgaatagcttgcaggtggtgagattgggacttgatccatatcttcatactttaagttcaatatttttcctatatcctcccccactcccttccccacctggcttggaggccgcctagcaatcattcaaagaaaaaaaataaaaggaacttaaatttaattaggtaatattttatctgttcttcccattagtctggtatggagctggggaaaatccaataccctgtttttttagaacccttgaatatctctgtcccaagtagacatttatcatccctgggattttatttcatgaaaacattttgaaatacttgtgaggtaactatgaaggcatgccattggcacaatgagtcactttcactgtctagctatgcttgaggccagagaagacagagaattggggatttttcatatggtgagtcctgggtgagcagctgttgaactgaagtcatgaagcgggtctattctaataaccatgttctgtgggaacagagcaggtcgtttcttctgtatgagatttcatcattttcatttgttcttcatttaccaggttttgaagggagcacctgtgagaggaatattgatgactgccctaaccacaggtgtcagaatggaggggtttgtgtggatggggtcaacacttacaactgccgctgtcccccacaatggacaggtatgtacagtgtggagaatccaccagaatgggatatggattggtaaccagaggcagactgtttttttaaaatatcagtaacaaatatcttaggcctgctctggaaccagtatgtgaactgagcaggatctccatgctagatcattgcttattgtactaacctcatacattttcctatgttcactcaaagacatattttcacaggtattattgggcagcaactctgaacccagcaccatgctagatgctgtggcagatatgagagaagagcactactgtaagcttattatctgggaaaagcaggacattacctggaacatagtagatgcttaataaatattaaagaggaaaaatttcctgaaatgctaaaataaattgtacaggctaccagagttcagagcctatttgttcacggacagagatctgtcccatcttaatgtcatgttctataactaggcaaagtgttaggcaggtactcttaatgacattatttttatgatacgcatcctacatttgtttttttcttctatccctttttgtacacgaacaaaaatagttttttctgcctctaacattagaagggtagtcttgcttaattttacagcctcttggaagtttctcatgtagtcttaggcaggttgagtgatttacgcagacatttggttctaatttctctttatgtctgtttatctactgaaagtagagacaattaagaactgattaagggactaagagctgggcctttttgagagaaattaatttaatgtggaaacccaacaggaagttagtattataagaaaaaattacagtaccagtagtgggctatctcctacaaagaatcttaatgttgaagtgcagccattactacctggtattctttagtgtctctgaattacttttccttatctgtagcatctaattatttacaatactctttagagctgtagactatgaatagaaaaagatgaaaagcatttaaaaactcaatcacaggacttactggggaggccaaacatttctgcttttaattcccaaactgtcccttttaatactttcccaccaggttttcctagaattgggacttctcctagaatttcttcatggtgtcttgatcctagaacttcacttctaaccctctgtactttttgtgacattgtctcttctagtttttgccatttttctatgatagacttttcagaggctattttttcaacttaaaaaattactgtaaagttaattacatgacatatagtaactggaaaaatttgtgttttttttctctttttaatgatccttacagtattggacaggatgagatacttgttaagaacttgaccacattctgatctctcccttgctctgtgagacagtaactgtgtagtactgaggcttctgatgccagtgaagattaaacaacattgtaatattgttgctggtttttgttcgatactacacttggtttcttgctttgatattaattaggaaggcctgctcttggggaaaacttccccagtgaaatgatttttttattcaaatttcttatcccaggacatttaataaatgcctcttttcgctagaagtctttataagatgtttccgtttttatattttccaaaaagggtggtggagatcatggataagtttaatgtggcagttttatttcttttgatttgctgtctgtcatttagagtgaccttcagttttttttttgttattcatcacaggttttcttcactcatgccaattctttgattcccagtgagaagccttgtttttgccctgcccatcatcaacaggagaaagtctaagatccttcttctgttatatgaagcctttcatggcttcagctctgtctgcttccccagtctccttctcatgcatctagcagcataccctagcagttctctgctcacagttttcctgtacatactgcatagtgcttcacatcctgtgtcttcattgacaccattccttttctctagggtttccttctccactcctcccccatttttctcatcatttttggcatgcctgactcagatcaagtggttacctgcttcaggaaggcttccctgatctcgctccaggctgagctaaatgttctactctggactcccttagtaccccatgtattctcctgtaataacacttaccacgtttgtattgatattattatatgcttgatgtgagggatgtaccgagttatgggggcggttggactattgatgacagcagttactagcactccttacagacctttgttctcagtagcatgtagctgagctatttaccatcccagcccctatcctattgtaaagagaaaaacagaaggaaaattttgtgtcatagggcttctgtttctactgatattagatgtataaattcagattagtcttttctgtgttacacaaattaaagaagtgaatggagcaggaatctagtaggagttaactaatgtttattagcatccaaatactgtgctaattacaatgttttatctgtgtaatctttgcaataactgtattagagatagagtttaaatatccttttttcagatgatgatgcgtattcaaaagggttaaataatttgcccaagacccgtagtggttgggttagggtttgaatctaggcttgttgaactccaaatctttgctcaaatctgtagtcttttttctatataaaattgattttgtaaattatcttgttttattttaagaacttggggtgttttttaatagactgaaaatttcattatcctgagatttggtgatttactccatgtgttttccctttttaagaacctagctggttattttgaggttagaagttaacattatgtgtatgctttagattcagtctgatgctttttcactatacctaatagcctattgcaactttgttcagaattccttttacaatttccacctgtagacttgaagcattaactatttggtctggcttttgacaaaatgaaaaaggaggggttggagtagtgaggtgagaaaatgaaggaaatgaagttgccagctatttgaaaaagaatggataagactatatggctgaaaaaagataggcattaattttaaataaatggagatttggaaatttgccatgcttttaatgagaagaacctgatagttacggctttgttttgtaactacatatacataaaaggcttggtgttttgtagcaagttctacacttcaagatgagcataaattccagctctattcatggtttgatttagggtaaatttgtcagcctccttttctcagaagccttcatttgctattatctctttcttgggatattgaaacaatcaaaaatgcaataaaaagtttattttttcatttgttctgccaacagctattatgctaaacattctaaattcatcctattctatatggtggcccctggtttcatcttgctattgagcatctgaaatatggctaatgtgaattgagatgtgttgtaattgtcaaataactgattttgaagacttagtatggccgggcacagtggctcatgcctctaatcccagcactttgggaaactgagatgaatggatctcttgggcccaggagtttgagaacagcctgcgtaacatggcaaaaccctgtctctacaaaaaatacaaaattagctgggtgtggtggcgtgcacctgtagtcctggtcacttgggaggctaatcacgccactgcacattccaccctaggggacagagtgagaccaagaacctgtctcaaaaaaaaaaaaagaacttcatatggaaaaaaagatatctttttaataatgtttaaatattgattagatgctgaaataatacattttggtacattgaattaaatataacataatattaaaattaatttcccctattcctttttaccattaaatattttagtagccactggaaaatttgaaattatatctgttactctcattatatttcagttggacagcattacttcagatgcaaagatggtctgtaggtattaccattgctgctgctttgtagaagcatctgttctagccctgaagtagaggaatagatggtttccccatggcctgtgggcagaactgtgttatataccccactacaggcgtttttacctactgtggctgtctaattagtgtttgtttgtgccttcaaaaactaccactcttgtggactagcttaagctcagatggaaaaaagaaattggtcttagggagtgggtgtggggagatgatttacttctttatagggaagtgtcttatagggataagcctgaatactggatattcctttaggaaatagaagtagacctgatggttggatgaagatagagcacaaacgtctttattatactgtatttggcctcaggccatcttatcagagaagttctgctctggcagatatccatttaaggaaaaaagggttttaaagggcccaaaatttattagagcagtgtagattaatgttttgtctacatagactgttatttgaattttctttttaaaggttcatttccttcagaattaaagttgaccctaagctcaactcacaaattcctctctgtggctgcttttgactttgggctcacttctggggcagatgtgatttattttcttgtgcttgttattaatccagaaatataatttcagcatgggcttggaatagtgctctgggacatgaagcagaagtgaacaatggaagttaggtggatatgagtcaaagaaaactgaccacactttctctcagctctcctttacagcatgatgagcctcaagagctgggggaggttttcattgctgtcagtgctcccaattcagtaaaaatgtttgatgtgagttggcaagtacatttgccagaggtggtgcatgagctccttgtgtctgggaatggagattttcatgatggtgcttttattttgagctagatcttcctgtctcagtctagcctctagctggtgatgaattattctctagagtaaggcttttctcacaaccatttttctacttttttttttttaggactatagggatggaggttttttgattgagagagaatactacttaattatatatggtatttcaaagctgctctcttttatattctacatggaggaatgggaaaatatgtctcacatttcaatttttctgctgtaagcctgattgtgagaagtataataagcctgttttctgaattctacctcctcaccccaaattcggtttcctatcagttgggcagactgccacagtgctaacctgaagcacccttgccccagatgtcccagagttgattagtggcgctgttggtggaaacaaggacgagtggatagtctagccccacatgcaggaggtgagactgcaggcaggatctttcctgccctgcagtccatgactcagggtgtagccttggctatgttacaggcacgatccagtttaacttcatggctctctaagcccccatggaacggttgttagtaggttcaataatttatctattggacctacttacagatatttattgaacaactactacatggaatatattatgctagatactgtaagagacacaaagaaaaaattcctattttaagagtggtaaaattgactaggaagacataagaaagtccacacataaccacactaggaagcagaaggtgtgtgtgaatgtgaatttgaaagaaacaatggtgggaatggggaagcatctaagtacttggtggggtaaggaaggtgatcgagaagagtgaacttctgttttgagtctgagtaatggatgggaactgttgacagagaaggagaaatagggtagaaatgatggtaagttggagatgagttttccaagtgaaaaacatgcagcagtaagacccaggagctcagaatacaggcagggacgagagactcagggttaccatggaatgtgtcaagtctgtgagggaaattggatggagtgataagaacagaggatttggacccgaagtatgagaaacatccacacttcagaaaattgacgaggaaggggatccaaagaaggaaagtgagaaaaggggaggtttgagaggtgggaagagagctcggccatgatagcatcctcaagttaaagggtacagccttagaagcttgccctgaactcaactccacatgccttggtggcagctcctgtaatattttacttctcttactgcgttatttgttcagcttgcctaagagactatcagcctctggaaggcaggaaactgctcttacttattttgacattcccagaactgattttaacaaaccatggttattaataactgacaaccaggagactcaaatataaatgataactgcaaaatattcattagaatatttgagtcattagaaattttctgaaatacagttttaatacagacaagactaagaagctagattgaggaagttaaaggaaaaagtaggctttggggagaaggaaggggcaaaatgggtttagatcactatgtaagattttgcacaactgaaaaggaagagcgagggagacacaacgcagggttatgggagacagaaactttattcatctcattgaccatagagcttggctacactaagagtaaggcagctcaaagggcgttggctaatgaagtggattattgggaggggtttactcttacagtttttagtggggaatactttaggtaagatgtctgctgggaatgggaaaggaagaagatgggaaagttatagtcagagagtggaagtaccaagtttgagatcttggactagaacaatgagtgtcttgtaacagaggtgtagaatgtgagcgtgcttgtgatatggaatggatgcggaggtctgtaaggttgagaaaagtaagaactcttgactcagatgaccttactggtcctcaacccagatgttgatatcatgcgagacaggagaggaaagagcgagaacataagccacatgcttgtcattctaggaagaggaaattggtccacgagaacgacagaccatggtgtgataatttatattatactatgtcttttttttaatttttaaaggacttcaattcatctatctacttttaatgtcagaaattagaatgtatttattgatttctttctctcgaagatgaggaattagcatacttctcatagctttcactcactcactagactttgtataaataatctgggtttcaatatttatattattgttatcaaatttataaacatatacatattctttaaaattattcttgatatttacaattttataacccaatttataatattttcaacttagttgtatgtgctacttgttttgtgttaactaccagtgcaattatgtcacaacattttcatttctgagttccttattttcattaacattttagctgaataagtatctttgaataattttatttcagaggagttacatgttggacccatttggttagtcaaaaaatgtcttttgatttagttgccttcatacacaagttgtatcttgactagatatcaaattcttgggtcacgaattaatctcatcaaattcttagacattgttcctttgtgtcttctggttactattctagggaaatgcaatgccagttgagtgtttcttctttttcataagtaacactgggctccctgccttctttttcatttgttgtagagttgtcaggaaaacctattatctttgcaattaggtcttcattctttcttctgcaaagctaaaatctctcttgatttttaatctgttcattttttgttttgtgttctgtgagagctctcttaaggttcttctttataacactgacttatatttcttcattgtcaggtcagtcctttatagcttcttctgcctgcctctcagcccctttgatcagagactaatgtcctatattattttttatttctttgtagaacgtaaacatgtctaaatgtcttgagtgtacaggagcagttctttctaaaatgtattagctcctgtaagtgaataattttcccagtgtgcttttcatcaatatcttaagcattacattctccatgttttatgttgtagaatcttttaataggtgccatgttgtttttttccattttactcattctgagcagagtaactgcctgcccatagacaggggaggtgggtgttcccctggatcccctcactctcaacctggctgcagctagtttttcctcctggtgcagtgaggggcttttatgtaaactggctcaacaacccagcagcctaaggtggggagagccagagagtggggcctcctagcaggagaccaaagcttggcaccactttcttctctgtggcgggggtcagctttctgaatgcccagtactggcccagcctccatggcaatccacccagtggctgagcctggatgcttttcagtgctgctgcctccggaatctgccccagatgcactgcagtatttctcattgctatagtggccaatagtggccacaggagcctggactctgcagttcttgaagtttttgttgacctggaggggtgaggtggagttcagtccattctcctcactgcagcagagtggactttctgaaacatgcattggatcgagtcatttctttgctggaaacacttcaatgggtcctccttgtctttggatttagtcccaaggctgtgcatgtaactccctctccagccacacctctcttcactcccctaatgcatttcttataattcaaccacaagaattttttttcattgccgcaaatgaaccatgctgtctcttcaactcaagcctatgctttctgcctgaaatactccgcactccaccctttctctacacactccctcacacacttctcccctctttcacaacctggcacgctcctcccaggccttctcttaaaagttacattctctagttcctctctattctccctactctgtactcccaaggcaataggtatctatgaaagcacctgtcactctgtgtcatcattgtttgtttggttataagtctgctgtttgtaagttctgcaggcagaagccatggctgttttgttcaccattataatcccattgtgtatagtcagagcctggcacattgtgtttgtgtgcgtgtgtgtgtatgtgtacatatatatattttagataaacgaatgaatgaattacagcattaaattttccagttgttcccagcccaacctcatctccaaattcacagctcttcttacctttctaagatactttagtatttttcttcagtgtgtaccgagtttgtactaaatctgtaaaattagactaattatatatgaagactatagttgacaatcaatgtaaagcacatatcatctggaacctagaaataactcagtgcatatgtttttactgctgaggttagtagtgacgttggggaataaaaagaaaacccgctctttctcccctagtttcctgtcagtggcagtgtttagaagaggaggactgcaggagctctaccgcagagggctgactgggctggtgtgtttagggaaaactcaggtttcagtcaaagaaggaagttgtacaccttaatgtagagttgcccttgaggcgtagttgaaggattagtgggcaaaggcaaggtgaatctgggtgtgatacaaatgagatagagttcagtgacacaggaaggggactgggatgaggggtttgcgtgtgaactggtggtgtagacaagggtgacggacactttgggtaggaacagaatagagatactgttgctatgagaagggtgagttgaaagataattattattttgggattaggataacttaaataagagaaccttaagcagataaacattcatttaacgaatatttatttaagcttgggattgtgtttcatgctggggattcagtgatgaggtaaacagctaccccccatttcttcatggcactgacagtctagtgagaaacacaggcatagacaatataattctccataaaattttgaactgtactaaatgccttgcaggaaacatagaatgtatctggagagcatattaataggcagaactaattgtgtttagtgacaagcaagtaaggtctctttgagaaagtaacattttccatatagacaatgagtaggagttggggagagtgaggataagactatcccaggcacaagggaataacgtgtgctagccactgaggagggaaagaatgtgatcattttgagaaatgaaaaaagnnnnnnnnnnnnnnnnnnnnnnnnnnnnnnnnnnnnnnnnnnnnnnnnnnnnnnnnnnnnnnnnnnnnnnnnnnnnnnnnnnnnnnnnnnnnnnnnnnnnnnnnnnnnnnnnnnnnnnnnnnnnnnnnnnnnnnnnnnnnnnnnnnnnnnnnnnnnnnnnnnnnnnnnnnnnnnnnnnnnnncggctctttagaaaatacattggtcatgatgcagggaaaccaggcctttgagaagtcctgaaaaagatgatgctgtctagaattagtggaggaatttcttgcatttattctgtgtatgaatatcctttccacaacttacattatccccttagccacatctatactcccagaccatcctctcagtaggcaggccctgtagacagcagtgtttatacagaatgtttcacccaactttattccgagcaggtgatgggacactcaagcttgttctttgttcttcagctccaacttcagcagcgtgatagaaagtctcctgtgtatggagctgaggttttgtaggatagaagtcccaggaatgatctgctctgacacagaaagagatgaaactccagaactcaggggcttgggtgactgctggttggaaaggtatataggagatggagctctcttgactcagccatagaggagaaggtagcagactcagtgcaagggccagccaagctcattttttatttgttcctcttgtggagattgttgttgcaatgagagttgacccttaactggaccagtaatgtgatcagactttttcccacagacttcacagttgagagatgactggaaaggatgagagtcgaggctcagcaccttacttttttcaattcctttctcttcttttctttctttctcttgttgtccccctctattttttacccatcacttgtagctccaaatcagattagtggtttgtgggtggggcccttgccttgagagagccataatgagctgtttgtgtccctgcgtgttacagctcataaatgctgactgtttcatggtctttggctcacttggctgaagcgtggtgctaatgaggcccaggccatggtttctatttcagcacagacctcttaggttcaccctgttatatttactgccacaggctgtgtccataattttttttttttttttttttgagatggagtcttgctctgtcgccaggctggagtgcagtggcacgatctcagatcactgccacctccgcctcctggattcaagcgattctcctgcctcagcctcccaagtagctgggactacaggcatgcaccatcatgcccagttaatttttgtatttttagtaaagacggggtttcaccatgttggccaggatggtctcaatcccttgacctcgtgatccacctgcctcagccttccaaagtgctggaattataggcgtgagccaccacgcctggctgactgtgcccataatcttacttgttcagcctgaagccagaggatggagcaacaagaaaagatcagcatggaggtgaccctactcctgcaaaaccaaaacagtatacttcctttgctaatggtggcttggtaatgccatgtcatcttcacttgtagcactctgagtttcttcctctttccctacatccctcaacagtcagctcagattggccttctttattttgaaaactaacttgatctgcagcaatctcacaccccaaagtctttatcagcactgagctattttcacttctaattattttgccaactaactgtgcaaagttgggcaagttgctatacctctcaggtcctagtttcctcatctgtaaaatgagcatgttagattagatgctgtccaaggtcagttccaccactgacaccaagtgtctagtacagtggctggcatagatactgaggtgaatggcagacacagtccctgccctcctggagcttatagcgaaatggggaagagactgtaaagagtaaataaatatgaaatcacagctcgtgatacattccaggatggattgaatggaatgatgcaatggtggagaatcatgaggagatgtgcatttggagacctactctattgataagacaggtacctcgccatgtgaataagcagggaaaaaatgtttcaggtggacagagcagcttatgcagcagcactgaggcaggagagaacttaatgtttgaggaatcaacaaaagttattgtggttagtataaactgtacaaaggagaggtgtagatttgagtatatttacgaggcaaaagtgatcaaccagaaaattgtcagtagttacaggtggcactcagtgtttaaggtatcagccaaggatatgctagtttgacatttcatttcagattattccagagtcattgtggcattagagagggtagtttttaaaaacaagttatcttctttctcttttgcccataggaaataagagcctaactagtccactgcctcagtcctgatgttaaaaaaatgacagtagcctgcaatatctggcaggtggaaattactgagagggataattattgctcttgaaaacttgcctaactgagctttgtgcaacattttgggagttcaccagcaaagtttgtgtgttgacacaggtgatgatacatgctgacacttgtttgtattgaagatttagtagcttggtaggacatggaaacaatacagctctcctgtttcaccaaaggcttttatttgctaggtagcctataacttagtgctctctcctgctttccctactaacataaagtcatttgcttttaatcccttctatgttctattggccaacttaccttcaaacacagtatcgatcatgtctttcctcatcctcctttacttgttgtatcaagttccgaattcatactcgaagtcaaagcctcaatgacctcccactttttcttcttctaaaaccccagccaaagaatacactgcagttattttaatatgtttaagacttaatcctgtattcctctgtaaatcttcaaccaccagcccaggctggtgctttcttgcaccagtgggataagctcaatgaccgtagagcatacacgttaagacctctaggtgatcgccaagaacttttcccactcaaatatctagtgaccttctgcctttattcctttctaatacgagtgttccttaactgtcttatgcacctatgccttctcagggtgctgtaagaccctgggatcagcgacctcatctgtagattgtgttgatcacatccagggctgaatactcaactctgctgcagtcaaagagcatcagatttgcagtcagatcaatccgggtttcaatgcagcactctcactcaccaaccgtgtgaactttggaagattttatttccttttttttaccttcctgaacctgaagttttttatttttagtctttagcattggttttctcctgtgccaggagggtggtgacgtgaagggagttgttatagcagatgttccactgggaattttagaataagcaagttttatggccaccctggttactgtttttcctattctgaattttagaaccagttgatagaattttaatagggagaaaataatctggcagaaataggactaggaggaaatgtgaatttgtagaaatgtgcctgaaccttagagaagtgtgatccatccagtagctaattacttataagccactatcttcttggatctctaaatttcctgtccctaacaagcactatcgaacagatgcatggtccaaaggtgttcagtgaaggcagctaatcttcaaaattcagtctcattcaaaaatcagtggactgtacctaaaaatacatttcccttttagacaggagtttgcagtcacaagtgtttccagtaaccaattgtttgagtcatgatttgagtcctcacctcctccatcctgtccacttccccatgtctgtgtgcccttgggaagcccgagacatgcagagatggcttgatatgttcaggttctcacctcaggtctttgttaagaattttagagtgaggcagctccagttcaaatctcaactgtccttcactcactggcttacaaaggcaaattattttacctctttgaggctgtttcctcagatataaatgagacaatttttatgggagcccaagcacagtgcttgcttctcagtaggcagtcaatggctactggtttcctctcccaagagtgccacatttcctttcctttatttacctagtttgtcttgctacattatttcagtgtctgtttattatggtgcataagaaatgtatacaaaatagctttaaacacattgtgtcttatagtacccaaaattatcacaaagcctcaataaagaaaaatgacatctaaattgttcacattcagcaagtcagtttggttggtgggcagtggatatttgagttagcataagtataatagatgagactcagcaattttcatgttgcagtagctcttcacctacttcttggtcatgttttcatttctcaatcccacctgcatcctaataacacagctgtcattactttgaggtaccatttctgctagcactataagacagcaaagtttctgtaataaatgacatcatctaccctgagggagattattgccggtgagctcactccctccctccttcactctctgattccttcactcactcactgactccctccctccctccctttcttaccttcctccctccctttctcacctccctccatcttttactctctcacgcattccctccctcgctcactcactccttgcaatcactccctcactcactacctcagtgttctcactttcttattcatcttctcccttccttcctccctcatttccctcattaccctcattacctcccccattcactccctcatccctcactcactctttctgtattaatactttgggatgcagttgacacagcctcgtttcaaattagaaagacctgttgcaagaggcatctctcagaatggctatgccactgagtaggcttactagtagttgggcttcagtagcaattggaaccaacaacttgaatgccaccatgtttttttctctttgtgcacatcttttctatttttctttttttgagacagggtcttgctctattgtccagactggggtgcagtggcatgatcatggcacaagtgattctcctacttcagcctcccaagtagtgcctgcaggctggtctctaacttgtgggctccagtgatcttcctgtttggcctcccaaaatgttgggtttacaggtgtgagccactgtgcctggctctctgtgcacttctgattcacccatatcactttctctgcagaccagcctcctcatctttttggtctatgtggcaaagtggtcctactccaataatttgggagagatacagtgatgtagcttggatcagatgcccatcttgggtcagtcagccatggccaggagggtttgatcatgtaaagacatggttgctccttcaagaattatatggctggagttaggagaagagcatggaagggttatgccgagcacggagttccggagacatccacatacccatcctgccatcctaggcagttggctcttgctgggaatacaaaagaacccctctaaactgcagccaagtagtgggagacagatgtgcaaccaaataagtgtgatagagtgatattggttctatagtaatggaggtacatgttagataggaataaagaacaggcagtcagttaggttaagtcagacacaactagcatccgcgagtaatgatggctaacaggccttctacagatacatgagccagtcaaattgctaggtattctgggtctagagatagccttggcattttccaagcacaaatattgtgttctttttttattaggaggcctctttatcagagtgccttttaaaattatttgttgagttttatttacaaaggaagaatgaaggacaccttgacatatttttattttcaacaacttgtcatgttttagagaattcggatgatctaaattttagttcctttgatagctctctaaactgtttttaaaagacctcaaacaaaaccaatcaccactttattttatagctcatatgatctggccctatactgtttttgttaatcacagattcctggttgtaagttgaagacattatcttgttctttgttaagggatgtaggagcctttgccttagtctccattgttgctatagtggtgacctgcaacctagccagatgtgggctcatgtttagcttcctttagtgtgatctttttcaggcagtgcataccagtcctttttccatctcctagtacattgggtggactttctttgtcttcttccacaaatccccatcctttaagtatgggtgcctcaggctgagcacagcttgctccagtctcattattcttggccttgcccttcacatccatacttcaccagagattttcaacatctttcatgtcttctctgtaccctatgttgcttgccctaacattttcaaaaattagactttttattttcagatacttgtagttttgtgcagttataagaattaatatagaaagatttcctgtaccctttatcaagggtctcccagtggtaacatcatcttatggaactgttgcataatattacaaccagtgtattgacgttgatacagtcaagatatagaacagttaccctaatgtttggcatataggttccttctcattattttttcttactcatttttatactcttctctccttgctcttcttacttatatgttcattgacccagggattagttaactcgagggtcctacaggttttaccttctctttgataagttggctaaaccctaatgttgttagagtttctaacggtagtaactattcatcttgaaacgatttgcctggaaaaaatatcatttagagggctcaaattggccttaaaattcatgtgaagacccagccttctggagctctgcttgccttaatttcagacaggtcacatgaagatgaagagtgtggggggctggtatggtactagtcctttgagactcaagagccctaatccaaaagtaatttccccctaaaaggacagttctgcacagaggatgtggatgaatgcctgctgcagcccaatgcctgtcaaaatgggggcacctgtgccaaccgcaatggaggctatggctgtgtatgtgtcaacggctggagtggagatgactgcagtgagaacattgatgattgtgccttcgcctcctgtactccaggctccacctgcatcgaccgtgtggcctccttctcttgcatgtgcccagaggggaaggcaggtaggtagcagaaggacggatctagaaacggggaaggggcagggggcattcaggactctgccttctctttcatcccaaacagcatattctttgagttaccatctatgggaacatatcactcaggactgttccagaaatgtaacctgctagccaaagtgctatgaagataatcttcctctttaggactttaggctctcttctcaactctacatactttagtttttcattccaaaaaaggaaagttagtaactattgtctttggaacatctgctgaagtccttaagatcttagactgaaaagcacctcagctattaagataaaatggctaataaatggatccacaggcttcattttaagaagaaaccatctatttactcagaagaagttggcaggagagaaacatttaagtgccttctaaccctcaatgtctatgaaaatattcccctcagggaagatttttacatgctacaaagttaacattgctctagcctctcaatttaacaactactagttctaggagaaggagagcaatgtaaggaggaaggtgatgggagaagataatttagctgggagaactttctgcccagcagttttgaaatgttctttcatggaggcctttccaaaagctctagctccagctttgtggaagaagctttagttacctcttcttaagttaattgcagactggaaaatccagttcccatgtgaactatataaaacaggaagcctagtaatatcttcagagacctggggccacctgaatcaggaatgttgatgctattaaaagattactctagtagaggctgatggtgttcaggtggccccatgatcatcaggtagcataatattggggaagtaggattccggataaaatataggatgtatggaatatttgagacatactaaaaattacttcttgtttatctaaaattcaactggacatcctctattttatttgctaaatctggcacactatctggaagatagctccactttcctgtctccgtcttcttatcttctggcctgtagatgtctctgtcctggaggagaggtctagctgagagctcagggtcagagtctagggttgcatctaggtgctttgctggtggccaagcatgtccccaaggtagggtcaggcaaagcagaagttgcgtataaatctccatgttggattctgaggaactgatcatgaggttttccctcctgggtgaaagagaaagctcttccccaagtgagagacattttctcttagttgtcctttgccccaccctgtgacaggtctcctgtgtcatctggatgatgcatgcatcagcaatccttgccacaagggggcactgtgtgacaccaaccccctaaatgggcaatatatttgcacctgcccacaaggctacaaaggggctgactgcacagaagatgtggatgaatgtgccatgggtgagtaagcagaactttttctgttctgtgaagtgtctgttgagctcagcaaatgtttaaactgaagcacattttactgtagaagcaaattacatacacccaaacctcagattactcttgctacatggccagtgtttacaagtgacctttcagcatagccataaccatatattccattctggggattaactgtatgaaacgtatgtacttgattcttaatataaagccctacctcaatgacagtttgggcagaaactgcaatagcagaaatgcataacagttgaggatactccgcttttatttctttttaaattaaggaaaaaaaaatagaaaattgggaatgatattattgaaggcctggccctgatgctataaccatcagatgctcttctattgttcacatttgtggaaactcaactgctttgatcccagtaattggtacttgtgtctttcagccaatagcaatccttgtgagcatgcaggaaaatgtgtgaacacggatggcgccttccactgtgagtgtctgaagggttatgcaggacctcgttgtgagatggacatcaatgagtgccattcagacccctgccagaatgatgctacctgtctggataagattggaggcttcacatgtctgtgcatgccaggtaaatgggcccatcagcatgttgggtctagagaggagggactgttctgaacttctcttggtagagcattcagtatactattgcagtctgatgagctctgtcagcatttgatttcctttgctgactggggactagaggaagtcagggttcacaagcaaaccttccttactcaaagagtaaggcagtgctagaattcatcaagctatgtagaccaaattaaacaagcctgttatatcaaaatccacatgtaatagaaaatttcaaaaatgatttactgtaagaatcctttaaatagcaagttttcctgataccttcatgtaattacaaataccataccattccatttatataaataaattttatccacaattatataggaagtttccatttatctaaagtgcagtacatgtttagttgtattctggagctcttctgcatagaccatgtctttaattttgagaggatacagccaaatccagcttgaaatgatggctaacattggctgctctgcctgattaaggctgccggccactccagccttgaaaggcactgctgaccttgaactgcaccctgaaggcaacaacagctccagctcagcttgtctttaggaacatagagtggggacattttgggccttccacagtccagaaagtatggatttatcacagaaaatgtggagcagtccttgtttatatgctaggtcttgccaatgtcttttaatgtaatcccttcccgcttttcacagtgacatgggtatttcacagtatgccctgtcctgcttgacacttggagtgactatttctcatcatggcagagttccttttttctctgcagaaatgtgtgtactcgcaaaggatgtagttatcattgcaaatttgtgcttccttgtctggaatacacctttctctctctttaagccacttgtgtggtctgttttgtttaggtttcaaaggtgtgcattgtgaattagaaataaatgaatgtcagagcaacccttgtgtgaacaatgggcagtgtgtggataaagtcaatcgtttccagtgcctgtgtcctcctggtaagtgcccacgacctggccctgttttctcttaaagcacaaagccaactgaccacagggaagagagcagggagagaatgtgtgtgggctgtgcatgaggaaatcattagagtaagtgcttggtgataggagtgtgtgtgtacagaaatagagaatttgttttagctactatatcttacaagtcctttgtggccaaaagtccaagtctattcttgaatggcccatgacctcttcgtctgtgtatatatttcagaatgctcatacctcacagaagccttagttgtaggctattcgggattttatttttttcccatgggtcatattcttgaaggccctctgtgagactgttatttttagacatttcacccatgagttcagaaacagacaacacatgccaatttttccaagattctctgtctctccttttttttcctcaagctatttttgaagatatgccaaattgtcctccatagattgcatcttaccccattgtatcttcagagagaaggtttctgttgcctctgaagctacagttacttgtttgaggttccacctataaatttcacttcctacatccttcatttagaagtgaagtctgtctgtgaagaagcaatggtagagacacaccacaagtgcctctgattccctgagtgtcacctggttattccagttacctgttggggagaataataaagcataggcttattgacccattggtataagccctgctagtaacctaacatcattctcatggtaaagggagacacaagataatcctttgactcatgttaccactgtccctttttgaggtttcactgggccagtttgccagattgatattgatgactgttccagtactccgtgtctgaatggggcaaagtgtatcgatcacccgaatggctatgaatgccagtgtgccacaggtaagattcttctcacttttcatctccttggtaggtccatctgaacaaaatagggtgattgtccctgtcctctgctagctgctgtgccaggccagtccactcccagaggctcctctgtgtttaggaagagctgtttctaacaaattttttgctgctctctttttctgcagcacctgcctcctccaccacaacagtggtctggcccagatatttccatttggtatccatgtctttctgggacagattttggcagcagtaagtttccagctggctagattgactcatttaggaaagagaagaaatccagttgaaagctatttttcactggggcttctcagcaggaggcctggctctgtgtttcttgaagcaagtgactgaaagaaggcccagaaatttaaaggctgaatgtgtacaagtgcaggggtattctgcataaaagacaccaaaataggattgagagtcaagtgtgtaaatgacaggagagagagctctcactgggaaagtttgggtcctctttgctgacttctgcaactagagtcaaaaacgatctgtgcacaaatattctgcatttctgggtttgtaatcacattttgtacttgggattggatttcagtaagccagatgttccctattacacatttccttttacacaggcaaatattatacagaaaggctagaaattattagaagtgaacttctttattatctgactgcttgagaaagaagttatttatgtaattcaagacattaattttagagaatggagtcttaaagattaaaggcatcatgcatataatttatttctgatcacagaaaagcaaatttaattgtgaaaattaatacaaaaagttaatattttaattattagacctacttagtttaggacaactcagatgagccactttctttctttttgcaaatagttaatgcttgtcagagaatccagattttgtcttcccctggccagattcttcttgtagaggataagtttcaaagagattaaaaacctttagctcaggtttaaaagtggggggaggactcctggagtcttttagggaaagatataatgtttgtctatttacacctcgaagaaaggaaatcttacttgtctctttttcttttaaattctcataacaggttcattcattttattcaaccagtatttatttaaaactactatatatgcatactactctcagaggagttgagagaagtaaaataaagctctcttacctccaaagtcagaattggggacataagatacatgaaatcattaacctgtatattggacttgggaagaaagaaatacaaagataaatatataaaggaaaaatattttgagctgttatacctgaagcctagtaagaaatgaaggtgcagttaaagcatctctgcaatgaaattattgatcagttgcgaaggtatttcaattctaaaatttgatttggaaatctttattttaagcacctctctccaggcatactttctaaatcaatgcagatcgtcgttttctactgctcaagacctgcagtattaattgaccacacatcgaatgtgtagagtaaatggatgtagctacacttgtgttctggtgtggaatatctgccttggtctttgagaatccttgataaaattctttccaaaggtttcactggtgtgttgtgtgaggagaacattgacaactgtgaccccgatccttgccaccatggtcagtgtcaggatggtattgattcctacacctgcatctgcaatcccgggtacatgggcgccatctgcagtgaccagattgatgaatgttacagcagcccttgcctgaacgatggtcgctgcattgacctggtcaatggctaccagtgcaactgccagccaggcacgtcaggtaagcccactctgtttatgtttggtatggggttttcactgtttctcaaatctgtttacacagatgtttcagactgttggcatatgctcagatacctaaaaaacagtcctgattctgagaagcacagccaaagccacaaacataaatgtctcaaggcaaatggccctagccagtggagaagtcagagacaatagctctgcgaatctgatgattttgtgtgtgtgtttgtgtgtgttttgttaaatagaggcataccacttcaaaaattaaaattaatgatttaaaattgaaaaccctcttttttgtggctatattatctttttttctttaagttccaccccacccagattaataaattcagtccttccttccttccttccttccttccttccttccttccacctaccttccttcttcccttcttcccttcctttaatgtattttctctttcacagttcagtctctttattgtgacatgtttcttcagtcacttgtctctggtggggccttagccatcttgggggattctaaggaagaggagataccttacaacacaccacagtaactaaagtagaacgcagagctgtcatttcctatcctcggagttcatcattgttctctgaccttggttgaatgactccttgttggtcgtgaggacatgctgctcctttctggggggatgtggaattattttctcaggcagcagcatctcacaggtttggatggttctgttttacttattagatgaatgattatggtcacaactatggttagtggacagagatgtactatgttccagatcaaaggaaaatgtattagtggaagattaaccaatgtgtgcctttgttagaaggaaacctgccaatataaaggagtgatttattgagaactcattctggatgtaaggaaaatgacctatgtagagagcagaggtggagagggtagttagctaccctcattttcttttactgtttccaaatccatttcttcaaatttgtcaaaggctctggtctttacccaaggcttcatacatgccaagtttgaaaacaaagtcctttttgaattgctcaagcatacgaaaaacatcccatgccgtcacagctgaaaatgcctttccctccccacatttagataactcactaaaagggctgaatagatctttgtgaaaacttccaaaagcaatttgcttccgggctgttcctcagacatgagaaattacagtaggaaaagaaatttgagagatttacaagcaattgactggatgtctttagaatcgaggggctttagactttgctatcattcccatcataataaacatactggaaacctgggtgagtggtgggttggcaagcactttgttttctctggcattatatcattataccaggatatatcaggtgttttctggggaggacagagagggtatggtataagtagctgtcactgagaaggtgagaagtcaatatgagtgatctgtaggcagcatggaaaggaaggcccggaatctgtcagaacctgccaaagatgttcctgcagttatttggagaattaaagcaagcaacggtcagacaacattaaaaaaatgttgatctgtaatgggtggagaaagacctggcatgtatcagggacctgggtggaaaatccattaaaagaggcattatgaatagagtctgaagttctagagtaagaattcctgttccacttatatggcctaagttggtagtttggtgtttggataggggagtggatggaagaaatattttacagtttgtcagctaaaattgtggtagtcactcactgggtacttaaagtgagatatactacccagagttaccttcagtgcgttctctcatctgtgcttttatgatagtaaagttttaagtaagtttctttgtgtttcaagtaacagaccaacttgagctagtttaagtcatcatttacaaaaaataaacaacaacaaaacaaagaaacagaaagagcttagcgaaagcacccagagcctcttatagattccaagcaattgaataataaggctttggagaaaagaataggaaactgggcatttgtagaccagaggtcacacagtctgtgtttcagtgttgtaatgagagaatctcattggcctggcttgatccaggcatcttttcctactcaaataaaccatggacagggggctggagtcacattggatcatcagggcttcattgggagggggtgctgccttcttagtttgagggtaaagcagggttgtcagtcaagggttagaaacatctcctaaaggtatccactcctctgcagggaatatggaaatctttccctcatttatggctaattaggcagtatagcctcattaatcatgggatgacagtacagtgtggtggaaagaggatgctgtggagccacacaaacagggttcagagcccagctttcctgccctaatggtggcactgtgcaggtcagccctgttgtctgtaaaatgggtgtaacacagactaatgtgcagggtgggtgacagggttagagaaaacttacatgacaggcaaagcagcgtactttgctcatagaactcaataaactgttcctctgtaattattattaataaacattattgcagagtatgggcacagtggctcatacctgtaatctcaacattttgggaggccgaggtgggacgattgcttgcgcctgggagtttgagaccagcctgggcaacatagcaaaacctcgtccctacaaaaaataaataaaaattagccaggtaaggtggtacacacctgtaatcgggaggctgaggtggggggatagcttgagtcagggatattgaggttgcagggagctgtgctcgtgtcattgctctccagtctgggtgacagatcaggaccctatctctgaaaaaaaagaaagaaaaacaaagtatgagtgaatcacaagtatggcattttatcctggatgttttgttttcttatattctcattaccagtttttatttttagtctttttaaactaccaaaatattattctgtgatactcagaaagcatcactaaattcatacaaaaataaaaagtaaatatnnnnnnnnnnnnnnnnnnnnnnnnnnnnnnnnnnnnnnnnnnnnnnnnnnnnnnnnnnnnnnnnnnnnnnatgattgtatactgttaatataaccaaactcttccattcatctgggcagtagagcaaaaataaggcagcttacctcaggaggaagttactagactcaagatttatcctgaaatttagcctacaatactgacaggcagtgtcaagctcacagtgatagatacaaattccaaaatcctaattttgatttgaaagcttaagttttatctttggcaaaaatactgtcaatttgcttttcctcaaaatgacaggtttgctgctttcacttaatatttgctaaatactcaattctgattaaccctggtttgcctgtcagttgctctttcaattaaaatggggtttcatgaagaaagcagctatttcaactcacagctcaaacaatagcattatagctcttcctggagacaactctcatacttggcatgccacagaaatgctttatgtatacttccatttcatcacatggagtagtagacattactcaaggttcgagatttattaaaattataaagttactaattttaacttccaacaaagccactcttgagtgaaactggcgtttttgcttgtttaactgtggcatgtggaggtgagcagtagaataattatagtacagtctggttctactgccttgattcatgctgatgtgatcggtttcaccccattgcctctgcaccatcagtttgaatgttagcacagtgaaaaggaaagatcatggctaagtatgattaataaaatcctttggacctcctgtatcttcctgaacgagtctgtggactgcattttgagaacttctgctttattctgtccagggttggctggaattcaccttagatttcttaccacgttgctgcatcacaagcagaaagccttagtatttctgtggtaacattgaatggtttccgttgggttttctcttccaggggttaattgtgaaattaattttgatgactgtgcaagtaacccttgtatccatggaatctgtatggatggcattaatcgctacagttgtgtctgctcaccaggattcacaggtaaagctccttttactgcaaggcccctccttcagccctatcactttgggaatatagcatccaaaggaatattgcttttcaagtgtttcctatttctttgtcactctggagggttagtagtctgtttctctgcttctctagatcagttttctgttcacagaccttttctaaactgaaacatacttttcattaattagagtttttcgattatgtgtttatttgctgccagaaaataattcctagacagaccataaattgcctttgctttgcttgagttacattgcttccaaagctatgtttattgattacaggtagtagtcaaggccttccgtaaagacatattcaaggtaaaatcttatgaaaatactgaatgcttgcttctgggtacctcctctttgacatactcaaggtagaattctgtgaaaatactgaatgcttatttctgggtacttcgtcttctgaaatattgttggatgaggtcagagcttggggagaccaccctaatttgggtagcatgagagagatctttctgcccaggaggaagaaagtaaatggctagaagaattttgaatataacttctcttaaagtatgaacagcctaggcatttacacatacacacatgtgcgtgtacatgcacacgcacacacagacacacacacacacacacacacacacacatcttctctctctttacttgtcaatattacctttatcttttaccctcctgatcaaaaagtgctagaggctactactgcagaaacctgaggcccctcactgacacacctgagtttcttcttggcatcatcagaaggcacacactgtacattctgttcttcctggacagtgacacacagaagcagccactaacatgttaccctttaataatttccatgtggttgtttgtactcgaatgtgagaaacacccttcagagtttttgatagagtctgcagaaagcagccagagcaaagtgaagtgaatgtccaccattcatttgccaagaatgtactttgttctctatttcacaagaatttctcctatttggtatgattgtggacattagaaaggaaagtttgcacccaaatgggtcacagtgatccctgttcagtgaaagatcactgagaagcaaaatctgatgaaaactgtcatacccaatgcccagtgctgctgtagtagcctgatgttctgcatcctgaaacttgttactccaagatcaagtggcagtcgagtgaatacacaaaaatccctgctagataggataataggtacattgttgataagtgggtaatacaaagagaataggtaacatttatgaagaactaattttgagctaggcactaaattgtcaattgtcaccgacgttgagaatacctacagaataagaaacccagaacacagagatgttaagtaatgttaccagtgcacagcagccagaattacatcccaggcaatctgacccctgagcccatgctcattcccactacactggacatcctgattaggggcctgttgtgtgtgtgtgtgtgtgtgtgtgtgtgtgtgtgtgtgtgtgtgtgtgtgtgtttatataaggcttctactggactcatttttttcagaatgccaatgaatcatattctttctctttttaatattcagcaaaccaggaaggccaagaagggagaacataggctaaaaatattctaaaataaacctaaggtgtagcatgaaaccttataagcaagaaatggaatgttttggttactaggtggtcccctgttcatggaactgttgcctatgtctgagatgatttttttaatcagctgctaaaaacattagagatgactgtggtatatactcatgagtggtaaatgtgaggagttttattcttgctcttgttttattttaatatatttttcccatatcattctaataatagctttgacagctttaaaggggatttttttgttttaatactaagttatctgttctcttagaacctttttaaatgggggaatgtaaggaattatgtgatacttctataaactgcttttcagttttacaaagcaccttcatgcccattatcttcctgaattctcataacaatccagaaaggaagttctactatacccgtttaacaaataaggcaactgagagacagaccttgatgtatatactcatggcctctgccagtgagttgcatagtgaggactgtgagttcccagaaggcagagacctcgtttaatcatctttatagcaagtgtctaaagcaatgtctggcacgtaggaaacgcttagtgaatgttgctgaatgaacgaatgaatgggactcaaatatagcgcttttgctagctaatgccagactctgaagtgtggactataccatgttttcatttattaaacaccaatttattgagtgcctaagtcagaagaaacactgggtaacttctcattttagttacctagcccaaaaaatttcttggccttccactggactttcctcatgctcagtggaaactccttgagggtaggaccttcctgatggaacagctgtcaatcaacatagtggactgcatttaatgctttcagataaagatggcttgaaaatttattctgcaaagaataaatttaaaagcaaataaagaaaacttgggaggagtggcttctgaggagacgcttccaagaaaagaccaaaaatgaagaaacctttttcctgttatccttcactatattacgggccgaggctaactgtgtggttgaagagctctggttcatattttggtgccactgacaaacagctcaaagaatcagtggttgaggccaaggaaatagtatttaaaaataagctattaataaaacacttaagaggaaaacagcagccacttccagattatgggtttttaccacaagaaccaccaatgatggtttagagagcaatggagggtgaaaaaatgtgaatactcatacttcataggagtgggtatctgtttcatttggaatgtcctattctaaatacaggattgctctttcttaaatgagaaaaatgcatgttttcaaaatcagaatcagaacattgtgttctttgaaatatataaattcatagcagttgcttgatgccactcatttatagaattataggtaattttaacatttcatatcattttggaatatatagttaaatctcagttactcaaaatgtaacaaatggaaacacttgtataactgacccgtattactttattcagcctaagaaatatcaaggttatagcagacatctttttaaagagcaatcttggctatgtcttggaggagcaacatattcacttcaatttcacttactcccagtatccacattgtatgatgatgataagtaataattgtctagaacagaatttctcaaaatctagtttttacaccacctacatttaaaaaaatatggtttgctagattctattcatcacaatctatggtgatagggcctaggaatctccacttaaaataacaacttaaagtgatgattttgcacattaaagtttaagaaccataggtctgcagtgacagactgcattattttctctaatatcagaagacaacaaaattatactttgagactctacttcctgaggtcaaaaaaaatggattaatagactctaagaatgaaaacaaaataacctttctttacaatcaatttaattattgaattaagttactagcccattcattaagcattccagttaatttggatttaccataaatagaaatgtaagaggctgagaaaatgaatttgtgctaaaccggcacaaagcatgttaatgaatgcttctttgagttgtactcagggcagcattaagaagagaagccttctttggtaacatttgacattctcttcttagaaccttgtgaagtttccccatttctgagttgaaagaaaatgccaaattgctataacagttttccagccttttgttaactttccttgattatcaaaagtcaatgctctttgctcctttgcatggcattaagtgttattgggtgtctaattccttacatcttgacatttggtgcctcaaggcaccttatggcctgagcagatgaaggatgtcaacataacgtgtcttatagttctgggtctatttcctaagcatttaggatgtgactaacactgtcccccttctccacagggcagagatgtaacattgacattgatgagtgtgcctccaatccctgtcgcaagggtgcaacatgtatcaacggtgtgaatggtttccgctgtatatgccccgagggaccccatcaccccagctgctactcacaggtgaacgaatgcctgagcaatccctgcatccatggaaactgtactggaggtctcagtgggtgagtagctgccccatgtgatagtttcttattgacctgtgttaagccagttggcttgtagtactggtgacagcctgaagttgtcaaatggggctttgagctgaaactttgctgaagatttggtagtctgcatcaaagccttctgaattaccatttaatccatggaagctggcccctcccttccataagtgaggacctagatggaacataaggaggaatgtctcccttatatgggtcattagcaaggacctcatgggaggaacccatactcattgtatgaatctttggcagttatgtttttagtatgtattactggaatgatttctgaagaatgttctagcttttgattttttttcccctgcttaaacatagctcagctctgttctgtcacagtgccagtgtgtgctctgaagtagggccgcttcagccaactttagaaatgtccctgataaaacatttgcaatttttaagccccacagacttgtgtgatgtgttagtgattttctagaatcatagagtgaccttaggtctcacgagacgctcttatactcttgctgcatttgccataggatatggctttggacattttcctttgccaaactttgaaagatgaaaggataaagagtgtttagtggcaaatagtaaataaagttatttaaaaattaattaactcagtattggtgtttcagagtatagcagccttcaaggcacccttatccatctctcattttcttaaaattctcccgataagaaagctatcatttcctgatatcacattctaagtgttagtgatgttcaaattggagattatatttacaattcaaataccttcattcctgtgccttttcctgcagaataccctaggtgctttctgaagccaagtgttaggtcaagacaaagcatgacttagatatgaaatatcccaggagcatcttagagtggctcagggtccctgacagtgacctaggtatctatttggcaccaaaaactaatgatcttaatgtttgctttactttagttttatgtataataacatacattgtgcagatttatccatgatattgtttccttcagagtggcccaatatattgtagaaaccattgtttacataagaaatttcattataatttcactaacttagtgagccaggaaagcaccaagaaggtttctttactggatacacctgatagggccacatggtacacaccatgtgcaaggtgatgcaaggatagttccatgaaagtagaaatgagatcagtttaccccatttcttcaccaagtcctgtatttcactctatgactcaatcatacgtttatacctcctatagtaaaaagttttgtcttctttcagatataagtgtctctgtgatgcaggctgggttggcatcaactgtgaagtggacaaaaatgaatgcctttcgaatccatgccagaatggaggaacttgtgacaatctggtgaatggatacaggtgtacttgcaagaagggctttaaaggtgaaaacaaaagtacatctttctgcgtctgctctttgtcttcttgttgttgcatactgcttgactcacttcttagtttccttttctctttttcattcattcgtgtaacaaacatattgagcaattagacttgtaaggcacttggggaataaaaacatgaatagatacaatttctaccttcagcctagcagagaggtgacctattgaaatagtaattttttttttttttgacacagagttttgctcttgttgcccaggctggagtgcaatggtgcgtgatcttggctcactgcaagctctacctcccgggttcaagccattctcctgcctcagcctccctagtagttgggattacaggcatatgccaccacacccggctaattttgtatttttagtagagacggggtttctccatgttggttaggctggtcatgaactcctgacctcaggtgatctgcccacctcggcctctcaaagtgctgggattacaggcgtgagccaccgcacccagcctgaaatggtaatatttaagatgagcagttaagactccagttttacagcattggccaagtgtctaattataagcttcctggtccaggtttgagtctatgatagttcaaatagatatatggaagtagaatgaaaatattatgcttactataattaagatagtagtaatatcaaggaagaatccacatgttcagaactctttcaacaaactttttaacacattgagatattcttagttatttagtcatctttggtctacaccggaggtcctcaaccctcaggctacagaccagtacctgtgtgtggcctgttaggaaccaggccacacagcaggaggtgagcagccagtgagggagcaaagcttcatctgtatttatagccactccccgtcactcacattaccgcctgagctctgtctctgtcagatcagtggtggccttagattctcataggactgcgaaccctattgtgaactccacatgtgaaggatgtagattgtgcgctccttataagaatctagtgcctgatgatctgtcactgtctcccatcacctccagatgggactgtctagtggcaggaaaacaagctcagggctcccaccaattctacattatagtaagttgtaaaactacttcattgtatattacagtgtaatattataataataaaagtaaagtgcacaataaatgggatgtgcttgaatcatcatcctaaaatcatccccccaaccccggatcatggaaaaattgtcttccacgaaaccaatccctggtgccaaaaatgctgagggactgctggcctacccaacaaatggatagtcatgggaattgtgtaaaatctgcttctgagttatcactgttgtatttctaccatcagttttctcttggaaactcacaaaagagagccgtgtgggtaaatcattatatttgcactcatctgtctatttattcattgatttcctcactcaaatattgtgctatgctattgtgatacatcagcatgttttagagccactttatttgattacttgaaacatttctgagactgtatttcagccattaattttctgatatattgtattacattggcaaagaaacttgtagatttcaaaacacttttatttctttatcttctgagacttgcttatcagtgaacaaaataaaattcaaaaggtaaaatcccaaattatatgcccagtgggcagcagaatactccttgaacccatacctctgcattcctagaccatgttttcttttccacagtgccatagtttctctactttaaggctctgtgccaggccctattggagatgcaaaggtgtgcagtatttgggtactgtgctatctccactaattttttattccttttatccttttcttagtgggagaaggtttcatgccttgaatcaggagaaaacagctttgtaacttcaggaagtaccacatgggtggtagacatggtgcctatgaaaaaatgggcataaaccagaggctttgattaatgtattcaaaaacatcatcccttttcctgaccagaaatgttatatacaaagagcttatgtttatcatgcaacaagctattggctgggtgcgatggctcacacctgtaatcccagcattttgggagggtgaggtgggaggatcacttggccacagaaattggagaccagcctaggcaacataacgagacctcatctctacaagaaatttaaaaaatcaagtgggcatgatggcatgcacctgtggttctagctactcaggaggctgaggtgggaggattgctgagcccgagaggtcgaggctgcagtgagccatgattacacaactgcactccagcctgaatgacaagagtgagaccccctgtctcaaaaataaataaataataaatagatcctgcaacaagcttttgaaccaagaacttcattattgagaagttatttgtagttggaggggcattaggctttcagatcattagaatagactgtttttccattcatcttttcaactaattgctgtcatttactgactgtatttcagggacatggggctgaaatgaatgaacaggtatttcagtggcctgaagaaatgaatgcaatttctgatgtgttcagtttttacccctaaagagaattggttagaaattgatgaggctgtcagaaagttttactgtttttggttttttccttttgtctacaggctataactgccaggtgaatattgatgaatgtgcctcaaatccatgcctgaaccaaggaacctgctttgatgacataagtggctacacttgccactgtgtgctgccatacacaggtgggtcctggaggtaccagcagggaccagaggggatacttgaccttgctttgtcagtgcctgagtctcagtgcccaggtctgtggggctgtaatgctcctccgagggctcactcctcagttgtccttcctgcctttactgactggatcttgagctttgaggaaacattgtggcctcctaagatgcaagtggtggacagtcatttgcctacattgtactttagtatttgaaagaaatttttttttaattgtatgtggctggaaccaggcacatagatgatggttgtctatcatttgaatgtttccaggacattagctatttgtcttagtttcaataatacagctaccacttattggtaatttactatgtgccagacactttttgtactttggattatttaatgtattcctcaataattctacaatgtagaagttcctattgccattttacacatgaggaggctgaggcaaagggagcttgcttgctcaaggtcatataggtaagtagtacatctaggatttacctgtaggtctctttgaatctgaagcttttcctcttaatggcctttttacttcccacattcagtaccgctacatctcactcagaggtgtcaccccttcgatggctgttacaactgagaagacgtgagtgtgactgcatgtcacatagctgttctttgtttcagttgttatgtttggagtgtgcttgggacatttattctttgttttctactggcttattatcgccttcttgtgattggttatatttctatggcttgtttatctcctcttcatctatttttctcattcagagggaacaaaacacaaacatagacaataactttgcctgtttcatcaggttgcggcatgcagtcaggagcatggctgagttattacttccctggagtcttgagctgttaatagcagctgttaatagtgactctaagttgtgtagagtagcagaatagccatagcatgactgtgttacctgaaagacttgatagcacattgttactttttcccctctagaagaaatagtaggccaggcacggtggctcaccctgtaatcccagcactttgggaggccgaggcaggcggatcacgaggtcaggagatcacagccatcctggctaacatggtgaaaccccgtctctactaaaaatataaaaaattagccgggcgtcgtggtgggtgcctgtagtcccagctactcgggaggcggaggcaggagaatggcatgaacctgggaggtggaggttgcagtgagccgagatcgcatcactgcactccagcctgagagtcagagtgagactccgtctcaaaaaaaaaaaaaaaaaaaaagaaatagtagtgtagggaaactacatttaacaggcctagttcataaaatcacagttgtaggaggtccctaactatcttgcccaaggttacacagttaacaatatcagagccaatgctggaaagatcatgggcttctccattttcaaagcctcttaatcaggacttttgacttgaattcagagaacatccttgggataaggaaaattttcgttttcttacctgtttatctgtcataaactctgtcatttactttctaggcaagaattgtcagacagtattggctccctgttccccaaacccttgtgagaatgctgctgtttgcaaagagtcaccaaattttgagagttatacttgcttgtgtgctcctggctggcaaggtaagaacatgggtgtggagaagccaagaacatgcattctgactttaaacaaagtggtcaggttatcagatcatatggaaggccctgctggtcttatgaggcctgtccatcttgtcaagagcacacaggttttgcaaaggagctgctacttgaaatggcttagaaagcctttccattgtccttgtcttcggggccccctagcggctggaaggctgcaacctaagcctcacaagccatgatgttcattcttcagggagtttaagcaccttggcagcaacttcctaggccacagaagtcttcctggaacttcctaaagcagggggccaaccagtttgtctgtggaatagctccatgcaccccaactaagctcaggtcctgcgtagatttttgtgggaatcagcttccaaggactaggtcatttattggccctgtgttcctaggtcagcggtgtaccattgacattgacgagtgtatctccaagccctgcatgaaccatggtctctgccataacacccagggcagctacatgtgtgaatgtccaccaggcttcagtggtatggactgtgaggaggacattgatgactgccttgccagtgagtatgccagtcagctcttaagcccccagaggagaggaaaacacacagggagcagaggagagcccagtggaggctgccgcctttcacgcctgacattgggcataccggtcatttatccagcatatttaacagtagtgttttaactctttcttttgaagctagtgtccttgggaattgaggcagtggaatatattttaagcattccctttaatttgtgaacattgaaaatgtgaggacaatgctatgatagtgttttttaaaaaacagatttattgaggtataattaaggtacattaaactgcaaatattttcagtgtacaatttggcacattttgacatatagtaagtgaaactatcacccaaaataataaacatatttgtcaccctaaaactatcttcatcccattgcaatttaaccttctctctttcttgcctgtggagtcacagttttaccttctgtcactatagattattagttggcagattttatcattttatataaatgcagttagataagcataagtcaggagaggttctgacttgttttaatgaacatagtatttgagatccgtccatgttgtttatatcaatagtacattctagtttattgttctgcagtattccattgtatggacatattacagttcattggttgatggccatttgggtgttttccaatttggggatattacaaatgaagttgctatgaatgagtctttgtgtggacatatggttttagttctcttgagtaaatacctaggagtagaatcggtgaatcatgtcgtaagtgtatgtttcactttttaagaaattgccagaatgttttccaaggtggttgtactattttcattctcaccagaattgtatgaaagttctgtttgaaccatatgctcacaaactcttggtgatatcatttaaatttagctcttctagtgggtgtagagtggtatttcattgtgattttaatttgtattattctctctgccaatgatgttaagcatcatttcgtgtgctttgcccatctgcctatcttcgttggtgaaatgtctatttaaattttttgcccatttgaaataattaggttgtcttcttgagttgaaagagttctttgtatttttaaataagaattctttgacaggtatttgcttcccaatgatttccctccaatttatagcttctcttttgattttcttttgaagaggaaaatgttaacattgatgaaattcagtgtatgcatgtttttcctttatagttcatgcttcatgtatcttgtttaacaaatcttcacctaatccaaatttgaggtttatctactgtggtttcttctaaaagttgtgtaattttagctcttacattttggcctatgatttgttttgagttaatttttacatattgtgtgacttaaaagtcaagtttaattttgttttcttactgtactaaactaacttcttattagttgtaggttcgtaggttagcctctagatagtttagattcttaggattttctacagatacaatcatcctgtctataaataacccttatgccttttaatttcttttcaaccctgtatgccttttatttattttagtattattgtactaagatcttcaataaatacagaatagaagtggtgagagaagccttaccttgtttttgatcctaggggaaaagtatgtagtcttttaccattaagtgagatgttacctataggttttcataaaggccctttatcaaattgagagaccttgtacttctggtttttaagaggtctttttgtatttttataatgaatgaatgttgattttttggtgtgcaattgatttctctacatctgttgacatggtgatattattttttggtcttttaatgtaagtaaattgtcatcaactttatttaacattttgcaaatgttaaaagctaatcttaaatttatgggctatattccacttggtcattatgtgttattccttttatgaattattggatttgatttgccaaaatgttgttaaggatttctatatctgtgttcatgaaggatattgttctccaggtttcttggactaccattgtctggttgtgataagagggcaatgctgtcctcatagaacatatcaggaagtgtttttctttctactttctgggagagtttgtgtagaactggtgtgttttcttccaaatatatagacatggaaccttctttctgggaaagtttttaactacaagtttggttttcctaatacatataagtgccatatgggctatctgtttttaattgagctttggtaatatctgtctttcaaagaattagtccaattcacctgttttgtcaaatttgttgacataacatcaatttgttttataacatttccttactgtgctttaatagtctattagatctgtgatggtttccttctcttgtttctactattggtaatttgtctcttctttctttgaaagggaagaatgtctgttttgcagatttttttcatacagtgttctataaatgttattaattcaaattggatagggtagtgttattcaggtcttttatgtcctctatgactttctgtctacttattattcatagaatataataaggaggctttctgtttacttcttattcaagagtattgaaatcttttactatcattgtatattcatctgtttctctagtaattctatttgttttggcttaatgaattttgaaactctaatcttaagtgcataaacatttagggttcttatgtccttttgaggaattgacccatttatcattttgaaatggcctttttaaactcttgtcatatttctctctctgaagtctactttgcctgatactgatatagctactctagctttattttattattagagtgtgtttttaaaaatccttttacttctggcctgtttctctaaaatgggtttcttgtagagagcgtatattgggtcttgtctttttttctccagtatgatggtgtctatcttttaattcaggtatttagactgtttaaatttaatgtagtttttatatggctggcttcaaaatatgccatcttgctgtttgctttatctttgttcttctgtgtattgtttccattttcctttttctgacatcttttgaaataattgagtatttttatgattacattttatctacatacataaatttcaaaactttatctatattcactaccatattggttacatattttttagtagttattgtagggtttactggtgtgcagctttaacttattataatgtaccttcaatcgtaccacttcatatagaggagaagagctgtacactcacatttacattcctcctggcctctcttctattgttgttataaaatgtatatagcattaaacccatcaaatatgtaattaaaaggtcaatttttttcaagatatttgaaaaataatttaaaagtctttaagttacctacgtattttcaagtcttattggtctttattcttttatgtagatttgtgtttccatcaggtatcattttccttctgtctgaaaaaatcccttgaatattttgtgtagtctttgtctcctggtgatgaagtctttctgtttttgtgtgtcagaaaggtttttattttgctttagttttcaaagatattttcacagggaggagaattctaaattgactttctctttcagcactttaaagctatcctattatcttcttccttgcattatttctgaggagaaatctgctgttattccacaattcttttatctgttccttcatatataattctctctcctgtggctgcttttaagatatcctctttccactgatttttaccaacttgattataatgcctgttggtgtggtggtcttttttttttttttttttttttagactgagtctcgctctgtcgcccaggctggagtgcagtggcgtgaacttggctcaatgcaagctccgcctcctgggtttgcgccattcttctgcctcagcctgccaagtagctgggactacaggtgcccgccaccacgcccggctgattttttgtatttttagtagagatggggtttcaccgtgttagccagggtggtcttgatctcctgatcttgttatccgtccacctggacctcccaaagtgctgggattacagcgtgagccaccatgcctagcctggtgtagtgttctttatgtttcttctgtttggagtttactgatatttttggttatgggtccaagtctggaaaatattttaaccattatttggtaaatatttagccattatttttttcaaaagtttttgcgtctcccttttataatgttcattatgcatttattaggctgcaaggttgatttatttatttttcagtgttttttccacttagtgttttattttggattattttactatttgaagttattttgttatactttcaagtttactaattgtttcctctatagtttctcgtttactgttcatctcatttagtatatttttccctcagatattatgtttttatatgtggaagtttaattcaagtctttcttttaacgttacctccctctttgtcatgttcatgcttttatttccttcttgaatatattgagtatcgttgttttctagttgataataattgaccatattttattgtccttacctacttttctaccatatgagaaattcctgagtatgtttctgttcatattttttctactcattttgaatgtatttcctgcttctttgcctgcctggtaactttttactggatgctagacatccatcttacattgttccatgctgaatttttttaaaaatcttttttaaaaaaacatttttgagctttgttcaaatattcaattatttggacatagttcaatccttcagagtcttacttcaaggtttgttaattggttccaaaatagtctttagttgagggctaatatggctcactactacaacaggggtccctcaggactctacttactgccacgtggtttttttcattcttattgaataaacatgagctgttctcagcccagtgaaacctctagggattattctgcctacttctttctggtggttcttcccccagccttaatagttttattacatgtatgtactgaccgatccttagttacttgtatagtgatttaacttcaaatgagattatcacaatgcattaataatggcaccttaatttacaggatatataacttcagattatcatatagaggccaccatgctaggtgccggcagtgataagataaataagttttagtttctattttcatgaagctcatagtctgttagggaagaaagacatatagacacagttcaagaccagcctggccacatggtgaaacctggtctgtactaaaaatacaaaaattagccaggcgtggtggcaggcacctgtaattccagctactcgggaggctgatgcacgagaatctcttgaacccgggaggcggaggttgcagtgagccaagattgtgccactgcactccagccggggcaacagagtgagacttcaccaaaaaaaaaaaaaaaaaaagacatatggacaaataattttaatgatgtattacaaatagtgaaaaagtatccaaggcacaattgatggagaactttagggagtgagatcaagctgtttgtattcctttctcacattaagtaacatgtcattcaaaatattgagtatttttaaatttttctgtatgaagtgggaccaacaatatttacaatgagtttaaaataattcagtaaattatggatggtgagtttcctgaaagatgctatggaaattatagtagctgtgtactgtggttaagaaaaactgaaacaatttttacaattgctttaatagagattgcagatgagtcttataagggaattagttcaagagatgaataaagtatattaaatgtttcgctaataaaataaaggtcacattaccctttagtttagtatttagttttcattttacatgtatgacctgtctttgcaattatatttttaagttccttaagagccatagctacagcttatttttcttgttctgatttgtatggcatataattgtagagtgccgtggcatgactgtagcttaaaatttgttggttccttactatgagtataaagtgttccaagatcaagctatgtgatatttcaatttttatttaaactgtgtttcataaggctactgaaatctaaaagagagagaaaaagagagagagaggagatggaaatgaaagggagagagaagattatataattaatatgcctggaaaaacatgaatatgtgtattttgtcctcccccacacactccacaatcacatataccttttgaaaatattgattgatattctgtgtattggggcacatatttgatttccaaatgtgtgagggaccaatgcaagttttatgactattaattttacaaaactgttggtggtgacatagatgaagtttattccaattaataaacaggttaaaaacttcaagcaagtattattgaattcattttcataaatgagggagttggcaaaattgaatgaaaaagtcagaattatgctgcccccagcatgacttagttcaggtcattcacttttatgaatctaagattaaactgatgctactcttcagaggtctaattcttttgtaatggcttagatccttgccagaatggaggttcctgtatggatggagtgaatactttctcctgcctctgccttccgggtttcactggggataagtgccagacagacatgaatgagtgtctgagtgaaccctgtaagaatggagggacctgctctgactacgtcaacagttacacttgcaagtgccaggcaggatttgatggagtccattgtgagaacaacatcaatgagtgcactgagaggtgagcaaccagtccctcgggcatcagcatcttacgagagaaagggagaaagggaaggaaatttcagagcacaatgctagaattgtggagcagggatgaggtgtccacatggatcccagtccacagtcatctcctattgcccggttactggttcctgataaacatatataatagaaagttaaaggtcagaggttgcaaagtttatagggatggtttattatttcttgcttagggaacagaaagagctataattttgttctgttcttcccttggcctctcattcatttcaaaaatccaaaaattccagtttttctgcagagattggaattgttactagtctttaagtaatttctgggagttttgtttcatttctttttataatattatgagcatgtttgttctatttgtcttttataaataatctatagtgaataggacttttcaaataaattaaattgacttagagataaaatgaaatgtgatacatgggaaaactacagaaggactgggtaaaacctagaaaacttcattttctgtaggtatctatagtaagctcagtcttttaaatacttctaagcctttgattatagaaaggaagtgggcacctcagagcttctggcacccaatctagcttgtaagaaagtttaagggatatgggttgctcagaggtatttgcctctgtatgatcttagattccagaaatcttactttgtagtagtaagtcacaggcaccagatacatagctgatgttgctctgtttgcttcttagctcctgtttcaatggtggcacatgtgttgatgggattaactccttctcttgcttgtgccctgtgggtttcactggatccttctgcctccatgagatcaatgaatgcagctctcatccatgcctgaatgagggaacgtgtgttgatggcctgggtacctaccgctgcagctgccccctgggctacactgggaaaaactgtcaggtaattgacttccttcccattcactcagctcccctagagcagctgaatattatacctgttcactttctagtctgaataagttccttctaaaagagaaaattgtggatctcagggattccctgagataatctaggtaacttcttaataacttgcagattccaaaatggtgctggcaatatgatatagattcacaaacataagatcttgaaaagaggctaaccaagaactgcagaaaaatacatgtgggaaataaacacagatttttgttttgtgttttttgtttttttgttttttacattggaagcacaaaaagaactgaagaaaatagagaataatcaaaataaccttttaaaggtcagatgcaacatctaagtgtttaataatgataattgttgtatcttgcaatgtggtaacattctcaaaaccaaacaatttacatatcttttaagttcaaaatatgtaaatacacacttcccattaaattttagaatggaaagagcccttataggcaactaatctaaccttcgatttcatggaaggcgaaacagccccagaggggcaaagtaacttttccaaagttgcataccaaacagccctgtgtttaatttaatgttattctacctctttaatagtgatagaataataactccaaagaacataggaataaatggccaaacttaacttgacttacagggcgcacttaagtaaggcttaggctatattagacatgtgagcacccacctccacaaaattaagcagcttgttgctgattccatggatcacgagagcatttttggttgggctcctatttgttctcacagtgtagattggcagtgctggtgaagcactcctcccttcctccagcaaactgtctatattgtgaatttggccttcctctcctcaaggggccaagccactccgtgtgtgaattaagatgaaaggtgccagtccttgtgcactctttgcttcagatttttcataagtctgattgccttccttagaaataagctcttaaacggttttaggcttattaacaggcattaagtccttttacccatattcaccaaagatagatttggtcaagacccatgtggatttctcacacaggattagcacagaaagtatgaacctgtctgacagctttaactctttctttctagcattacagggtggctatacatgtaggcaaatcatgtctagagcattgggaatagcttaacctgttgggtttccctgaatttttaaacttttttggtaagaactttttaaatagaagacctaagaggaattagactacagcaggccctcaagtaactttgtttccttcggtgtcattttgttacaacattgagtgggggaaaaatctgtttttggccagagctgctatctgtgtggggtttgcatgttctccccatgtctgtgtgggttttctccagggactccagtttctttccacaactcaaagtcatgtatgttgggtgaagtggacatgtctacattgtcccattgtgccagaataggctctggccactcatgaacctgaactggagtaagtgagttagaaaataaatgaatggggccgggcacggtggctcacacctgtaatcccagcactttgggaggccgaggcaggtggatcacgaggtcaggagatcgagaccgtcctggctaacacggtgaaaccccgcctctactaaaaatacaaaaaattagccgggtgtggtagcgggtgcctgtagtcccagctactcgggaggctgaggcaggagaatggcgtgaacctgggaagcagagcttgcagttagcggagatagcgccactgcactccagcctgggcaacagagtgagactccgtctcaaaaaaaaaaaagaatgaatataccaattattataaaatgaaaacccataaagcctatgataatcatatgagtgcacaacaataaacaatgtggtacaaaaccacccagcaagcctgccatattggttagtgttgctttctgagctgtgtggtggtaagaggtgctgacggttttgctttgcaaacatttattccttgacttgacctgccaccactaggactgctattactcatggattcaccaaaaattggataaataattatcttgtttttattaatatttcttaaatgaatgtatagcttgtttattttaatgtttaatatcagaagtgggtgttaatttgaagtttagtgattttttttttaaccagaaataagtagaggaacttaactcttttttatatcaattagactgtggtaaaattggtttcgttatatatcgttgtccttaaagtcacagtttccaagaacctaatgatgacattaagtgaagacttaacggtacgtaaaaatggttaggtgtacctcggaacactgaatctagtttaagggctcttttactagatgaaggctctttttctttttaatcagtttgcttttctttgatttcttgtaacacaatataacttcttttcttcatttctagtatttgaattttgatgtatgtacacccctgcctctgtttcagaccctggtgaatctctgcagtcggtctccatgtaaaaacaaaggtacttgcgttcagaaaaaagcagagtcccagtgcctatgtccatctggatgggctggtgcctattgtgacgtgcccaatgtctcttgtgacatagcagcctccaggagaggtaagctttgctcccttgggctcaggtcattcactgcagtattgactgtccagtggcatttagagaaggtatcatttttttgtgggataagagggaagggcagatagtagtgggtgggcagggctctggggaaagggctcaagacagaaggtgtaagggtagaggaataggttcagagattcggagaagaatgtatttgaaatgaaactaaggtatattccactttcagggtttatttttaatatgcatctggtactgagggttgtgaagaactggctaagaataagattggatgtgtcagccagtttagatttacttgctcattggttgatttgaaccccatgtgtcacatgttcttctatgacatttctccctcactgggtttcccaggtgtgcttgttgaacacttgtgccagcactcaggtgtctgcatcaatgctggcaacacgcattactgtcagtgccccctgggctatactgggagctactgtgaggagcaactcgatgagtgtgcgtccaacccctgccagcacggggcaacatgcagtgacttcattggtggatacagatgcgaggtgaggacactgagcaagcagaggtcatggacctcccaggagattgtacaactgtttgagcactgatatattgaatttagctgcttgtatcttatattgatagtttatagatttttaccaatccccgtcataatgtttaccactgtttctttcagcctctctgtgcaataagttaacaggtccctagtatgatatttttataggcgtctggaaccatcccagctccttaggcttgcttttaggattcagagccaagagtcactaccagagtgcattttacaggcccacccaacatagcagtccacacttccctgaatagcagctgagataggaaaaactgctttgtggagtgtccctttggcccctgtcacctttgtatttagtcattaatcagtcaactagcaattttctctcaaaaaaaaaaaatgttgctcatcctgttccccatagcatcatgctaaacgttacatgtatatatttgaggaagtatgtgtcttcaaggtacatgtcactattttaatgtctgggctgataatggttagagcaagcaagatattagcaaaatgcctgagacattaatttgataccaattcaaaccatcaagcaacactgagaaaagctttgcttctctattgttatataaatgagccaacgatagcttctgtattttggcccctaggttgtttatttcttcacagcaggctggggctgggtctcattagctcaaaagcctaccagtgccaaacccaaattttgacacatctagttgttttaaacatagcccccaaataagcagatttttagctatttagagcttgcctgctttgcatagcctgtaaaactgcagccaaaatctgctagccatagtataagtaggacaagatataccctggggccatacagaccccaggctgatgctggcctttagagctctctgacccagagattcctgccactggctgttgagtgacatcacctagactccttctctgatccttctttcccagagtttacttgctgtcttccccttactcacctacccctctggaaggtctcatgctatttgggacttctcccaggtgcaaacctgtcaaagtgtccaaataaagccacctcacagccatatcttttttcttggtcagccctgaaatccttccaacccctacagccaccacagccagccagccagccccacctccctctacccctaagcctatctcaaccagtttctcacacatagatccaatttcctaaacctggagatcaataattgcatgtctgtactaccatccacatatgccttttgaccgagtcatagggtcctcatcacatacggaggaatgtgtattttaaagatgaggaaacctgtacccaggaggaacaaaaggtttgcacacaagtcaaatctgaaacatccttcattgtattcagtccttgccttccctttaaagtgcctttttcaactgaaagaggagtaggtaaatgccagtaagctgcaggttttctgtccctgcatagaatgattagcagagagtgtgatggttccagagaaaacatacaaaagctaaattaggaggtgggagacagtcacagaaatgttccagatctcactagctctcgtggtctgtttccagtaatggtccaatatttcttgtcctttttgtttcctcatggcagtgtgtcccaggctatcagggtgtcaactgtgagtatgaagtggatgagtgccagaatcagccctgccagaatggaggcacctgtattgaccttgtgaaccatttcaagtgctcttgcccaccaggcactcggggtatgaaatcatccttatccattttccatccagggcattgtcttaagttataaatccattcttagtgttcaggggattttataaaattaaagataggaagactagcttcattccaagcatttagttctacatcctagtaattcaagccattttattctcccatctcttgctagctctgatgttgtggtttatgttgtcagttttatctggttgtttggcatcttgatattccatgaaacacagaatatggaagggatacaacattagcataacattaaaaaattagcctggtcagtaagatttcttgttgcttcacagaaaagcaactaatggcctctaaaataaacaatttacatttacctgcttttgtatttttttaattagccaagtcttacctctataaggtgggggaatgaatgaaatgaaaatatctgcctattttcatagcttcaggggaggatactgatggtgtaaggttctaccttaggatgcagtaaggcctgatgagagatgcaaccctggactgttgagtgatggggccatcattcttctgtgggcattgccactgcttttgaactgagtggtatggccatcattctgctgtggacattgacactgcttttgaaccatcccttggaaagagctttgagtattgtttgttagaagggatgtagttatgctggggcctactctgagaaggctgtgaaaaaaatgtaaaaggccatccacactggtgagaaattcatccttgttagtgtcaaagagaatagaatgccagagaagtatttgtattgccttagagctttgtgtcagtaaagtttgataatttgccaccccaggtatcagagtttgactaaattaaaataggagagtaccctagtagtaggctgattattaaggaatgaggttaatgggaagaagaaaactaaggagaaacagtctttaagtatttgaagaattgtcctgtaaaaaggagaattgttctttattctagaaatcagtggttgagtagaaattaattccagttcattgttagtttgttcctttgagaaactgtactggttaggacaagctacgattctggtgatagctgttatcgtagttcatttatgttgctataaaagaatacctgagactaagtaatttatttttcgaaagaggtatatttggctcgcagttctataggctgtacaggaagcacggtgccagcatctgcctctggtgtgagcgtcaggctgtttccactcatggtgaaaagtgaagaagatccagggacccaaacacctcccattaggccccacctccaacattggagatcacattttaacatgtggtttggtgcagtcaaacttcaagctatagcagctaattaaacctcaaatctcagagcttaatataacactgattttgtcactcaaataaagtcgaatatgtgttgggctacctttctctgtgttttagatatgtggtttgaaacacctggcctccaaggcctccacagtacagggaagagggacagacttgaagggtcatacagcagcttccactagctcagtctggaagcaacacatatcactatccctcgcagtatattgaccggaattattaaatggtctctgtgacttcaagggaggctgggaaatataggagagtacatgagtattcatcaaactctaaaatcactactataccatgaacttttaattaataagacatgtccagtcctagaatggatcatttcagaaggaaacaaaatttttgtctcttctaaccatatggtaaagatggcttagaatactagttttgatattatcattgacagtctttttctttcagcactttgaatatatcatcccactgctttctgatatccatggtttttaatgagaaatatgctgttaatcttattgaggttcccttatatgtgatacattgcttctttcttgatgccttcaagattctttatcttttgatagtttgattatgatgtatgtaggtatgaatttctttgagtttatcctacttacagttccttggattattttactgtgtgtgcttgtttaggtatgtggaacagtatttttttatcctgacttaacttctctggccattggtaaacattccaggaaactctcaagtcccataaccccattgttagagtcatcacaatgtgtgttttggtcaccatatttctaagccttagatctttgcctgcatgtcccaccagtttcccaggtcaagggctaaatgtaacagttctgcctcttcctactactttgcttcaggctgaggttgagttctctctcagttgatagatctgtttatttctggtggttccattctgatggggaaatatgcatttatgctcattttactagcaatccctaaatatcaaatattctttgagacagggagcatatactagattttgtttgtttttacttttttgttttcaatttactctatgtataaggtgatatatgcatatatgcatatagaccaaaagtgtattcacacatagaaaagtatacagtgaaaatacttctcattcccatctctcttctggtgggcaaattttccctctcctgcaaacatgtaatcgccacttttggttgtttgtgtttctttctagaatttttcaaaaactgtatccttcagaatttctttatgtagagagaagccaaatgcaaagatattttatttcctttactttttactctgaagatagaatattagacacattttttgcacttgatttttttttacttaattggagatattttcatatcaaaatatagaacttcctctctctctctctgagatagatagatagatagatagatagatagatagatagatatttgtttgtttgtttgttttgagatggagttttgctcttgttgcccaggctggagtgcaatggtatgatctcagctcaccgcaaaactcgaccccaggggttcgagtgaatttcccgaccacgcgccccgagatagatgggaactacaaggcagctgcaccacatctggcacgattgtatatcacctacaagaggtcaaggggatgtccaagagcgaacgggaaggctactgatacaccgggcccatagagatacgcccaggctcaggaaacacccagatgagtggataccacgaggtcgcacaccaaaccgtccattgaatactggtggnnnnnnnnnnnnnnnnnnnncagcgccctgagtagctgggattacaggcatgtgccaccatgcctggctgattttgtatttttaatagagacagggtttctccatgttggtcaggctggtcttgaactcctggcctcaagcaatccacccgcctcagcctcccaaagtgctgggatgacaggcgtgagccaccacacccagcctgaacttcctcaatattttttatagctacagaattcccttttacaggcataccatattttaaccagtgccatcatgatagatatttcagttatcttgcaggcatataagtatattggtgaaataaattttcagaaatagaatcgctggattggataatatgtgcatttatcattttaatcagtgattgcagtatatcagcatattggctttttcttaaggtggagaatatattttcatttaagaatcattttcttttgattttttttgcagtttctttgtttatatatatatatatgtatatatacatatatatatatatacacacatatatcttttttcccacattaagttgttgatgtaatgttttgtggaaattggctatgatataaaaaaacaaatatattcccagtatttttttatattttttctttatagtgatttttagtgcacacttttactttttaatcaagttgaatttatcacttttaaaatggcttctggattttgagttgtagttagcaacatcatatacacttgaagatcgtaaagaaattctcccatattttcttcaagtacttttgccatatgactactcatttgttaatacacaatttattgaatattttgttttttatatatataatgatttgagatggcacctttgccagattctaaattcccatgtgtatttttggtgttcttctggattttctttattttctgtgttattctattaattcaccaataacgttctatttcaattattaaggatcttcttcttcatagttttcctggttattttttttcacataattttataatcagcttgtctgttaataaattcctgttgataatttttagtggggtctcattaaatttatgaattatagtatagagaaaactgataactttatgatgaggagtcttgctaaccaaatcctggtatgtctttccatttattcaagtctcttttgtgtctgttaggacagtattaaagttgtcttcatttaggtgtaacacatttcttgtgaagattgttcctaggtattttatctttggtaatttggtaattgcttttgaaaattgggccttactttacatttaaaaaaaaaaatcttgcttttgttagtgtatgctacaatgcaagtggcaggaatacatacagaactgttttcttttgtaccttttttttttttttttttaagacagagtcttgctctgttgcccaggctggagtgcagtagcgcaatctcggcttactgcaagctccacctcccaggttcatgccattctcctgcctcagcctcccgagtagctgggactacaagcgcccgccaccatgcctggctaattttttttttgtattttttagtggagacggggtttcaccatgttagccaggatggtctcgatctcctgacctcgtgatccacctgccttggcctcccagagtgctgggattacaggcttgagccactgcacccagcctgtacctttttttttaattatgattattattattttttgagacagagtcttgctctgttgcccaggctggagtgcagtggcataacctcggctcactgcaagcttcatctcccggtttcaagtgattctcctgcctcagcctcccaagtagctgagattacagacatgtaccaccacacgcagctaatttttgtatatttagtagagatggggtttcactgtgttgggcagattggtcttgaactcctgacctcaagtgatccgcctgccttagcctcccaaagtgctgggattacaggtgtgagccactgtgcccagcctcttttgtgcctttttgaattaatcatagaataatttctagaatagtcattgatttcttttgtttctttgtaagacactatatgcagatattcatactagatggctcatttacatctatagtacaataaattagtcctgttttaaatggaataacttttgaactctcagcaggaaatttatcctctatttttgttaaataaaaagcattggtgcacttatacactattacagaaaaaagccagtgattataaaacttaaaaatgtatttcattcaaaattcagttccagttgttaccaatatttttacataacctatgtatagtcatgggtcacttaacagtggggatatgttctgagaaatatgcccttaggcaatttcattgttgtacaatcatcatggagtgtaattacacaaacagagagagtatggcttactacacacctaggctccaaacctgcaccttgttttactgaactgaatattgtaggcaattataacacaatggtaagtatttatgtgtctgaacatatttaagaagaggtacagtagaagatttaaaaggtacagtaaaaatacaatataaaagataaaaaatagtacacctgtatagggcatttactatgaaaggagcttgcaagactggaacttgctgggtgagtcagtgaatggtaagtgaatgtgaaggcctaggacattactgtacactactgcagactttgtaaatactgtacacctaagctacactgaatttatttaaaaagtaattgtgctatgacattacaaggctatgatgttactaggcaacaggaatttgtcagcttcagcttcattatgggaccactgtcgtatgtgctgcctgcattgactaaaatgtcattatgcggttgcataactgtatttattgttatgttcttttttggactgtttttatattttggattatactttggaaaaattactgagcctctcttgagctccagtttccttctctttgagatgggacaaataataggacctacaccatagggtgctacttcactggattgtgtgggagagtacatgcggagccctagtatgttctttcctttacttgtacaactcaccaggatgacagctgtcatgaataaagagtgtgctttgccctgcccaactacaaggtcccactaccagttgaggagtatactctgattcattgtgaaaatgccaacaagggtggttatcccttgctggaaagcaggttaaaaggattttcataattctgtacctcttctctttcctccaggcctactctgtgaagagaacattgatgactgtgcccggggtccccattgccttaatggtggtcagtgcatggataggattggaggctacagttgtcgctgcttgcctggctttgctggggagcgttgtgagggagacatcaacgagtgcctctccaacccctgcagctctgagggcagcctggactgtatacagctcaccaatgactacctgtgtgtttgccgtagtgcctttactggtgagaagctctctagcctcctggccactctgccttggaggatggttttagtgaacaaattgggccctgtgagttgtcccagacccaagtgaagcttttcttatataagaaaaacaacagcagcttaattttttaaagccagttttttcttagtctgtactttatggatgttataatcagtgtctacctttaatttttcctaagagattcttttgttgtgcattgattatatcatgctatggcaggaatattttttacaatgtatattgaaagtagttgaacaaaataacattttttaatagtggcaaaatatccaaaacctaaaatttactatctgaatcattttaaagtgtacagtgtacagttcagtggcattgtttagtacattgacattgttgttctactatcacccccattcattcacagaactcttttcatctgaacaaaataacattttgttttaaggaaccttacgtctaactccggtttcttcaccctgcctcctttgacatgtgatggcttgaattactgggtagttcctgccaccatgatctttccacccctaggactcagagaagcttaggaccctgcttagatacttaaagggggcaggtccaaattcaagtgtgtttaaccaaagatcagttgatgtgggtatgaaatgaaaagttgcagtggtcacaagtaatgccttgcccagtaaaggcttggccatgttcctactctgttcccaagcttctttctttcatcacagggcctgaagatgaccaagctctgcctcagaataggggtcttatcacaagaacttactagttacttctggagagggcagcatggtgacttttgggaactaaaatagttgtttgtatccagatgtggcaggatactcagatttgaaatttatcatgcatttcctggggtctgtagttgtatttcttatatggagggtgtgatcagattccttaggagtcagaaaataggctttaatagtctgtttacaaacaattcatcaagctgaactctgctacatcctgagcccatctccagccatctttccttccaactttaaagatatgctaccttacaatcttggaattttgtaaagaatgggagggattctgcaatatggaagctccctggatacactaacatcaaaaaagaaatagtccattgtgaacataatagctattgaggcaatgtggaacagaataagtatgaataatctgtctacagcctcgtattggccaaactgcactttgaaagccaaagcatcaaaactggctcctgtttctttcattgcccctgaggcttttttctctggaaacacaagcatttgcaaagtaagggggaagcaggagaaggaaggaatggagaccactttgaagtagtatcccacagccaggaagtagtgtttgtgcattttccacatttgtgaatgaaaaaaaaaaaatcccttgaatacattgagcacagttattgtgggatgctgttgcagagataaacagcaagggactggtggtccaccaagctgtgtccatgtggtggctgctcttggttagcggctgctgctgtgatttgaagagacaaacatttatacctcttgctgcttgatctcgttggccaaaaacattactatttttatttcatttttaaagctacctcttctttcccaagtgaccaccggccaaatggggcctatctcctgctgttggccaggagtcccagctgtgccctgcgtctcctctgtggttccagttgcctcgttctttatcttggagcagtggcccccaggggccttccgttttagaactattcctagaggaaactaactctaggaaaattaagctgtgttttaaggaatacgagttaggttacagaaaggccaaaaagtgattgaaatgaggtatcacagatgaaaattctctataccgcaaatcaccatttaaatgtattggcctggtgtagcctctcctatgaagtagataacattaacaaaatgcagtgaatagtttttcaactgtttttttgcaacttatgaaagctaaaatgacttcaaaaagctgaagtgtgatttctctttttttgatgggatttaagtcacttttctcacccaccctgttgtgtgagttggtacttactgtgtaggcaagacagagtaagggactggcctgagctggtgacaggccaatcatgttgagatgcagtgagtgttttctttctatgctcagattaccacaggcctagaactgaactctctcacacttgcttcacctatggctagttcccatcccagcaaagtttgttgagtaacttgcagtgactacttctgccttttaaaaccttttttattttttattttctgaggccggcactgtgaaaccttcgtcgatgtgtgtccccagatgccctgcctgaatggagggacttgtgctgtggccagtaacatgcctgatggtttcatttgccgttgtcccccggtaagtgccctgttgctcatctaagaaggggcattgtctcttccatacaatctgtgaacagaactgagattaaacctggttttaccaatcttcgaaatgggaagatttctcaattttagctctttcagaggaaagtgcttgggtttttccatttaaagctgtttacaagtgacaaaacaaaacaaaaacaaataaaagctgtttagacactcccagaaacagtgagcttcccaatccatgactgtcagtcttaagaaaaactaagggaaaaccacaaaaagtggtggagtgcccccttgaaaatagggctgatgtgtggggcttcttggccccaggctggagggtaatctcactgcccagattgggccagagttggtggaaatgctgctcttacattctttagcaggaaccatttggaagcaagttgtctcttaaagtagagggaagctcaattttagctatttgctatacccattcttttatcactgccagaggttgaaaccttcccaaaacaagagatccctatgcctcgggagataccaaaaggaaacctgtctagtaaccttggcttgggctgaacgggaagtacagaagggagtgagatgtggaggttttctagaaacctcaaacttccaatatgactgttttcctaccaatgccatttttatttcctcactgatttccacagggattttccggggcaaggtgccagagcagctgtggacaagtgaaatgtaggaagggggagcagtgtgtgcacaccgcctctggaccccgctgcttctgccccagtccccgggactgcgagtcaggctgtgccagtagcccctgccagcacgggggcagctgccaccctcagcgccagcctccttattactcctgccagtgtgccccaccattctcgggtagccgctgtgaactctacacggcaccccccagcacccctcctgccacctgtctgagccagtattgtgccgacaaagctcgggatggcgtctgtgatgaggcctgcaacagccatgcctgccagtgggatgggggtgactgttctctcaccatggagaacccctgggccaactgctcctccccacttccctgctgggattatatcaacaaccagtgtgatgagctgtgcaacacggtcgagtgcctgtttgacaactttgaatgccaggggaacagcaagacatgcaagtaagggcttcacgttttccagaactgaaggggactgtcactaacacacttcagtttctcgttcttgctcctaaccactccagtgcttcagcctaagctgcctctgcttttcagatggtgccagccttgtcccatcgcacactgccctgtgctctcccttgctgacaatgggccaggaatgctcattgcataatgaccctctctctctgcctatctttgccttctcacctgctgccttcgtgacctcctgggggatataacttttggaagtggtgtttcccacttcaagcagcctctcacataacctgcctgcaggatggatggaaaggtctgtatctctctcttcaccccattcctttccctaagactgtttttccccatctagatttatcaggaagcatgaattagattaagtctgtgaaccctcccggtcttaattgtataggatgctctatggtttacttaggaactttcctattaactagccattccatataatttaatcccaattaattctcagcaactcacgaggcataggtattactaacattctttcataggtgagagaacttaggcccaagggttaaagaacttgccaaagcaagttgtttctttgactcctaatcttctgattgagctagcatgaaaagttgtaccaaatagtataaatatcaaggggtaggggatgaggagaggagagtatagatggaatagtttgtacatcatttaggtttgggggttctaattccttttccaaatattgaaagagcctgtacaagtaatatctggtgtgctataaggacatacccatctgcctttaccttctgtagttgggattcactcttgaaagggaaagaaatgggtcatgttaatattgttctctgtatggcaactctcaatggttcagggccttgtatcaagtttctagaggcatctttcacttcctaaagcccgttgttaccttactgggggcaatggatttctctaaagtagaggaagcatgaaccaggttgacttttgtttcagatatgcagctttgtttgaaaacctgacttaacaggcttgtaaactgcctgggagcccctaagctcctgcagcatagtgagtacaatgttcttcatttaggaagtactcaacaaggatgagtggcataggcatcagggataggagatgcaaagaaggttttgtggggcatttgggtcctgggtgtgggccacagaaaatgggtaggaaaatccacagtagttccaaatgaaaaagcaaatagagctccagtctaatctgagctcttttgcctgttctctgcttccccttacctaggtatgacaaatactgtgcagaccacttcaaagacaaccactgtgaccaggggtgcaacagtgaggagtgtggttgggatgggctggactgtgctgctgaccaacctgagaacctggcagaaggtaccctggttattgtggtattgatgccacctgaacaactgctccaggatgctcgcagcttcttgcgggcactgggtaccctgctccacaccaacctgcgcattaagcgggactcccagggggaactcatggtgtacccctattatggtgagaagtcagctgctatgaagaaacagaggatgacacgcagatcccttcctggtgaacaagaacaggaggtggctgggtaggtgtttggtttctgaacttcaaggctaattttatgaagcctagcactttgacatatagcacaagtcataactcaacctatagaaatgcaaagatcagaaaaatagaatggcccaccacttaagataaacccgttaccccagtacttacgtttaaatgtaaagatatgccttcgtcttggctgaaaagtgggcaggggtacacaggaggcagaatgtctggaaggcctcctcagatgccagaatccataaccttttgccagagttgcctcaaatccctttattagtgacattcctttttacattaatcattgccttattgttaaggcccttctttagaatatatgtctctttgacacaggtaatgatcttcagttgctctgtcattcacacctcactctttgttggtatattgtcaaactttcaaccctccagctagctgagataccaatgcagagacaaaggaaaataaggactaaaaacacacagggatgtatgtttagagtagcaccaagtaccactgagtaggtatgaaagagtggaagaagaccactgaaaccttcgggaggaaagcacagcttctcactttgtcatgcattgcctcagccagaaggctttggtcagccagactaaggaaggtgggacatcctctatgtgggaattagtgtttaagatctcaagggacagtattctaattcctgagatatgtcttaaggcagcatcccagaggtggggacctgatgctgaaggggaggaagggaggctcctgtcaccctttatgacatgttctgcctgacctgcactcttctgttttacccccatctctcctcctccgcttctcccttggcatcccacagctctaaagtctttctggaaattgacaaccgccagtgtgttcaagactcagaccactgcttcaagaacacggatgcagcagcagctctcctggcctctcacgccatacaggggaccctgtcataccctcttgtgtctgtcgtcagtgagtggcactggtgtaaaggggaaaggtggcgggggaagagtgtcaattgggggaacaattttcattatgtagccctctattttttcaggactgttgaggtcaaagttgccctctaaatgaatctaatgctgacattgagaggttaatgttttattcagcactttccctgtctctgtggactttcaggtgaatccctgactccagaacgcactcagctcctctatctccttgctgttgctgttgtcatcattctgtttattattctgctgggggtaatcatggcaaaacgaaagcgtaagcatggctctctctggctgcctgaaggtttcactcttcgccgagatgcaagcaatcacaagcgtcgtgagccagtgggacaggatgctgtggggctgaagtaagaggcattgccaataagccactattcacagtataagtagggatgactagaaaagcatatcttgttgaatcatgattttaaattctaagctctgggcatttactcacattgaccatgattctaaatgccttgtgagtgactgaaaccacagtcagagcgtgggtgcatctattctgtgtatattatcacaatgccgcccagcttctgtgttgaggtgcccttttgttgtaagctcacgatcaatgggaagggaaaggatgaatgccaagggaatgtcaccaaaaatactgcccatcttctctgggccaagaccctgcaaaattgtaatatagccacgggagtgtgtcatggtggaaagtgttgaaaaccactgtattagtttatgactgccattcttattttttctttttataatcatattagaaatctctcagtgcaagtctcagaagctaacctaattggtactggaacaagtgaacactgggtcgatgatgaagggccccagccaaagaaagtaaaggtgaggtggccatggtagaaccaccattgtcagccattatctggttacatttcaaatttctgtcctttagctccagagtgtcctgaatgggagtaaagagtgatagtcttgatgtcttacccagacaataactatcctaggttctcctaaacagcaggaatccttaggacgtaaatgaccttgggttacctatatatgctcttcaagaataactctttaaaaatactaagcacatctgtttcctttagtgttatgctggcagtagtcaagtcaggaatggtgtgtgtagatggcaattccttcatggccacatctcttccttatcctttatgggcacttcttctataagagaagatgaaattaagcagtggaagaaagccagttatcattgacattggcaaaatgaaagccagtgatcatggcaaaacgttgacattggaggctccataccttgagcccaggaaactaaagccatataaaagcaagtggtagattgggctgagactgacatgaaaaagcagaccatccatccacagctgtgcatggctgggagctggtggagcatgatggttaagaagattgctttagttaatatcagaactggattcaaatccaaaactctgccgcttagtagctggcaagttacttaacctctttgtaattatccttccttgtaaaatgcggataataataaccctttcctctgtgagttgttgtgttggcatatgtgccttatctactttcctgtcatgtactaggtattcagtaaagggtagctgcttttaaattatcatgattattattattgaatagtctttcctgagtgcttactacatgttgggtgctatgttgagtacaaggaaacaaccttgaacaaggcttattttcccttcttgagaagcttacagccttgtggtggagatggccatgtagtgctgtgtaagcatttaacacatgatcagttaagcagaggtaagcagagtatgctttttagggccaacaagaagaattaaagtttactttctagtggagggtaggaaaagtgagaattgggtgctctggagatctaaaggctaaagcctagagtttgggattgggggagggagttgtctagatgatgcaggaaaggtaagcaggagccacatcacgagagcagtgggaagccaaggctgaggtaatcctctggaggggtggaggagtaggaagagagaaaacaatgggagataagcagcggtggtggaggctctggacaccttctgattagcagtttctggtggtggccagattgatagggagcattgttttcacctttcaggctgaagatgaggccttactctcagaagaagatgaccccattgatcgacggccatggacacagcagcaccttgaagctgcagacatccgtaggacaccatcgctggctctcacccctcctcaggcagagcaggaggtggatgtgttagatgtgaatgtccgtggcccaggtcagcaccgggcctcttcccctcttcactgggctgtgtctgcccatggttccacattgttgtccctgtgtttgccctgtccagtcataaaccccttcccaatttcacagactctaaatcagctcgaggaaatgaatgcttaaggaatgtagccacaaagaaattatcagctcagaaagggaaggatttcacattgcttcatgtacagtgtgttgagactaaacaggctgataaaatgggttagattgtagtgggatagaaaaataatatcccaaagcagaggatagttagtatcttatgcatgtattaattgttctattaatattagatatttttaaatgtccaattaaaataacagcacttaaacttgaacagaaaaacgtgtttagagaagagcccccagcttaaaaagacttgtactttcccattattctttacagaaatgatactatcagaggaaaaggtggcaaatgtgaaactaataaccagttactacaagaagtacagggaattctttgcccctaagaataactttagtcaaatagagctgtttcaaccatagggttaactaccttctccttcttgagtactttatggaattttccattcctacagatggctgcaccccattgatgttggcttctctccgaggaggcagctcagatttgagtgatgaagatgaagatgcagaggactcttctgctaacatcatcacagacttggtctaccagggtgccagcctccaggcccagacagaccggactggtgagatggccctgcaccttgcagcccgctactcacgggctgatgctgccaagcgtctcctggatgcaggtgcagatgccaatgcccaggacaacatgggccgctgtccactccatgctgcagtggcagctgatgcccaaggtgtcttccaggtaaagaacatgagaagagtcacttgaataataattcctatggctctataatgttttatcgtttttaaagaattaatatctcattgaatttattcaatcatttgagagattagggcaggtattagagtcatgcttggtagatgggaaagtgggaaaagggaggcaggcaaattgacctagctatatataggaagatagtgatagagccaactgcagacaacaccagtctttctgattattagtgataatttgttgtgccaagatgcctcccaaatgcgtagattagatgagagtgatagctggtccggagcctttgactagtatccgctacttcttatggattggcctgactgtatgggcttctagctgctcattggcagttttcttgacctgagttcatattatattccctgatgcctgtttatccttatgaggaaattggaagcattctgaatcaccttaggctgtatcctgactgaagttgtgatatttccccacatccctcttctttcctgagaaagtagaaggctcatcactttacatcagccattatttattgagcatgtatttatttattcatgcaacaaatatttattgattgatcatgatagaatcttgggcacaaagataacaagactttccctctcctccaggaatctacactgtagcctcagctctgatgcccttgtttcttcactgagtttcattattttccttcatccaggtgactctcttttctgtactttctcctcttctagattctgattcgcaaccgagtaactgatctagatgccaggatgaatgatggtactacacccctgatcctggctgcccgcctggctgtggagggaatggtggcagaactgatcaactgccaagcggatgtgaatgcagtggatgaccatggtagggatgaaaggcagggatttggattcttacctgcaaagcatgcctctgacgaggggaatagagttacgtgacccttagagaactgcctgagatccaaatacgtgagagattcactcattctttcattcatgcatttatttaacatgctgagctcagagatccaagccagtaggagatccctaattaaaatgagggatttttaatgagggttcttggacctcagagcagatacatgaaaggtgttcccatgtagtttcctaggcataacacttgatttgaggatttatgagagctgacttctctaggagagttgtagaatattctcaatataaattctgacatgtaatatataggtttttatcttcagtatgtaacagggtagattctgccatgtaggggacatgaatgcctcatacaagtgatcctttcacctagaggtcttctgcaggctaggcagcctgtactgaagtatttctagaacagaggaaaaagaagagattactttggtttttcctatagacccctacagagaactgcttcctgctgatctctggggagtttaagatttcattgtgcaagtcatagtgtcttatactaagagtaggatatgtctgtttataaaaatgtttctcccctgcaggaaaatctgctcttcactgggcagctgctgtcaataatgtggaggcaactcttttgttgttgaaaaatggggccaaccgagacatgcaggacaacaaggtacagtttgtgggctctgagcttgaggaggctcatagcagtgcctcagttataagcccattcccgtttctccttacagcttctcttgttatatgtatagacaaagatggaagcagtttgggcagacactgggtttcgagagcttgatgaggatattgggcttgtccaggcatgtgtcaggatggagttctctgccctctcagtactcagcttgcagtaggctggctatagatagcttggtgtaactctttctcttccctgacatttccttttctccagttgtctcttctgttcataatcacttctttttctcgttttctttcttttttccctccggctgcttttttttctgtccttggataccctgatgttttcctgtttgatttttctccatctgagttttttgtcctgcttccttctctcattcatcttctctcagttttctttgttttccttatcttagtcctttcttgcacatgttttgtctcttctttcactgtttcccttacttttcccagttctgtgcatgccttagttttttctcttcctacctttcttatttctaactccttttcctattatttcttatttctaactcctattcctacctttcttatttctaactccttttccttaaccttattttgataagctcagtactcttttaagtgagtctctggctcaggggcatgctttattttatgaattcccaactaaagagatgttccccctaaggggcaaaattgtttttttgaggagaggtgaaataatcttactttttttatgtgtaaatcacagatacacattcagtacattggtagaggcacagcctatctgtggtgttaatatttcatcggggagataattaggaaaacatgtctaagggggtgataataaaaaagattgagaaaaactgctatattctcaagagtgttattaacatgtgttctgtgatgggccttttctgtaggaagagacacctctgtttcttgctgcccgggaggggagctatgaagcagccaagatcctgttagaccattttgccaatcgagacatcacagaccatatggatcgtcttccccgggatgtggctcgggatcgcatgcaccatgacattgtgcgccttctggatgaatacaatgtgaccccaagccctccaggcaccgtgttgacttctgctctctcacctgtcatctgtgggcccaacagatctttcctcagcctgaagcacaccccaatgggcaagaagtctagacggcccagtgccaagagtaccatgcctactagcctccctaaccttgccaaggaggcaaaggatgccaagggtagtaggaggaagaagtctctgagtgagaaggtccaactgtctgagagttcagtaactttatcccctgttgattccctagaatctcctcacacgtatgtttccgacaccacatcctctccaatgattacatcccctgggatcttacaggcctcacccaaccctatgttggccactgccgcccctcctgccccagtccatgcccagcatgcactatctttttctaaccttcatgaaatgcagcctttggcacatggggccagcactgtgcttccctcagtgagccagttgctatcccaccaccacattgtgtctccaggcagtggcagtgctggaagcttgagtaggctccatccagtcccagtcccagcagattggatgaaccgcatggaggtgaatgagacccagtacaatgagatgtttggtatggtcctggctccagctgagggcacccatcctggcatagctccccagagcaggccacctgaagggaagcacataaccacccctcgggagcccttgccccccattgtgactttccagctcatccctaaaggcagtattgcccaaccagcgggggctccccagcctcagtccacctgccctccagctgttgcgggccccctgcccaccatgtaccagattccagaaatggcccgtttgcccagtgtggctttccccactgccatgatgccccagcaggacgggcaggtagctcagaccattctcccagcctatcatcctttcccagcctctgtgggcaagtaccccacacccccttcacagcacagttatgcttcctcaaatgctgctgagcgaacacccagtcacagtggtcacctccagggtgagcatccctacctgacaccatccccagagtctcctgaccagtggtcaagttcatcaccccactctgcttctgactggtcagatgtgaccaccagccctacccctgggggtgctggaggaggtcagcggggacctgggacacacatgtctgagccaccacacaacaacatgcaggtttatgcgtgagagagtccacctccagtgtagagacataactgacttttgtaaatgctgctgaggaacaaatgaaggtcatccgggagagaaatgaagaaatctctggagccagcttctagaggtaggaaagagaagatgttcttattcagataatgcaagagaagcaattcgtcagtttcactgggtatctgcaaggcttattgattattctaatctaataagacaagtttgtggaaatgcaagatgaatacaagccttgggtccatgtttactctcttctatttggagaataagatggatgcttattgaagcccagacattcttgcagcttggactgcattttaagccctgcaggcttctgccatatccatgagaagattctacactagcgtcctgttgggaattatgccctggaattctgcctgaattgacctacgcatctcctcctccttggacattcttttgtcttcatttggtgcttttggttttgcacctctccgtgattgtagccctaccagcatgttatagggcaagacctttgtgcttttgatcattctggcccatgaaagcaactttggtctcctttcccctcctgtcttcccggtatcccttggagtctcacaaggtttactttggtatggttctcagcacaaacctttcaagtatgttgtttctttggaaaatggacatactgtattgtgttctcctgcatatatcattcctggagagagaaggggagaagaatacttttcttcaacaaattttgggggcaggagatcccttcaagaggctgcaccttaatttttcttgtctgtgtgcaggtcttcatataaactttaccaggaagaagggtgtgagtttgttgtttttctgtgtatgggcctggtcagtgtaaagttttatccttgatagtctagttactatgaccctccccacttttttaaaaccagaaaaaggtttggaatgttggaatgaccaagagacaagttaactcgtgcaagagccagttacccacccacaggtccccctacttcctgccaagcattccattgactgcctgtatggaacacatttgtcccagatctgagcattctaggcctgtttcactcactcacccagcatatgaaactagtcttaactgttgagcctttcctttcatatccacagaagacactgtctcaaatgttgtacccttgccatttaggactgaactttccttagcccaagggacccagtgacagttgtcttccgtttgtcagatgatcagtctctactgattatcttgctgcttaaaggcctgctcaccaatctttctttcacaccgtgtggtccgtgttactggtatacccagtatgttctcactgaagacatggactttatatgttcaagtgcaggaattggaaagttggacttgttttctatgatccaaaacagccctataagaaggttggaaaaggaggaactatatagcagcctttgctattttctgctaccatttcttttcctctgaagcggccatgacattccctttggcaactaacgtagaaactcaacagaacattttcctttcctagagtcaccttttagatgataatggacaactatagacttgctcattgttcagactgattgcccctcacctgaatccactctctgtattcatgctcttggcaatttctttgactttcttttaagggcagaagcattttagttaattgtagataaagaatagttttcttcctcttctccttgggccagttaataattggtccatggctacactgcaacttccgtccagtgctgtgatgcccatgacacctgcaaaataagttctgcctgggcattttgtagatattaacaggtgaattcccgactcttttggtttgaatgacagttctcattccttctatggctgcaagtatgcatcagtgcttcccacttacctgatttgtctgtcggtggccccatatggaaaccctgcgtgtctgttggcataatagtttacaaatggttttttcagtcctatccaaatttattgaaccaacaaaaataattacttctgccctgagataagcagattaagtttgttcattctctgctttattctctccatgtggcaacattctgtcagcctctttcatagtgtgcaaacattttatcattctaaatggtgactctctgcccttggacccatttattattcacagatggggagaacctatctgcatggacctctgtggaccacagcgtacctgcccctttctgccctcctgctccagccccacttctgaaagtatcagctactgatccagccactggatattttatatcctcccttttccttaagcacaatgtcagaccaaattgcttgtttctttttcttggactactttaatttggatcctttgggtttggagaaagggaatgtgaaagctgtcattacagacaacaggtttcagtgatgaggaggacaacactgcctttcaaactttttactgatctcttagattttaagaactcttgaattgtgtggtatctaataaaagggaaggtaagatggataatcactttctcatttgggttctgaattggagactcagtttttatgagacacatcttttatgccatgtatagatcctcccctgctatttttggtttatttttattgttataaatgctttctttctttgactcctcttctgcctgcctttggggataggtttttttgtttgtttatttgcttcctctgttttgttttaagcatcattttcttatgtgaggtggggaagggaaaggtatgagggaaagagagtctgagaattaaaatattttagtataagcaattggctgtgatgctcaaatccattgcatcctcttattgaatttgccaatttgtaatttttgcataataaagaaccaaaggtgtaatgttttgttgagaggtggtttagggattttggccctaaccaatacattgaatgtatgatgactatttgggaggacacatttatgtacccagaggcccccactaataagtggtactatggttacttccttgtgtacatttctcttaaaagtgatattatatctgtttgtatgagaaacccagtaaccaataaaatgaccgcatattcctgactaaacgtagtaaggaaaatgcacactttgtttttacttttccgtttcattctaaaggtagttaagatgaaatttatatgaaagcatttttatcacaaaataaaaaaggtttgccaagctcagtggtgttgtattttttattttccaatactgcatccatggcctggcagtgttacctcatgatgtcataatttgctgagagagcaaattttcttttctttctgaatcccacaaagcctagcaccaaacttctttttttcttcctttaattagatcataaataaatgatcctggggaaaaagcatctgtcaaataggaaacatcacaaaactgagcactcttctgtgcactagccatagctggtgacaaacagatggttgctcagggacaaggtgccttccaatggaaatgcgaagtagttgctatagcaagaattgggaactgggatataagtcataatattaattatgctgttatgtaaatgattggtttgtaacattccttaagtgaaatttgtgtagaacttaatatacaggattataaaataatattttgtgtataaatttgttataagttcacattcatacatttatttataaagtcagtgagatatttgaacatgaatacttgatgttgttaatatgtatggcattagcagtctcatattgaccctagcatcttatttccattttccattattttgcagaaacttatcagtcacacatgcatagttataaatggtaacagttttttttttaatgacttgaaatcttaggatatgcttctgctaagcagataaaggagccttgttcaagatctgcacagttaaggttttaacgtaatttagcattaattggttatgttcagaatgttttaattttatataaaacattttagtcttcatattgggttttataatggtggaagaataaaatgaatttgagagctaaggaatgatcacctgtgcaggccggccactcagagctcaagttgccacttgcaaactatttgggaactaaattgctccatgaaaacctgcttcagtggatccaggttgcaggccattgggtggctgaccacatcctgcccctgcaattttaagtcttgaatgctagcctttgattatgcagggaggactcggggcactcccagacgtgaaagccaaaaaaggagagtagggccgaagccaagtgccaccccatcacaaagctggagcagtaggcttggacactagaccatgagcatgccaggagaggggctagtgcctcagtcatgcaactaaaaagcttcacgacccaaggagaggggctgcttcctttatcagaacaacctccttaatgcccacatgtttttcaggatgtgggcagtgggggaactgcgagcctgttaattgcctctgccactacgtctttcagccacagggtatatgaagttgtgtgtgtgttgtgtgtgtgaaagaatacaacttttccttcttttgccttagcacttagcaaaacacatttaaaatatttgtaccagtcaagtcccatccacaaagtgtgggcacactcaaattaggatacatcaaagagggctatttacaaaggattaattacaaaagtgtgtgtgcaatgtcagggaccgacacacagttgtgcagaaacccgtgttagcatcagcagagctatttccacttgtgggcccaaaaggccaggagaagtcactaggacctggaagcagagtcctgtagagcaggtccccaaccccccgggccacagactggataccttagcctgtggggaaccgttaggaaccgggctgcacagcaggaggtgagcagcaggcaagcaagcattactgcctgagctccacctcctgtcagatcagcagtggcgttagattctcataggagcatgaaccctattgtgaactgcatatgtgaaggatctaggttgcgcactccttatgataatctaatgtctgatgatctgagatggaagagtttcatccccaaaccattccctggccccagtccatggaaatattgtcttccacgaaactggttcctggtgccaaaaaggttggagactgctgctgtagagcaggctacctcaagaagagctgtgacttccttcaaagcacacagtgggccttaagccctcccagaaagaagctagggaatgaatgaataccctgatctcatttgcttcactgggctctctgtttgccgactccaagtggaagcctgcaaatatgggagctgttgattataatctatcaatgtaagtcagctttctggctgggagcttggtggagaaggaaagagagtgaatctgaaggggcaaacatattacctaaaataacattctccttccaactatatttctgagaaatttccactggtaacctgttattgatgtgtctaggcagaaagcataaagttaaaaaaaagtacgtatttagaatcctgacttctttttctgatctagtagtgtgtttcttcaccactttggctttgagcactcaaagtgcagacagtcatcagcagtgggatggataaattctggtacattcattgaaatgaatgctacgcataaatgaaaaagagcaacttgcaacaacacgtagtatattcatcaaaataatgttgagcaaaataagccagacacaagtaatacattctgtatgattccattacataagtttaggaaaaaccaaccaatagtaaatagataatctgaacagtggctactttttgggagaaaggtctagactgaagtgagagaaagaagaatctttctggagtctgaaagtatcttgacctgggtggtgactacatgagtgtatatatacgtaaaatttcatgtaaaatttaacttaagatttatgcatttgacttatgtaaattatacttcaataaaatgtttctacaataacctacagaaacgtacaagcatctaatattggaattcataaaatgttgatattttatacttatttcagatgtttgaagatgtataatgcttatggcttaaaactcctatatttcatcctctaattccatttcccttcctgttttttccttcctcctttctttcccagttagttatttttataaatttgctctgtggggattatttttgttctggaaaacattgttatttgcaatagttggtccatgaaaaaagtctattttcaaatgcaattgtataaaatgtgggactccattattgtgaatttaattgaccaagtgagacaagccaggggagtcaggttgcaaggcaggagttctgggctccagctgaataattcatacccatctgggtcatggctgccatctggcactacctggtagcacttgtgtgcctcagcataaatatatgtttgattgaatatgggctttgtaacctggccgataattttgagagcttcaagagcctcattgtaaaacatcacctgtctattgcacgtgcctatttgagaaaatttaggctgggcaagcactgagatgtagggacccagcccttgtcccgctgtcatgcaattgtctcacatttctgtctctctcctttttctctcttccatgacccctttcccttgcctcctagaaaagtttgaagaaagtggatttggaagaggataggcatcaaccactaatcatgttacatcagaatgtgtgttactgtgcttaggttttacatataaaactagggttttacatataatagttagaaggttaatacgactatatgcctggacaactgaagaaaacagaggagaactaccataaactattagggattcagtaaataaaatgatgtaaaaccaattcacagaagaaccatttgcaggatgtaattgaaaagaccacatttacaatagtgcacacgtgcacgcacacacacagacacacaccccaataaccttaaaaaaattcaaacccagtggaggggcttcaatatatatagctaactagaggcatgtggtacttgtgtttttaaaaaaattcaaacccagtggacgggcttcaatatagctaactagaggcatctggtacttgtgttttctacaaagaagaacaaaaataacaagaagataatcacacttcaactagatcatctaaaagagtacacaggaattcaacagaaaagtggccagaaacacctaaggcaaggaaagagagaagtgagacagcctgctcagccatgaccagctgggagcccagagaggctctccagtgtggagaaagggtaagtgagagacccccagcagtccacattcccactgtagattcttgcaatcctagccatgagataactcctcgacccttgaggaccttaaaactaacataggaagctgcctgaagaccatacaactctactgctctagaatgggagctcacgctgggtcccgcacacaccacccctggcaaatcctaagcagctacagcaaggttccattttgagagtccatctctcagcagaatgaatcctgtcatgaggctcaaaagcctctgcatctccacatcctgggtcccccgttgatatcctccacccacagctgctgctgctggttgctgctgttggctgctactgccaggcccaaagtgtaagccattggctgtgacactgcccacccccagcagttggccaccacacatttataagcaacctaaggacaggctacctcatgcacatcttccacttagggccaaagcatgcactccccaaccacctgcccatggttgctgccactgaaaacaaccctgcccactagcagcagggtcacagggcatctgctgccaccctcacccaagcattctgccagggacctggtgtattggtgagagttctccaaagggacagaactaataggatatatgcatatatgaaagggagtttattaaggagaattgattcacacgatcacaaagtgaaatcccacaataggctgttttcaagctgaggagctaggaagccagtagtggctcactccaagtccaaagctcaaaagtagggaagccgacagtgcagccttcagtctgtggtcaaaggcctgagagtctgcagcaaaccactggtataagtccaagagtccaaaggccgaagaacctggagcctgatgttcaagggcaggaagcatctagcgcaggagagagagatgaaagccagaagactcagcaagtcagcttcttccactttctcccacctgctttttctagctgtgctggcagctgatgggatggtacccacttagattgagggtgggtcttcctctcccagtccactgactcaaatgttaatctcctcggcaacacccatacagacacacccagaaacaatactttgcatccttcattccagtcaagttgacaatgttaaccatcacatccaggatcactctgcccctgtctaccacagctagcacctgcacacactgccagtggttgttgaagacaggcctgcctggcccagctctgcctcttcccacagtgcccaggcatactgttcaggagcctggagatcaccctgccccatccaccaccttcggcatgtgagcactccttccaggagcctaaggatgggccatccaacctgctgctaccaccacagctggcacccacctgcatgcatgacctacgggcttggggactggcccaactagcaaatttctgcccctgccaaccccagtgcagactgcttggaaacaagaaggttgtcccactactgctactgccatcatctatgccttgctcactgtgcaggggcccaaagacccaccaacctgtccagcccaccactgccactgccagcaccaaagcaagccatttggaggcccaagaaccagcctgtctagatctgctaacactggtgccagtgcacattaccctggggctcaacaacaggcattgtcagcctgccactgccaccactgggacacaaggactggcccattttgtgtccccatccctagcagaatgtcaccacagcctccactaacaaccacaccctatgccactgctactgatgctggttacagccaaagaaatcatacagagactacactaccgcatgcacctggaatcaaagccaaagtgccctacacaaccaataccatagatacatcctcagaaaaaagtcctcccttatgaaagcaaattcacaaaattggaataagtgattgttacaccagatgtgcagatatcagtgtaaagacacaagaaacatgaaaaagcaaggaaagatagcatcctcaaaggaacacaataattctccagcaaaagattcccattaaaaagaaacttacaaaatcccagaaaggaattcaaaataatgattttttaaagcttagtgagatacaacagaacaaagtaaacaatacaaagaaattagaaaaacaattcagggtatgaatgagaaatttaccagagatagaggtcatacataaaagaaccaaacagattctgaaactgaaaaactcattgaatggaattaaaacatatattcaaaaacttcaataatagactagatcaagcagaagaatttcagagcttgaagacagatcttttgaaataacccagccagacaaaaataaagaaaaaagaatttaaaagaatgagtgaagcccacatgacatatagcatactattaagcaaccaaatgtttaaatttttggtgtctcagaaggtgagagaaaatataagatcgaaaacctatttaacaaaacaatagctgggaattttccaagtctagcaagagatttagacatccagataacaggaaactcatagatctccaaatagatacaatttaaaaaggtcttctccatggcccattatagtcaaactgccaaaagtcaaagacagagaattctaaaaagagcaagagaaatgtgtttagtcacttataagggaatccccatcagactaacagcacatttctcagcagaaaccttataggccagaagataattagattatatattcaaagtgttgaaagaaaaaatgccaaccaagaacactatacccaaaatgttatttataaacgaaagagaaatagtctttcccaaataagcaaatgctgagggaattcatcaccactagacaagttctacaagaaatgattaaggaagtcctgtacctggaaacaaatggatgatatctaccatcatgaaaacacatgagtgtataaagcccactggtagagcaaacacacaaataaagaaaagaaaggactcaaatgttaccactaaggaaaatcaccaagccacaataataaacgataaaagagaaagaaacgaacaaaggatatacaaaaaactcaaaatcaattgataaaataaaaacaggaataagccctcagatatcaataataatcttaaatgtaagcagattaaactttccacgtaaaagatatagactggctaaatgggttaaaaaaacgaaataaaacatgctccaactatatgttgccttcaaacatagtgaaagtattctagcttgatgtgtaaacaagttgtaaactaacctaggagtatacccttgtaacaaaccaactgagtctcagccaattatagtagctgaaccttcagcaaatcccaggctttaaattgccagattatgcccaaataaaacaaacctcaaactgtaccaatcatttaatccctgtatgtcatttcttgtttcctgatttttaagtatagctcaccatgatggaggtgggggtattctgaacaatttttggttcagaatgcttcccagttctaaaacctgtttcctgcacaaactttgttaaatttaatttgtcttagttttttctttaataattgtaaaatacagcatataaagaagtgaggataaaactttcaggactattttaacaaatatgtacagcaaaccctagcagtcaagaaatatattgctaacaccccagcaaaagctacaccaagcatacccttcttcctccctcccttcttttcctgagtatagccccttcctttcaccctagaaataatagctccctgacaggtttagtaataatttcctcaatttattttaccaactatccatttgggctgctatgacaagatacctcacgctgggtaatatataaattgaagacagatcttgctcacagttctggaggctaggaaatccaagataaagacaacagcaaatttagtgtctggtgaggactatttctttctttgcttcaaagacgacgctttcttcctgggtcctcacatgacagtaggggcaaagaagccccctcaggctcctttttaagggcactaatcccattcataactcatgggaccctgctgatcacctcccaaaagcccacctcttaataccaccacattggggattaagttttcacatttcaacttaggagagacataaacattcagactgtagcattctgcctctggtgtcccaaaatttattttgttcttacatgcacattccatcccaataacctcaaaactcttaatttcagcatcaacacagaagtctaaagtccagagtcttgtctaaacatcatttaaatcaggtatgagtgagactcaagttatgattcatcctgaggcaaattgccctctggttgtgaatctgtgaaattaaacttatatgcttccaaaatacagtggaggagaaggcatacaataaatgtttctattccaaaaaggaaaaataggaaggaataaagagttaactggtctcaagtaagtccaaaacccctcagggtaaacaacagtaaatcttaagtcttgacaatcaactttgacttgatgtcctgccttctggacatactggtgcagaggttggaacctcaaggctccaggtgacctcacccccatggctttgctgagcacagcccacacagcagctttcaggggttggaattaggtgcctgtggctctcccaggcggcgttttacactggaggctccacagttctggggttttggggcagccctgctcccatggctccataagacattgccctattggggactctctgtggtgacccaactcccacagttccactgagcaatgccctagtggcagctgtctgtggtggtccttcccctgtggcagttctcagcctagatttcaagaatctctgcggtatcctttgaaatcaatgtggaggtggccatcctcccacagttcttgcattctgagtgcctggagatttagcaccatgtgaatgctgcaaaggtttactacccacatcctctggagggccagccactgctgctggcaccacaactgggcccactggagccacaccgggggtggccaaaaagtgctgcatttgaatcaaagagcagagatttgaagtggcactgggcagtgagttaaaggccccacatatgttctgggcccctccttttaaaccattatgccttcatggctctgccattgtggacctgtgatggaaatggcagtcccaaagatctccaaatatgttcagggtcattctttcattgtcttgatgaatgacacagggctgagtgatcctgatctccttatcaaagagtgatttggccacacccatggtattttcttctgaacatgacccggctgagaattttccatatattacattcttttccctttttgattatctgtctttagctcatttctgtcttctcacattttatcataagcaatcacgagaagtcatgccacaccctcaacactttgcttagagatttctcccccgcaaatatcctatttaatcactcagaagttctaccttgcacaaaacacaattcagctatgttttgtgccactttatcataaggattgtctttcctctcattttcaacaagacgttcctcatttccatctaatacctcatcagaatagcctttaccattcacatttctatttaataccaacattctgaccatgaccacttaggtaatctctatgaagactgaggctttctctacagttcttctcttctaaaccctcaccagaatcatccttaatgcttcattaatggcaatgtacagtttaaaaagaaatcatgtacccccaaactcttctaacctctactcattacccagttccaaagccacttttaaattttaggtatttgttaaagtgacagcctattctcagtaacaatttctgattgaaactctaaaaacagagatagattttgccaggttttgaactttatattcattatgttttgtttttccatatttgtaaaattcttccgtgttgttgcatgtaactgattcatcatctccattgccacagtcactgttcatagagatttggattgttatcagtgtggagaatattgttatgtccatgtatcctggtgtacatacatacacatttctgtaggatatatacctagagtggaattgctggatcacagggtcttcatattttcagatacataagaaacactaaacagggctttaaagtggttttactgatctacattgccaccaaaggatataagagttcttactcttctacaacctcacctaaacttcatgttaatcggcttcctgaatcattttcaacctgatggacatccgatagaagctttaatttgcagtattctgattagtaatgtggttgagaacctttccaattgtttactgatcatata

SEQ ID NO: 725 - DNA, 10431 bp, Homo sapiens
cttcatttaccaggttttgaagggagcacctgtgagaggaatattgatgactgccctaaccacaggtgtcagaatggaggggtttgtgtggatggggtcaacacttacaactgccgctgtcccccacaatggacaggacagttctgcacagaggatgtggatgaatgcctgctgcagcccaatgcctgtcaaaatgggggcacctgtgccaaccgcaatggaggctatggctgtgtatgtgtcaacggctggagtggagatgactgcagtgagaacattgatgattgtgccttcgcctcctgtactccaggctccacctgcatcgaccgtgtggcctccttctcttgcatgtgcccagaggggaaggcaggtctcctgtgtcatctggatgatgcatgcatcagcaatccttgccacaagggggcactgtgtgacaccaaccccctaaatgggcaatatatttgcacctgcccacaaggctacaaaggggctgactgcacagaagatgtggatgaatgtgccatggccaatagcaatccttgtgagcatgcaggaaaatgtgtgaacacggatggcgccttccactgtgagtgtctgaagggttatgcaggacctcgttgtgagatggacatcaatgagtgccattcagacccctgccagaatgatgctacctgtctggataagattggaggcttcacatgtctgtgcatgccaggtttcaaaggtgtgcattgtgaattagaaataaatgaatgtcagagcaacccttgtgtgaacaatgggcagtgtgtggataaagtcaatcgtttccagtgcctgtgtcctcctggtttcactgggccagtttgccagattgatattgatgactgttccagtactccgtgtctgaatggggcaaagtgtatcgatcacccgaatggctatgaatgccagtgtgccacaggtttcactggtgtgttgtgtgaggagaacattgacaactgtgaccccgatccttgccaccatggtcagtgtcaggatggtattgattcctacacctgcatctgcaatcccgggtacatgggcgccatctgcagtgaccagattgatgaatgttacagcagcccttgcctgaacgatggtcgctgcattgacctggtcaatggctaccagtgcaactgccagccaggcacgtcaggggttaattgtgaaattaattttgatgactgtgcaagtaacccttgtatccatggaatctgtatggatggcattaatcgctacagttgtgtctgctcaccaggattcacagggcagagatgtaacattgacattgatgagtgtgcctccaatccctgtcgcaagggtgcaacatgtatcaacggtgtgaatggtttccgctgtatatgccccgagggaccccatcaccccagctgctactcacaggtgaacgaatgcctgagcaatccctgcatccatggaaactgtactggaggtctcagtggatataagtgtctctgtgatgcaggctgggttggcatcaactgtgaagtggacaaaaatgaatgcctttcgaatccatgccagaatggaggaacttgtgacaatctggtgaatggatacaggtgtacttgcaagaagggctttaaaggctataactgccaggtgaatattgatgaatgtgcctcaaatccatgcctgaaccaaggaacctgctttgatgacataagtggctacacttgccactgtgtgctgccatacacaggcaagaattgtcagacagtattggctccctgttccccaaacccttgtgagaatgctgctgtttgcaaagagtcaccaaattttgagagttatacttgcttgtgtgctcctggctggcaaggtcagcggtgtaccattgacattgacgagtgtatctccaagccctgcatgaaccatggtctctgccataacacccagggcagctacatgtgtgaatgtccaccaggcttcagtggtatggactgtgaggaggacattgatgactgccttgccaatccttgccagaatggaggttcctgtatggatggagtgaatactttctcctgcctctgccttccgggtttcactggggataagtgccagacagacatgaatgagtgtctgagtgaaccctgtaagaatggagggacctgctctgactacgtcaacagttacacttgcaagtgccaggcaggatttgatggagtccattgtgagaacaacatcaatgagtgcactgagagctcctgtttcaatggtggcacatgtgttgatgggattaactccttctcttgcttgtgccctgtgggtttcactggatccttctgcctccatgagatcaatgaatgcagctctcatccatgcctgaatgagggaacgtgtgttgatggcctgggtacctaccgctgcagctgccccctgggctacactgggaaaaactgtcagaccctggtgaatctctgcagtcggtctccatgtaaaaacaaaggtacttgcgttcagaaaaaagcagagtcccagtgcctatgtccatctggatgggctggtgcctattgtgacgtgcccaatgtctcttgtgacatagcagcctccaggagaggtgtgcttgttgaacacttgtgccagcactcaggtgtctgcatcaatgctggcaacacgcattactgtcagtgccccctgggctatactgggagctactgtgaggagcaactcgatgagtgtgcgtccaacccctgccagcacggggcaacatgcagtgacttcattggtggatacagatgcgagtgtgtcccaggctatcagggtgtcaactgtgagtatgaagtggatgagtgccagaatcagccctgccagaatggaggcacctgtattgaccttgtgaaccatttcaagtgctcttgcccaccaggcactcggggcctactctgtgaagagaacattgatgactgtgcccggggtccccattgccttaatggtggtcagtgcatggataggattggaggctacagttgtcgctgcttgcctggctttgctggggagcgttgtgagggagacatcaacgagtgcctctccaacccctgcagctctgagggcagcctggactgtatacagctcaccaatgactacctgtgtgtttgccgtagtgcctttactggccggcactgtgaaaccttcgtcgatgtgtgtccccagatgccctgcctgaatggagggacttgtgctgtggccagtaacatgcctgatggtttcatttgccgttgtcccccgggattttccggggcaaggtgccagagcagctgtggacaagtgaaatgtaggaagggggagcagtgtgtgcacaccgcctctggaccccgctgcttctgccccagtccccgggactgcgagtcaggctgtgccagtagcccctgccagcacgggggcagctgccaccctcagcgccagcctccttattactcctgccagtgtgccccaccattctcgggtagccgctgtgaactctacacggcaccccccagcacccctcctgccacctgtctgagccagtattgtgccgacaaagctcgggatggcgtctgtgatgaggcctgcaacagccatgcctgccagtgggatgggggtgactgttctctcaccatggagaacccctgggccaactgctcctccccacttccctgctgggattatatcaacaaccagtgtgatgagctgtgcaacacggtcgagtgcctgtttgacaactttgaatgccaggggaacagcaagacatgcaagtatgacaaatactgtgcagaccacttcaaagacaaccactgtgaccaggggtgcaacagtgaggagtgtggttgggatgggctggactgtgctgctgaccaacctgagaacctggcagaaggtaccctggttattgtggtattgatgccacctgaacaactgctccaggatgctcgcagcttcttgcgggcactgggtaccctgctccacaccaacctgcgcattaagcgggactcccagggggaactcatggtgtacccctattatggtgagaagtcagctgctatgaagaaacagaggatgacacgcagatcccttcctggtgaacaagaacaggaggtggctggctctaaagtctttctggaaattgacaaccgccagtgtgttcaagactcagaccactgcttcaagaacacggatgcagcagcagctctcctggcctctcacgccatacaggggaccctgtcataccctcttgtgtctgtcgtcagtgaatccctgactccagaacgcactcagctcctctatctccttgctgttgctgttgtcatcattctgtttattattctgctgggggtaatcatggcaaaacgaaagcgtaagcatggctctctctggctgcctgaaggtttcactcttcgccgagatgcaagcaatcacaagcgtcgtgagccagtgggacaggatgctgtggggctgaaaaatctctcagtgcaagtctcagaagctaacctaattggtactggaacaagtgaacactgggtcgatgatgaagggccccagccaaagaaagtaaaggctgaagatgaggccttactctcagaagaagatgaccccattgatcgacggccatggacacagcagcaccttgaagctgcagacatccgtaggacaccatcgctggctctcacccctcctcaggcagagcaggaggtggatgtgttagatgtgaatgtccgtggcccagatggctgcaccccattgatgttggcttctctccgaggaggcagctcagatttgagtgatgaagatgaagatgcagaggactcttctgctaacatcatcacagacttggtctaccagggtgccagcctccaggcccagacagaccggactggtgagatggccctgcaccttgcagcccgctactcacgggctgatgctgccaagcgtctcctggatgcaggtgcagatgccaatgcccaggacaacatgggccgctgtccactccatgctgcagtggcagctgatgcccaaggtgtcttccagattctgattcgcaaccgagtaactgatctagatgccaggatgaatgatggtactacacccctgatcctggctgcccgcctggctgtggagggaatggtggcagaactgatcaactgccaagcggatgtgaatgcagtggatgaccatggaaaatctgctcttcactgggcagctgctgtcaataatgtggaggcaactcttttgttgttgaaaaatggggccaaccgagacatgcaggacaacaaggaagagacacctctgtttcttgctgcccgggaggggagctatgaagcagccaagatcctgttagaccattttgccaatcgagacatcacagaccatatggatcgtcttccccgggatgtggctcgggatcgcatgcaccatgacattgtgcgccttctggatgaatacaatgtgaccccaagccctccaggcaccgtgttgacttctgctctctcacctgtcatctgtgggcccaacagatctttcctcagcctgaagcacaccccaatgggcaagaagtctagacggcccagtgccaagagtaccatgcctactagcctccctaaccttgccaaggaggcaaaggatgccaagggtagtaggaggaagaagtctctgagtgagaaggtccaactgtctgagagttcagtaactttatcccctgttgattccctagaatctcctcacacgtatgtttccgacaccacatcctctccaatgattacatcccctgggatcttacaggcctcacccaaccctatgttggccactgccgcccctcctgccccagtccatgcccagcatgcactatctttttctaaccttcatgaaatgcagcctttggcacatggggccagcactgtgcttccctcagtgagccagttgctatcccaccaccacattgtgtctccaggcagtggcagtgctggaagcttgagtaggctccatccagtcccagtcccagcagattggatgaaccgcatggaggtgaatgagacccagtacaatgagatgtttggtatggtcctggctccagctgagggcacccatcctggcatagctccccagagcaggccacctgaagggaagcacataaccacccctcgggagcccttgccccccattgtgactttccagctcatccctaaaggcagtattgcccaaccagcgggggctccccagcctcagtccacctgccctccagctgttgcgggccccctgcccaccatgtaccagattccagaaatggcccgtttgcccagtgtggctttccccactgccatgatgccccagcaggacgggcaggtagctcagaccattctcccagcctatcatcctttcccagcctctgtgggcaagtaccccacacccccttcacagcacagttatgcttcctcaaatgctgctgagcgaacacccagtcacagtggtcacctccagggtgagcatccctacctgacaccatccccagagtctcctgaccagtggtcaagttcatcaccccactctgcttctgactggtcagatgtgaccaccagccctacccctgggggtgctggaggaggtcagcggggacctgggacacacatgtctgagccaccacacaacaacatgcaggtttatgcgtgagagagtccacctccagtgtagagacataactgacttttgtaaatgctgctgaggaacaaatgaaggtcatccgggagagaaatgaagaaatctctggagccagcttctagaggtaggaaagagaagatgttcttattcagataatgcaagagaagcaattcgtcagtttcactgggtatctgcaaggcttattgattattctaatctaataagacaagtttgtggaaatgcaagatgaatacaagccttgggtccatgtttactctcttctatttggagaataagatggatgcttattgaagcccagacattcttgcagcttggactgcattttaagccctgcaggcttctgccatatccatgagaagattctacactagcgtcctgttgggaattatgccctggaattctgcctgaattgacctacgcatctcctcctccttggacattcttttgtcttcatttggtgcttttggttttgcacctctccgtgattgtagccctaccagcatgttatagggcaagacctttgtgcttttgatcattctggcccatgaaagcaactttggtctcctttcccctcctgtcttcccggtatcccttggagtctcacaaggtttactttggtatggttctcagcacaaacctttcaagtatgttgtttctttggaaaatggacatactgtattgtgttctcctgcatatatcattcctggagagagaaggggagaagaatacttttcttcaacaaattttgggggcaggagatcccttcaagaggctgcaccttaatttttcttgtctgtgtgcaggtcttcatataaactttaccaggaagaagggtgtgagtttgttgtttttctgtgtatgggcctggtcagtgtaaagttttatccttgatagtctagttactatgaccctccccacttttttaaaaccagaaaaaggtttggaatgttggaatgaccaagagacaagttaactcgtgcaagagccagttacccacccacaggtccccctacttcctgccaagcattccattgactgcctgtatggaacacatttgtcccagatctgagcattctaggcctgtttcactcactcacccagcatatgaaactagtcttaactgttgagcctttcctttcatatccacagaagacactgtctcaaatgttgtacccttgccatttaggactgaactttccttagcccaagggacccagtgacagttgtcttccgtttgtcagatgatcagtctctactgattatcttgctgcttaaaggcctgctcaccaatctttctttcacaccgtgtggtccgtgttactggtatacccagtatgttctcactgaagacatggactttatatgttcaagtgcaggaattggaaagttggacttgttttctatgatccaaaacagccctataagaaggttggaaaaggaggaactatatagcagcctttgctattttctgctaccatttcttttcctctgaagcggccatgacattccctttggcaactaacgtagaaactcaacagaacattttcctttcctagagtcaccttttagatgataatggacaactatagacttgctcattgttcagactgattgcccctcacctgaatccactctctgtattcatgctcttggcaatttctttgactttcttttaagggcagaagcattttagttaattgtagataaagaatagttttcttcctcttctccttgggccagttaataattggtccatggctacactgcaacttccgtccagtgctgtgatgcccatgacacctgcaaaataagttctgcctgggcattttgtagatattaacaggtgaattcccgactcttttggtttgaatgacagttctcattccttctatggctgcaagtatgcatcagtgcttcccacttacctgatttgtctgtcggtggccccatatggaaaccctgcgtgtctgttggcataatagtttacaaatggttttttcagtcctatccaaatttattgaaccaacaaaaataattacttctgccctgagataagcagattaagtttgttcattctctgctttattctctccatgtggcaacattctgtcagcctctttcatagtgtgcaaacattttatcattctaaatggtgactctctgcccttggacccatttattattcacagatggggagaacctatctgcatggacctctgtggaccacagcgtacctgcccctttctgccctcctgctccagccccacttctgaaagtatcagctactgatccagccactggatattttatatcctcccttttccttaagcacaatgtcagaccaaattgcttgtttctttttcttggactactttaatttggatcctttgggtttggagaaagggaatgtgaaagctgtcattacagacaacaggtttcagtgatgaggaggacaacactgcctttcaaactttttactgatctcttagattttaagaactcttgaattgtgtggtatctaataaaagggaaggtaagatggataatcactttctcatttgggttctgaattggagactcagtttttatgagacacatcttttatgccatgtatagatcctcccctgctatttttggtttatttttattgttataaatgctttctttctttgactcctcttctgcctgcctttggggataggtttttttgtttgtttatttgcttcctctgttttgttttaagcatcattttcttatgtgaggtggggaagggaaaggtatgagggaaagagagtctgagaattaaaatattttagtataagcaattggctgtgatgctcaaatccattgcatcctcttattgaatttgccaatttgtaatttttgcataataaagaaccaaaggtgtaatgttttgttgagaggtggtttagggattttggccctaaccaatacattgaatgtatgatgactatttgggaggacacatttatgtacccagaggcccccactaataagtggtactatggttacttccttgtgtacatttctcttaaaagtgatattatatctgtttgtatgagaaacccagtaaccaataaaatgaccgcatattcctgactaaacgtagtaaggaaaatgcacactttgtttttacttttccgtttcattctaaaggtagttaagatgaaatttatatgaaagcatttttatcacaaaataaaaaaggtttgccaagctcagtggtgttgtattttttattttccaatactgcatccatggcctggcagtgttacctcatgatgtcataatttgctgagagagcaaattttcttttctttctgaatcccacaaagcctagcaccaaacttctttttttcttcctttaattagatcataaataaatgatcctggggaaaaagcatctgtcaaataggaaacatcacaaaactgagcactcttctgtgcactagccatagctggtgacaaacagatggttgctcagggacaaggtgccttccaatggaaatgcgaagtagttgctatagcaagaattgggaactgggatataagtcataatattaattatgctgttatgtaaatgattggtttgtaacattccttaagtgaaatttgtgtagaacttaatatacaggattataaaataatattttgtgtataaatttgttataagttcacattcatacatttatttataaagtcagtgagatatttgaacatgaa

SEQ ID NO: 726 - protein, 2203 aa, Homo sapiens
LHLPGFEGSTCERNIDDCPNHRCQNGGVCVDGVNTYNCRCPPQWTGQFCTEDVDECLLQPNACQNGGTCANRNGGYGCVCVNGWSGDDCSENIDDCAFASCTPGSTCIDRVASFSCMCPEGKAGLLCHLDDACISNPCHKGALCDTNPLNGQYICTCPQGYKGADCTEDVDECAMANSNPCEHAGKCVNTDGAFHCECLKGYAGPRCEMDINECHSDPCQNDATCLDKIGGFTCLCMPGFKGVHCELEINECQSNPCVNNGQCVDKVNRFQCLCPPGFTGPVCQIDIDDCSSTPCLNGAKCIDHPNGYECQCATGFTGVLCEENIDNCDPDPCHHGQCQDGIDSYTCICNPGYMGAICSDQIDECSPCLNDGRCIDLVNGYQCNCQPGTSGVNCEINFDDCNPCIHGICMDGINRYSCVCSPGFTGQRCNIDIDECNPCRKGATCINGVNGFRCICPEGPHHPSCQVNECLSNPCIHGNCTGGLSGYKCLCDAGWVGINCEVDKNECLSNPCQNGGTCDNLVNGYRCTCKKGFKGYNCQVNIDECNPCLNQGTCFDDISGYTCHCVLPYTGKNCQTVLAPCSPNPCENAAVCKESPNFESYTCLCAPGWQGQRCTIDIDECISKPCMNHGLCHNTQGSYMCECPPGFSGMDCEEDIDDCLANPCQNGGSCMDGVNTFSCLCLPGFTGDKCQTDMNECLSEPCKNGGTCSDYVNSYTCKCQAGFDGVHCENNINECTESSCFNGGTCVDGINSFSCLCPVGFTGSFCLHEINECSSHPCLNEGTCVDGLGYCSCPLGYTGKNCQTLVNLCSRSPCKNKGTCVQKKAESQCLCPSGWAGAYCDVPNVSCDIAASRRGVLVEHLCQHSGVCINAGNTHYCQCPLGYTGSYCEEQLDECNPCQHGATCSDFIGGYRCECVPGYQGVNCEYEVDECQNQPCQNGGTCIDLVNHFKCSCPPGTRGLLCEENIDDCRPHCLNGGQCMDRIGGYSCRCLPGFAGERCEGDINECLSNPCSSEGSLDCIQLTNDYLCVCRSAFTGRHCETFVDVCPQMPCLNGGTCAVNMPDGFICRCPPGFSGARCQSSCGQVKCRKGEQCVHTASGPRCFCPSPRDCESGCASSPCQHGGSCHPQRQPPYYSCQCAPPFSGSRCELYTAPPSTPPATCLSQYCADKARDGVCDEACNSHACQWDGGDCSLTMENPWANCSSPLPCWDYINNQCDELCNTVECLFDNFECQGNSKTCKYDKYCADHFKDNHCDQGCNSEECGWDGLDCAADQPENLAEGTLVIVVLMPPEQLLQDARSFLRALGTLLHTNLRIKRDSQGELMVYPYYGEKSAAMKKQRMTRRSLPGEQEQEVAGSKVFLEIDNRQCVQDSDHCFKNTDAAAALLASHAIQGTLSYPLVSVVSESLTPERTQLLYLLAVAVVIILFIILLGVIMAKRKRKHGSLWLPEGFTLRRDNHKRREPVGQDAVGLKNLSVQVSEANLIGTGTSEHWVDDEGPQPKKVKAEDEALLSEEDDPIDRRPWTQQHLEAADIRRTPSLALTPPQAEQEVDVLDVNVRGPDGCTPLMLASLRGGSSDLSDEDEDAEDSSANIITDLVYQGASLQAQTDRTGEMALHLAARYSRADAAKRLLDAGADANAQDNMGRCPLHAAVAADAQGVFQILIRNRVTDLDARMNDGTTPLILAARLAVEGMVAELINCQADVNAVDDHGKSALHWAAAVNNVEATLLLLKNGANRDMQDNKEETPLFLAAREGSYEAAKILLDHFANRDITDHMDRLPRDVARDRMHHDIVRLLDEYNVTPSPPGTVLTSALSPVICGPNRSFLSLKHTPMGKKSRRPSAKSTMPTSLPNLAKEAKDAKGSRRKKSLSEKVQLSESSVTLSPVDSLESPHTYVSDTTSSPMITSPGILQDNPMLATAAPPAPVHAQHALSFSNLHEMQPLAHGASTVLPSVSQLLSHHHIVSPGSGSAGSLSRLHPVPVPADWMNRMEVNETQYNEMFGMVLAPAEGTHPGIAPQSRPPEGKHITTPREPLPPIVTFQLIPKGSIAQPAGAPQPQSTCPPAVAGPLPTMYQIPEMARLPSVAFPTAMMPQQDGQVAQTILPAYHPFPASVGKYPTPPSQHSYASSNAAERTPSHSGHLQGEHPYLTPSPESPDQWSSSSPHSASDWSDVTTSPTPGGAGGGQRGPGTHMSEPPHNNMQVYA

SEQ ID NO: 727 - DNA, 26034 bp, Mus musculus
  misc_feature (1)...(26034): n = A,T,C or G
gctgtgattaaacaaacaaacaagcaaaccagcaacagaaaacaaccacaaaaacatcatcaaaggcaactgaaggagggcagtgcttatttttgtttattgttccagaggaataagagttcatcatggcagggcagcatagcagcagttggcaggcacagtggtgggaacgggatgctgagagctaaataaatcttctacagcaagcatgaatcagagagtgcaaattggaggtagtgcaaggatatactctctcagagcccaccaccagtgacacacttctagcaaggctgcaaggctgcaaggctgcactttctcagtaccactaactggggaccaagtgttcaagcaactgaatctatgggggaaattcccaattaaaaccaccacacctgtcttcctgggcctggtgttctagacctagaatagaggcagacaaaaagtacagagatggtattatgaatttcattcagtaaagatacacatataatatgtagatgtgtatgatgtataatcatagatgtatatgtgacacataaaatatggcaaatatctatattatacaatgttgtcataaatggcatttattaactctatcaatcagttcttaatatgtcctccgggcatttcacttggccacattctcctggtgcatcatgtgtgatggaggcctcctgttcagtctgccttccttctccttctccctcctcctccctttcctcacgatccctacctacctgcagcccccagccaggagactgaaacatagcagccacagattagcccccaacaatacagaaacaaaatacagtaaatatataggatataatacacaaaatgtctgtatgaaacacaaaataaatgagtgtgtgatatagcaagtacatgctcaatacacaagcaagtttcagtgtgacacacagacagatgtgatagattaataaatacatgcagggagactgggaaaattaaaacggcgcggaatgttgtaggatatttgatcacactgtgaaccctgagattgtgttatttactgaaaaaaaaacctgtttctaactgtgatgtggctcagccttagaacacacctttaatcccaaacaacaaagataaagttcgtttgtagaaggaaacacacttgtttgaaagtgatatctaattgagtggcagacaaactgatctatcagagaaagatttgaccgaataggatatgcccaactctcaagagaagacaaaggaaagagaagctacttaagaggcagtgcataagagagaggtcagttttaccaggagagttttacagagaaaggctgcagagagagaacaagctagacacaggtgaggacagaaggagtcagagaatgagaaggagccaggttagaacatattgtcaaagttattatgaggccatgcaaagcaattcaggagaggccaagaaagagaagccagactgaatcagtgagtgtggagaggagtttgagtcaaaacagctgagttgagccagaaagaactagacagggttagtctcagcagcaaggcttagaggctgaaaacattctagacctacaatagatggtacggtacggaggctagaagcttccaggactaggcctgggtcaacagacagggaggagcgagccttagagatgacaaatagaggaaataaaagttacctttacaatgaaaagggaaagaggggccgggcatggaggggccaggtgtggtgacccaagcctttaatcccagcacttgggaggcagaggcaggtgaatttctgagttaacttttttttcagcctagctgtatcctttgagcgatgtaatttcaaaagctacaaaatcatacatagctattgctagtgttaactgagaatttggagttcctgttcctgagttcttagtctccttaaaaatagactctgaaggaagctagagaacaatttggctaggaatttgagagaaaaatcaacagggcaagtcagggttcttcagaggaacagaacatacagaatgaatgttagaatgaatatatataatgaatatattcattttatatatattctagatagaatatgttatatattaattataattattgtatatgtttatttatttatgtgtttatttattagagtaaccacctatctatatcttcccagtcacaccaactgttcaaatacccaagtctataaggcacacattcctcattaaaaccaccacacctttcttcctggagctgttgttctgaacctagcaaagagacagatactaagtatatagatgatatacaaatatcatccagtgaatatgtgatatataaatatatagtaggtaaatatatagtatgttatttaagaatgatacaggttcctgtatcatataggtatttaccatgagttgtgtaagcctgtatcaaataggtatttaccatgtgttatgaatcatgactgtggtccagctagttcagcaatggctatctcctaaaggagaggccaagactctggtcattgttcagcccttgaggttgcatgtctcagctggtctcagctggtctcagtccatgtttggcagaaggtatggttcagatttaaggtgggtcttcttcatcaaatatcccacattcaggatgggtcttccacatcaaaggattcagtcaagaaatcccttcacagtcatacccaactgcttgggttttagttgattccagattaatcaagtcgacaaccaagattagctatcacagtgggcaggctgtaaatcttacaggaaaagggagatggagaaaagagaataagtcaatcttttttgtcttagggtcaacgaaagctagcaggttcagtcatggaggtcagcaagtagcagaaagcaatggggattcgaatgggggaggtaagagatggatgacttcagcaaaagagtgggcacatccagagaagcaagagccataatgggacaagctaataactagcaggtgatcttcctaaagtggtctgcctcggattattatataatctgcaacaggtgagccctcattaaacaaagctgtgagggactaattttaggaaaaattcctgctattattatgtttttcctgttattagtaaacatatataacaatcactaaataatagcagacccccttggaagcagatctctgcagatccatggagatgcactatcttctagtgatgctatatagacaaatagatgacataagtcttaatgatgatcctataagagttcctaaaattatatctgtgattattaagctcttttattaatgggactgctattaggtccttttcagatagtcaaagctgccatgagaactctgccagtctcccaagtgtcaccagttaattgctcttagagagtaaccagactttcctactcagagcacattccaagaggttgtaaaacaattaaccaaaggtcattaaaaggcaactaacaacttattgtaggtgctaggacagaagataaaataccgactgggtttatctatacaaaacttcactaataacttagttatggtcttaacccttcagtgaacctgtggagctgagacaggtgatggatgtttaggcagataattactcctaatatgcatgtaaacattcgctgctgtaaacttccatttcaatttatgatttgatttttttgtgtgaacttgtgatgaactttatagcatgtgatcatgtattctgaaagatggataagtactgaggacaaagagatcacgggggaactaagattaatggaaagctaagatcaatagaggagacctttttgcctttccccacttagactagaatcttttcccttcacgcacttaggatctttctgctttcccccttagatagctttcataggaaactttttacaacttggtaataaactctataatcacttcttatctaagtgtcttcttaagtgtcttctcttcctgcgacttccgactagaaggctgaaagttagagcccagcattttctgctgatatagaacaaaggctgcattgcttaatcctccgcttttaggctacagatgttaatcacctaagccagcagtcttttaacctcagaaagagcaagaaagtttttatgactttttagaagtcttatcatcagcatttcagtatcattagggagctagaaagccctgagaccctcagactttaaagccatcaccagagtcactccaccgctactctggcccggccagggaggctcccagcagaaggagagagtttattttgaaaggccagtgagaccacttggtgggaaaagcacttgctgccaagtcttcctgtctgagttagatccctggaacccacatggaggaaggattggaccaactccctcaggttgacttcccgatacataaaagcacataagtgtataccccaccccaacacacactaaataaatgcagtgagaattttggtttcttttaaaacccagttatgttccatgaacatggttttgttttaaccccaggtgtgggacaatggctgcttcacagcaggtgaccagggttgctcttgtacactaggacaggcatgatttttttcccaactgcagagagtttatgtttggaattctgggaacttttgagagggtacaaatgcctgagctggaggccagaggtgctctgaggaggctgcagaagctggttcctattgtcgctctttggcaagtgatcatgattaaagagatagaagaagaagttggagataccctggcgagaagactaggctagacacccctagtcagcacgaagaagtctaaagaggtctagacacctttcccctctaacctttctctcctacctggtgctgggcgttggaaggattagtgtggaacaagggttggaaggatggtagatataagaacccaataaagtagccaaaaaaacagtgccaacaaataaataactatagtaaaaatatttaaaaatcccgtgtggggtttctacccacctctgaccatttatgttcccagatgaaagacacacacagcctttatatttttaaatattccttgggcagcacaatatttttaaataatccttggacagcccaccctcatgctgccttcctagcaataaccccgaattatcacttattatgtttcattgttccatctgagctgctcttagctccaattggcttgcccatgtggtcaagatctcttggcctttagcctatggcagctcaggctctccctcctgtgtattcttcttctgtggctgcttccttcttttctctcttctcccctcctcatggtctactctttctaagcccaagaaaacctcctccccacctacatctcttctccccaactatgggctgtctgcatctttattcaccaatcagaattcactttggggcagggtcccaggagctacatgcaaactccaggttttgggagaccacacttagcattacaatagacagtaaaagacaaaacctcaacaaataagtgtacaaatttttaataaaaacggggacagcaaattggctcaatgggtaaaggagcttgctaccaagactggtgcctccgagtttgatcccgggacccacagagtggaaggagagaactgactcgtgaaagttgtccccttgttagaataacaacctcctggccaagagaatagaatctacatccgaggtggagaccatgtattctggttgtgtgtgttgttcttctgccaggcccagggacagcagcaggctcatcttaagcgaggagactgaacaaataagtcatgtaatgggatactgtactcttcctccacagaatccctgtccccagtgccatagcttagagccacgtcagcccaatcttctaaattattgagaaaagtatagtgacttttttttctttcttctacctctattttttgtttgttttttgagacacagtttgttttctgtgtagtcctagctgtcctggaacttgctccgtagaccaggctggcctcgaactcacaaagattcacctgcctctgcctccccagtgctgggattaaaggcgtgcaccaccactgcccagtttcttctctttatgttttccttaatactctgggtttcgaaatttggactttctctaaagcctccctcctcccctgccacatggctgcttgtcagcatggcttctccccttctcttctccaacctcctcctttggatagctgctgaggtttgccgctggcctaacctggggttttcttttaaaatctagtaaaagtgtccttgagcttccatttctgtctcttcttagattcttttattactgagaccaagaaacacaaaatccgggactggagagatggcacagatgttaagggtccatggtacaatggcagaggacccaacttcagttcccagaacccatctgatgactcacaagcatctgtaactccaattccagaggattcaacgccctcttccggcctctgcaggcaccaggcatgaaagtggtgcacagatgcacatgcaggcaaaacactcagacacataaaataaaatagaaataaattttagccgggcgtggtggctcacgcctttaatcccagcacttgggaggcagaggcaggtggatttctgagttcgaggccagcctggtctacaaagtgagttccaggacagccagggctatacagagaaaccctgtctggaaaaactgaaaaaaaaaaaagcttttaaaaaaatattaaaaagaaccccaaaaagggaccctgatttccccctatatcactctgacctctagtgaagcactgtggcacataaacaaaaataaaatcgggcaaaagacatgacccagaggcaagagcacttgctgctcttccagaagatcttggtttgggtttgattcgcagcatcttcagtgtggctaacaagcacctgtttctccagtcccagagaatccagcgccctcttctgccctccatgggtactgaacacacatagggaacagacatccatgcagccatacattcatacccataaaataaaatctcagaaaaaaaacaaaaacaaaaacaaaaaaaaaacagaaatctcttcctaccaggaaccccataactaccacaagtagcacagacccaggtaagagcaggtctcacccctcatcaaatgtgagggtgcagtaaagagactcagtgaagccccagggctgaaaggggaaactttattccacacaaccaaggctatcgcttgggaaagcagagaatggggtgggagaggcatatatctctagagttataagaggggagcctgtgagctgaggtgactttgggactctgtgagtaggaactgagggaccctagaagctagcacagactgtaatatgctaatagggaccacaagcatatgttaatggaacagtcagaggtcccttttatccaagtaagtcctccctttagcaagcaaggactgtaagaatattggcttttgtctatgtgccagactttgggaaatggaacttcttggcacctgacaagaggaggacattttggaaagccacaacttgtcaaaatgcagagggtaactgctggatggacagccccaacggatatatttatagcataactcctgcacttaaggctcaggatacatcaaggaacagggccagggaggggcttgtaagagcctgatgaccaagctatcttctgtgaaattatgcattcatgctgtgttggggaagctacacccaggaaatctgaacaattacagatgcctaaagactgcacactttcaacaacaactgaagtatatataatgccaggaggtggtatatagtgggcccatgccaaggtatgcccgtgtgtaattatgccatgcaacagatctggtgtaaaagaggtttcctggggaaaggaagaggagtgaggacccggagcaggggtaaagacagacaagtggacaggcagacagaccagggcagagccatgggggagggggcagtgggcgcagagagggacagaaaggagagagggagcgggagccgagggggagggggagnnnnnnnnnnnnnnnnnnnnnnnnnnnnnnnnnnnnnnnnnnnnnnnnnnnnnnnnnnnnnnnnnnnnnnnnnnnnnnnnnnnnnnnnnnnnnnnnnnnnnnnnnnnnnnnnnnnnnncaagagagcagtccatcacctagcagcgctggcctttgctaggtccctgggaggagcctagtggaagccagctagctagggaaagctcatggggcccctcccctagatgaagagctacaatcaattaactattgcagaaggagggagaattagtcttccccggggatgagcctcttttagacctggggaaggaggaggggtggtagggatggaaacaaacaattcctgagtgtctgattaaagcaagctgtatttacaactggccagctggctgtctctcctaaagtcaggatttcagagagcagcccctcactggcttttgaggttccttttatggagaaaggttagggctgatagaaaacagatgtcgcgataattggctgttagaaaggaggcaataaaaataagtgcaagaaaacatcacgtggaaagggagtcatcaaggtatctaggaagacattttcataaggcaaaaggatagtcgtatcacaggttcgggagtttagcaaggcaaaggggtaggcacacatgatggagtcacaagttcagcacaggttggaaagcaaggtttgcaggatgcatcaggcttaagaaacagaaacggattcttgtaggagacttaataacaatgtgtaacaatgtggctctttaacatcaacctggcacctgttctggtttacacctcctattggtgttccagtaccaagtggtcagccccataaacatatactcaaatgcaaccccataaacatatactcaaatgcaacactgaacagactcacaggtggtgtttatctatttattccttatatgtatatgtaacaacaatggtttaaaaagagtcccaggggttggagagatggctcagtggttaagagcactggctgttcttctgaaggtcctgagttcaaatcccagcaaccacatggtggcttacaatcatctgcaataagttctgatgccctcttctaacatggaagtggacgtgcagatagagcactcatttacataaaaagcacacatttaaaaaaaagaagaagaaaagaaaaaagaaactcttccaaaaaaagaggtcctgtgcctggcagtggtggcgcactcctttaatcccagcacttgggaggtagaggcaggtgaatttctgagtttgaggacagcctggtctacagagtgagttccaggacagccagggctacacagagaaaccctgtctggaacccccccccccaaaaaaagaggtcctgtgaatgtgggtgggacatacatgggaggagtaggaggaaatggtgtaattatattttaattaaatcaaaataaataaatactgctcagtgtagtgtgcacgtctttaaccctaacactgaagaggcagaagtaggttggagctctgtgagtttgaggacagctgggtttgcataccaagagtcaggccaaccactcaaaaataggataaaacataaaaatgaaataatttccctaaataggaaaggtcccgtgagctaaggggaaagtctgaaaagcattcggctgtggaacttttacacagcacccacttctttcaggtttgcatgaggtaggcttttcttacaagcatcctgttccttaaatagccagggtcctttctagtcactaaacgtcactgtagagtggtatctcaggtctgtcccagccttgcatacatcttagagccaaagctcaactaacccctagtcctattgcgtggtctcttccccaaaaccatgacagtttcccaggtcccgcctaaactcagacccgcccacctgccacgcggcagggccgcttcttcttcctaccgccaggggcagctcgcacccacagagccttcttacacccggatccccgcactgagtggagagggcagcggtgagttacaaaaacagcccacactcttctccagcccgccctcaccctctttcactgagtactctgaactctttttcgtccctttattccctagtctctcttcccgacaactcgcgatcgatccccctctccgcaccccacccctacacgggcttcctctttccatttcctgggcaagtcccgctactccccagttgcggccccaccccaccccatcgtcgtcatccaccccatccggtccctcctccccaatcccaacgcctctccttgctgtccctctccaaatctccgggttcctcttcctccaccgtccggcctcaccctccctgaggatttagggcccgcgaagaactccctgattcctacctcagcagttcttacttaaggaagctggctcaggagctcacaagagggaggtcggcggtgggtgctgagagaacttgtttacagattcacttgggctcctggcagtcttcttaatttaagaatgttcttggcgcccgcaacccttacttagggtagctacgcagctagcccccgactcccctcaccgcctgtggggattggccaagtttgagggtttactgtgagtgtgcgtgtggaggaaagtccagctagtcactgttaactgtctcctccaggccgtctgggctgaggcagctttccatggacggctctgaagatgacccgaccatattcagtgcccgttgtctgcccagtgaccccaggctctgggccactgtaacgaactcatacctaggtacacgtgtgtatcatgacaccatccatataaacggtgtgtacaatggagctgtcggggacactcaccgggccagtctgcccagccccctcaatgtccagctggaggcccctgcagggacagaacagctgacagagacctttaccctggacaccaacacaggttagctgtcaccaacccgtgccaacctattgctcctcacttgtccatgaagctgggaaaggggccacaaccaccaatgtgtgcctcaggcctgtaaccttggcactggtactgggaaggttgaggcgggaagacggagagttggagctcagcctccagtacacatcaagatgcatcacaaaaatatgtaaacacatagcctttaatttaaggaagaagaagaagaaaaaaaaaaacatgaaaaagccgcctcccaaaatgaggcctgtgtggttgctcttgctttcttttcatctgggtgggcccactacacagtggggagaggcagcctgaggtctgaaggaccccactcccagcccaggaaggtaatggtgctctgtggtactgagagtgtgtctgcctttccccaaccctccctaggttccttcctccacaccctggaaggccccagcttccgggcttcccagcggatctatgctcaccgtgtgttaccccatgtcctggtcttcagtgtgtccattgcacgcttgaccacagggaacaaacccatcacagtgccgttacgggcagacttctcccccgaaagcccagacctggacctgcgtgtggggcctgacttccagggactccggtaagaatcacactgggtaaatctaggtagcccagagagcagagcgagccctttcttaagactcagctatgcccttgcaggtacctgcatggccacgtacttaaccctgagcagcctggagagccacagcaggaagtgcatatgctatggatgcctgtccccccagccttgacccttggggaagaggagaaggacaggacctgggagtttctgactgttgtgggtagcagccaggctgaagcccaggactgctttgctgaggccctacagctgcagaccaggggtgttctgtatacaatccatgcagactcctggggccggctctgggcaggctgtggcctggatgtggctgggcccctggccctgcgccaggcccttcgtggctctctctactacctgttcagtgagcttccccagcctggcactcaaggattcatcagccatgggcttagccccggaggactctccaatgggagtaaggaggaatgctactggggccatatcttctgggatcaggtacatcctaccctgcactggttacacagggggagttgcatgcaaagattccgggcattgcctttgcactacctgagatcaagaccaaacatgggagctctagataggagggcttcctggaagagatggttggtttctcagaagaaaggtgtgtaggaatgtggtagaaaagagtggtccaggttagagcaaacagaaggcgcaaaggctgagggtctgcaacatttgaaagcagagaaggggcctcatagctggctaagaacaccagagcctcagagtgagccaggtgcaagcctggagcttacaaaaggactggaaaaaccatagagactgtagaagaatgatacaaggagagatacagtctgggaagatttgggactgtcaggagcagctgggtgcgggggaagcaagggctggagaaggcagtactgtaggttgtagcctatggagatcagcggccactgcgtgagggaatagcgagagggaaggctcgaggccactcccacgtctgacaccttgtgaagtctgcacagtggcccatttgacagatgaagtcaaagaaagctgaggtcaggcagccggagagcaagctctccctagaggcgtgatgcaaaccagtgctcgtgcccgtgagcttctcctgatactgccccggctgaggaccagacctctgggctgtctaggctggaaagatagcgctggagtgggcaagctggggaggccccaggtgggtgtgagtgggcatgaaatgagggatccagggagagaaaaagggagagccagagggtagggatggaggaagcccccagctgcctgcttggctgtgtgtcgtcagttggaagccttggcagggttgaatgtgggcagtccataagagtaagggagggagaaggtatggactcctgtttaccctcaaatggttcgtcccttaggacatctggatgttcccaaatattttgatgttccacccagaagccgccagggccatcctagaataccgagtccgtacgctgggaggagccctgaagaatggccagaacctgggctaccaggtaatgaatggggcctgggtaccatcccataagccactgccccaaggtctttccagtgccattcagtgcccatgagagccccatacctcctctttcctttcctccacaaaggattgcccctctggtaggactggaccgccccctccccagatcaaggcctgaccaagccatcctctctcctcacagggagccaagtttgcttgggagagtgcaagcactggcctggaggtctgccctgaggacatttatgggacccaggagatccatatcaatggggctgtggccttggcctttcagctgtattactattacactcaggtgaggcactgtcaggtgtgtgcccacgcacctcacgaggccacactccaccccaggaccctaggaagctgtgtgaagagggactttggaagccaggcacagtggccctcttccgtgggttgtgcctggccttttggcctgttctcattctccaggactcgaagctcttccaagaggatggtggctgggatgtggtcagttctgtggctgagttttggtgtagccgtgtagaatggagctcccaggacaagatgtaccacctgaaaggtgaggacctaagagcgtagtgcccagctcaccatgggcttaccatggaacaacatgtcctgagcccctgcactaactgtcatgtggccctgtgtgaccgaccaggagtcatgccccccgatgagtaccattcaggagtcaacaactctgtctacaccaatgtcctggtccagaacaggtcagaaatataacttgcccttcacttacccatagcctccagcatggctgacagggcccagtcagaagccatgcaactgtggtttgtcccctcaccagcctgcacttcgctgctgctttggccaaggacttgggtttgcctatccgaaaacagtggctggaggtggctgataggatcaagataccatttgactctgagcagaacttccaccctgagtttgatggctatgagcgtggtgagtggtactgactcttctaaaggcccttgcttggtcaaaccccccacactcaccctggcacactctcatctctttgatcaataacctatcctactaccccttcccccaaatcaggagaagaggtgaagcaggcagatgttgtgctcctggggtacccagtcccctttcccctgacacctgacatccgaaggaaaaacttggagacttatgaggccgtgacatccccccagggccctgctatgacctgggtgaggagcctgccgggtcgtcttgccccacggtcctcacctgccttcccacatggtgggtctaaccacttcctatctgaattctgatctcagagcatgtttgctgtgggctggatggaactgagggacccctcaagggctcaggtccacctgagcaggagtttcgccaatgtcactgagcccttcaaggtcagcctcgctcctgcccaccacccactgcctcgatcttctcccactgtggtagtctcagcagggtaagggtcctgcttgaccctagggtaatagcctcaggtgacagccacccttgctgcctgcaggtgtggacggagaatgcagacgggtctggtgcagtgaacttcttgactggcatggggggcttcctgcaggcagcactcttcgggtgcacaggattcaggtgagtgtggcgaccggcgaccagccatggattcccacttgtcccaaccctcttcacacagctctccctacaggatcactgaggcaggtgtgacctttgaccccctgtgtccagacctggtctccagagtatctgtctctggtatctcctacctggggaacaagatcaacttcgccttttccaaggactcggtgacacttgaggtcacagcccgtgcagagccctgggcacccctactagaagctgagctgtggccatcgctggctcatcttcccctgacaccaggtagggaaaagcctttgggcgtgtgacccagatgtcttggtccatgtcttcaaggattaaccctctctcttgcaggacagaaggtctcctttccccactcagctggccggatacaaaggtcatccccatagctgcccagaaattcttccgtggttcctgataggagttttggcattagaagtccctttcagttcctctgggacactcttttgccctcaactgcatccccaacctcacaacctcttagtctggatccagccctgaagcagtaaggttacagggtgtcccttctgtcccttctgtcccctccctcctttcctcaccctcgccagtcctgggctctctaggcctcacagatcctttgtttggggctgaccgcagcaccctcccctccttatctccccaccttcctgtctctctaggccttaacttcctgttcacacgtctgttctctgggaaactctggtcagcaggctaggtgggaagtggccagtgactccgctgagaagtgagtcacagtcaggggcttagctacaggagtttcttgtggcaggcagttgacaccaggtagggctagccaagtgctcagaggttttgcggctttgaacttcctagtctttgattcctttctgacgtcagatggtatctagcgtactgggctaaggtgagagctgtccttaaccactcagcccgtgagaaggaaggcagtgttatcacaggacagggtaaatgaagtcagactggcgaccagagggaatggagtcagatggacagggttccaggccatggtcctggccatcagtgctgagcagcagcgtggccttcacttccattcttagtgtttctccagaacaaggttcatagcgtaggaccacgatcctggtaaaccctgtgctcctgtaccaagccaacttggctaattaaagtcagtgctggcaaaggctgaagtcagagtgtgtgatggattcatgtccttctgcaccaggggctgaatgctgatgtgatttcaaagcttaggggcaatgtggggcccttgtgtctctcttcaccttctttatgttgggccaggagctaccctggcagaagtggatgctcatctgttgcctcaaagacaggactgggcatgggcattgacaggttgcttggtggcactgcgctcaatagaggtagcccagcacctgggagtgcgttctacctgtgtgtaggtggtcacttctgtgcgtgtggtatgataagcttctggggtcgtggagggtgacagagccgggcacagctgatcgggtctagcctagcagtctggggcaagggaagatgctgtttccgcctcactgactcgaccacacactgttcttagcgctggggcacaaagcaggcaatccctcatcatagagggtggctggcaaaatatcccatgtttggggacatctactcaggaacacacaagtccctgtagccagcaggagttgaccttctcgtgaactagaccaggggctcatggtcagcacactgtctccatctttatctaagcacactgtccttgtctctgctccataacaggactagtaacccgcactagcttcctccccagccccaaacacacgcaggtcagcaaaaggtcttatctcttaggcttggctcggaacactgtcagtagctcggagctcctcaaggtcggctgttggctacaggcatggaacaggatgcagaactgcctagagtctctaagtcgggtagctaagcagagaccttcgtggaagccaggggcatgtgacacacagagaggagaagtgacttgagaacattcacttagtgccactgcctgtctgcctctgaccatgtgtgagtggaagaaaatgaggggagcaggctgtaaatgtctgtgtgtctctgtggatcatgttgctgtccgctgtgagtccagtatccagtcccgcataggaaatggcccctgtctgccttccgcacagtccaagaagaccactgtggcggatgaggagtcagggcacaccctcacatgttctcggacacagcccatcaaaccacagggcagtgggaatcaaaggcctgcgttcccgaacttcatcctaaaatactcaggctcctccaccccagaagccacaggccgctaagcaaaagcagtagtcggacagccaagctaacagaataagataactggggttggccagatgagttggtgctggggctccctacacaactaccaccaggaaaggaagagcccacacatttctggaatctgccacttttaatcgtgaacagaggctcggcctggtaagtggggaaagggacaaagccaagcactgaggaccctctaggttataagttaagtctgagggatctgagtggggcagcatcaaatacacatcgtggacaagagggccgcctctgaggtcacggctgggcagggatcgaggtgctatagtaggctgtaactcccaggagctggtgttgggcacagctgacctgacatggttgtcctcggttcagggacaggctcggaactcttagttatagtcctcctcatcaaacttggtgctgaagaaagccgcagagtctttggctaacttggacaggtgcaaggcgccagtcaccaccagtcccaggagcagcaatgggggcaccaatgtccacattgcagccaggatgttgtagcacttggctttggagccatactgccttgcagcctccaagttcccagccatcttctggtctcgggcctgcagggcagcaccagaaacaagatgttaacatgttcatggtgtctaggggaccccccctcccccggagcaactgtagagcacaggctaaactctaaatcttgacggaggactctggctcaaggagacatatccctcggctggacctagttccttcacaggcacagtttggcctctggcagggtcctaaccatagtctcagcataaataaaggctgcaggtagagattcagtggccattctgggtcagcagcaccctctgagagcctcctaggggagaggagtcctatgagaaaccaagaactcagtgctattcgggaactacagtgggaattcctctatgggcaacctttaaggactttgccctttgagggagactatatagccagaccttcctttcctgtgaacagtgcatacaccccttaacggtccccaaacttggtgaggtactgtggctatgccaacagacaccctcatatacttttgaacactgccccctccttcccggactccacatcacctccccccacaccacactcattctcccatcccagaagccttgaagccaaccttgacagagtggaccagcgccaggaatccaaggcagcacagattcaggtacatcgtgctgaagacagaccagagcatgtgatctcgtggtgtagggccaggtgttcccatggagagggctgtgtgggctgcagcatcagccttgcgggatgatggagcccgggggtcctcacggggatatgaagtgtccatgggttccagcgccgtgtcttcctagctgagacttgtcctctctgagcaccaagcctgcttatagccccttgctaccctccctggctgaccagctccacccgctatatatatcacaaattacagcctcagcctgccaaatagagtggcccgcccttgcaccccagcgtcccccgcccctctcaaaagaccccatcaaaggcccctgcgccacatgggcagtggctgtagaccacccaccagagtcccgctgctctctctacttcacaaaaggctgtcccaagaacactggctgcaaacagttccatggcagacactagggctgagaaaacatggggctgcatcagtttcaggcaacaaccagagctctcaggtgtggctgtccagcagccatgggtgaactgggtgacctgagaggggggctggagatgaaaaggaatggggtgagagagaaggatgaagccaagacaaagtttctgatcaaggctccaagtttaattttcatcactgtgtttacagagggaaagcccacagaccccatgctttgtttcagctggattatgttgcagagctagctcagtgggcagtccactcctgtaggaaattgcaaatggagcgaggccacggctaggctgtaaaaccattgtgggtcggtttagcctactcaaggctgggggaagggcacactcaggatcagagctgcatatccctgccagaactcagactccaggctttgaccatgacccctgcagacatgcataaatgggacctcagattcgtacctgctagagataaaggctaagaagaagacagcaggcaaagaggaataatgaaggagactgcctccttcccactgcacactgtaggaggctcctccccactccctgtaaccagcactctcctgctcctgggcaggtagatcctcttcagtctccttagctgttaggcctgcccttcccagtcctaaaaatgtgagtggaatcatttccttgagggctcagatacttgcatgtgccaagaactcaatgcatgtccggcaggaagtctaactccaggctcgcatgccaagagcctcctccgtaaaggggacctcagtgtcttcccagctcaaatcctgagcaagagctaaatccttcacaccaccactgcccagcctccctcagctgctcctgctcacgcccactcggatcaataaacaagcgagcagtgcagggccctcgggatggtacgtgaacatggagggaagacccctgacctgatgtaaggaggctgcagtgggcagggaggatgaaagggacctagtcagagcatctgactcccagatgactttctccaaggtcccttgtcatttgatctcctccagtctggggacatatgggtaatatttggagcctaggcctatacctgccacgctaagtgcccatacatcagtgccttggtcttcatcatctgtgtaggtgctgtttctgccccttctgttaatctcagagacctctttttaaaaatatttttatatatatgtagggaggggcgtgtatgtacctatgagtgcagatgcccacagaggtagtgttgaatttctagagcagcagttacaggggagccaccggaagtggatactagaaatcagcccgggtcctcttacagagtagcatatgctcataactgctgagccatctgctcagccctccttacagaggacaggtctgccctctgtcctgccctggcttcctcgtgaggtgagctagagaaggcacaagaacaagagcaatctgccatggtggggctgacacaaactcagacctggcttctcccaggacatgtgactactcagacgaaaacatgaccatcccagactaagcagatgagctccgcctagcctttgcttcattataatcatatcttcatagcctcagaattataaaatctctcgctcccattatgcctgaggacaaaggagggatgggactgtactggagaaaaaaaaaaaaaaaaaccctgacatctcagggatttccctcctattaccccaccttaactcatgactaatcaattcattccccccccccaataaaagcttagccataggccaagaacggtggcgcacacctttaatcccagtacccagaggcagagcatgtggatctctgtgggttcgtagccagtgtggtccacatagttctagaccagacccctgccttaaaagagagggagagggagagaggaaatgaggggggagggggagggagggaacgaggaggagagagagtatgaattttcaaaaacccagcagttgaaactatccagaagcctcctcccagcctttgattacatccctctatccaaagtgtaacttcttcccagtgctcctctggttcctgacggtgccaagaacctagaacactgaggtctcggccatgtgtctgagagctcccagtcttcactcaccagcagcagatgctccacagacgcaacaccccctgacacctagacccttactgcatcacagatattacacttacacgcctgtccagtgagactttgtaaaacacatctggttctaagtgtggcgtatcaacctctactgttacctccaccaccgtcctgttgctatctgactgaggggagaaggacccattttctggcctcctgcttagggcagatggaaccacagtgagagtccgggagcactgaggtctactttaagaatacactgtgtctaaattttctaggctctagagcaccccgtctgtctgacttttggggaatgagaacagggctggccctgagagatggatgggccttggcaccttcagaagcagttgatgacaccctggtccttgtctatcctatggcccaccacttcctgtcccctgagcattccactcttctatggggctggttgtatagacgtccagtagcaggttggcagggcagcatcctcagctctaggtccactgcagaagccaaatatcaagacccgtgacgtggtgacagataggacagaccccgaagtctcagggctgaatccctgaacttgagtatctgctccctcgtggtggaggaactgccctgggcccaagaaagttcctaggcctctgggcacccagggtatcagcaggcgagttctcttcccaagaggttcccgcggcttcaggaaggtcttgaggtcaagttctgtttaattccttcctgtggactgtaaccctccgtcgaaatgcacagcctgtcctaagtctccctgctgatccaccacccagttcccctggtcccttcctgccatgcgtgcatccacgagaatgaaaagcatccctcctcctggaaactctcaccaactcggagggagtcaagaatcccaacataattaacattttctgaaacctgccattttcgagagatctcaccagagactctctgcaaagcccaagcagttcctggttttccctcatcagtgtggtctccatccaaagccctgcagtcgctctatagcctcggctatggaacgaggagagagaagagtttcttagcaccctgttaagcaatgacattctaaaaagcttccccaaatcctacatagagtcacccctaaaacacttagcagtgacccctcacaagcccacactcctactcctgggtgtgctttatattttaccatgggcactgtttcgaataagctccaacttctgcctgctattttgggaaattctctttatgtcaaaagcacgttgagatttctaaaagattaaaggaactccccaaactggcatgacgtagaaataagctgacccccttcccggcagctgctcttacttcctcttaaaaaccatacttctaataaaaaaacaaacaaacaccacaggccttccccttgctgaagtcgcacagggccttcacctgcacctctatggtagggatcactgtgccacgcccaggattttagataaattcaaatcatcatggtggttagggaagcaaggacccaaatcctgcagacactggaagcccaatctgactttttggtgccagccttgggtaagcagaagtatcctttagaaggaactccagggatgcaaggcatgttagcggggtgccaaggcacacacagcctcccccctaggagaggtggaacctaggagctgtgaggccagcagaactgtcatgtggtcctcctacaagaaaccttctagagtccccacccactccaggtccctacataagcctgagtgtggggaaggaaacagtgagggcagcaaacttcacagcacccaacttttgtgtgcgggccagctcaggagcttgaagtcatatccaagaggccaccacaaaaagaggacacatcttggctagggatttcttttcccctaaagtaaaggactccgggtgtctttcactcctaggccggagcctcctttgcccaaagttctgcacccttcctgggacccccgggagcacggcctcagcgttagatgatcctcggatcccctctgcctggatcaggcaaaaacccacaggtcggctgctgcccatatctggagaccagaagcctgacaagttaacgacacttgctctcctcagacaaaaaggatgcaaggtgagctcggtacagaaccagagaacagtgagtcacagccagagttgccaccccgtgcactttattgaatccactgtggacagataggtgaaggtaacatttgcatacgcgtagggtaaagggtcgaggcttgagcctgggggcggggcaggggcggggcagatgtggaccgtggagcacagggcagctagaatccagaatggggtgttctttgtgcaaaagactgaaagactaccacagaggtggtagagaaaataatgatgcagataatgaccataaggatgctgaagatcagggagctgatattcaggcacttggcagtggaggcgtaggcctgggctccaaccacatcgcccaccatcttcctgtccctagactgaaggaaattagatgtaaggagccctggagctggccagctgagagccaggtgctctggctccatttccccaactgctccctgcccactgtctcactccctccagccgggaaaccctcccctcttttcacacacacacaaacacaaactatacagtaagctccagcattcgctgcatacctcactttccacacagattagggccccagtctaaagggtgaaggggtggggaaagtctggccccagaatccccaggcagtttcatcctgtgactatcagaaagtctccaacaccagagacagacagtgcgcgcgcgcgcgcgcgcgcacgcacgcacgcacacacacacacacacacacaaataggaagggtgcacacacactttcttacagaaaggaccccacactcacacctcggtgctatctgagtagatggcgcttcaggctcacacacaccttcttacaccattccctcccaccccctctagcacactcaccttcacagagtaggcataggcaacgaagcccaggcagcaggcgttgaagaagagtgtattgaacagggaccagaccacatggtcaggcaccgacacctctctgggcatgttgatcacggtggtcctcacaacagctgagttgctgggttcccccagctcagtcaccccgtactcctctttgattgtctcatagcttggaggaagcccggcattggtggacaagaaggcttgagaattgtggctcatggtactgactctggaacaatcgccccgtctggaggatggctgctgctatcctggttctgtagacccgccctttctctagcaatttccttttcctgttggtgggttagtctccagagggccttactgtggggaattggctggatactgaagtgggcggtacttaggccttgagtatcaaattacttcaggactagttgactgttgaggtacctctgtataaacttccagggatctagacttgtcccagggctaaaacttgtctgaaggtctccacctcctgcttacagtaggcatactagaacttctccccagatctagtctccccagccccctgctctcacacccctggtacatccctaaacctggcctcacagtgagggcctcctctaaaaaaccccaagcacacacacccctaaactaatctgttgcaggtgggggctggggagatctgcaactcaatgtttctttggctgtcagttggggaaggaggagccttccagcacagggcctggatgctcctggctagctagggaaggaaaattccagtcacttggctgcagccggggagcttatggaaggcagatgttttcctaccagttgcgaaacagccattgctaaaatgaagcctgtaggagtacggctacacagggaactccgagtctttcccggcagaagcagtgagggaactgagcgtcctagaaacaagggaagttccctggtggtgaaggacacaaatcgtttgacacttgaacccattcagtaacctcacacccccacccccagcacccaaatttcatcccacagggcagaatggagcaaggaggagatcagtgagtctaactacagagcccttgttcgcctctacttgtacaaccatcaccatcgatcagagcctcaaaagctggagcaggtcacatgtctgtaatcccagcacttgggaaaggtcagcaggagaatcagttcaaggtccagcctgggctacatgacagcttgtcttaaataaatgaataaaaagtagtaagtaaaaattttaaaaaaatgaacgaaaggggaactcaacatttcttctagaagaggcacaatgggtaacaggctccacattcttgctcattagcaaaatgcagatcaaagccccagcagcacactgctcatacccattaggaagcactgtagtttagaagcaaagaaaccacaccactgatgctgcaggctttgcaggcagtgggcagatcgaagctacaacccagaatcccacttctcgtgtgtaagagaatgaacacatgtctatacgtatcctgtatgcctgtatctcatgtctacagcagcattcgtaacgacaggcaacagacagaggttagatgtctatcaactggcaaatgaaaaaggaaagctctgatatatgctaaacctgaataagccttatgaacagctctcaggtcagaagtaggtgagcagcctccaggggctaaagggaaagagggtggggtaaggtgtctttgttattgtttggtttggtggtggtgtgggggttgttcttggtttttgtgtgtgtgtgtgtgtgtgtgtgtgtgtgtgtgtgtgtgtgtgtgtgtgtgtgtgtgtgagagagatgaaaatcattttaggggaaaagtcagaggtggtaaggtgtggctctttttcctagtgagccctgtgcatgtcctctctgtctcatctctgagtgaatctcacttttgaatgaaagtgccccataggctc

SEQ ID NO: 728 - DNA, 2931 bp, Mus musculus
gcactgagtggagagggcagcggccgtctgggctgaggcagctttccatggacggctctgaagatgacccgaccatattcagtgcccgttgtctgcccagtgaccccaggctctgggccactgtaacgaactcatacctaggtacacgtgtgtatcatgacaccatccatataaacggtgtgtacaatggagctgtcggggacactcaccgggccagtctgcccagccccctcaatgtccagctggaggcccctgcagggacagaacagctgacagagacctttaccctggacaccaacacaggttccttcctccacaccctggaaggccccagcttccgggcttcccagcggatctatgctcaccgtgtgttaccccatgtcctggtcttcagtgtgtccattgcacgcttgaccacagggaacaaacccatcacagtgccgttacgggcagacttctcccccgaaagcccagacctggacctgcgtgtggggcctgacttccagggactccggtacctgcatggccacgtacttaaccctgagcagcctggagagccacagcaggaagtgcatatgctatggatgcctgtccccccagccttgacccttggggaagaggagaaggacaggacctgggagtttctgactgttgtgggtagcagccaggctgaagcccaggactgctttgctgaggccctacagctgcagaccaggggtgttctgtatacaatccatgcagactcctggggccggctctgggcaggctgtggcctggatgtggctgggcccctggccctgcgccaggcccttcgtggctctctctactacctgttcagtgagcttccccagcctggcactcaaggattcatcagccatgggcttagccccggaggactctccaatgggagtaaggaggaatgctactggggccatatcttctgggatcaggacatctggatgttcccaaatattttgatgttccacccagaagccgccagggccatcctagaataccgagtccgtacgctgggaggagccctgaagaatggccagaacctgggctaccagggagccaagtttgcttgggagagtgcaagcactggcctggaggtctgccctgaggacatttatgggacccaggagatccatatcaatggggctgtggccttggcctttcagctgtattactattacactcaggactcgaagctcttccaagaggatggtggctgggatgtggtcagttctgtggctgagttttggtgtagccgtgtagaatggagctcccaggacaagatgtaccacctgaaaggagtcatgccccccgatgagtaccattcaggagtcaacaactctgtctacaccaatgtcctggtccagaacagcctgcacttcgctgctgctttggccaaggacttgggtttgcctatccgaaaacagtggctggaggtggctgataggatcaagataccatttgactctgagcagaacttccaccctgagtttgatggctatgagcgtggagaagaggtgaagcaggcagatgttgtgctcctggggtacccagtcccctttcccctgacacctgacatccgaaggaaaaacttggagacttatgaggccgtgacatccccccagggccctgctatgacctggagcatgtttgctgtgggctggatggaactgagggacccctcaagggctcaggtccacctgagcaggagtttcgccaatgtcactgagcccttcaaggtgtggacggagaatgcagacgggtctggtgcagtgaacttcttgactggcatggggggcttcctgcaggcagcactcttcgggtgcacaggattcaggatcactgaggcaggtgtgacctttgaccccctgtgtccagacctggtctccagagtatctgtctctggtatctcctacctggggaacaagatcaacttcgccttttccaaggactcggtgacacttgaggtcacagcccgtgcagagccctgggcacccctactagaagctgagctgtggccatcgctggctcatcttcccctgacaccaggacagaaggtctcctttccccactcagctggccggatacaaaggtcatccccatagctgcccagaaattcttccgtggttcctgataggagttttggcattagaagtccctttcagttcctctgggacactcttttgccctcaactgcatccccaacctcacaacctcttagtctggatccagccctgaagcagtaaggttacagggtgtcccttctgtcccttctgtcccctccctcctttcctcaccctcgccagtcctgggctctctaggcctcacagatcctttgtttggggctgaccgcagcaccctcccctccttatctccccaccttcctgtctctctaggccttaacttcctgttcacacgtctgttctctgggaaactctggtcagcaggctaggtgggaagtggccagtgactccgctgagaagtgagtcacagtcaggggcttagctacaggagtttcttgtggcaggcagttgacaccaggtagggctagccaagtgctcagaggttttgcggctttgaacttcctagtctttgattcctttctgacgtcagatggtatctagcgtactgggctaaggtgagagctgtccttaaccactcagcccgtgagaaggaaggcagtgttatcacaggacagggtaaatgaagtcagactggcgaccagagggaatggagtcagatggacagggttccaggccatggtcctggccatcagtgctgagcagcagcgtggccttcacttccattcttagtgtttctccagaacaaggttcatagcgtaggaccacgatcctggtaaaccctgtgctcctgtaccaagccaacttggctaattaaagtcagtgctggcaaagg

SEQ ID NO: 729 - protein, 697 aa, Mus musculus
TEWRGQRPSGLRQLSMDGSEDDPTIFSARCLPSDPRLWATVTNSYLGTRVYHDTIHINGVYNGAVGDTASLPSPLNVQLEAPAGTEQLTETFTLDTNTGSFLHTLEGPSFRASQRIYAHRVLPHVLVFSVSIARLTTGNKPITVPLRADFSPESPDLDLRVGPDFQGLRYLHGHVLNPEQPGEPQQEVHMLWMPVPPALTLGEEEKDRTWEFLTVVGSSQAEAQDCFAEALQLQTRGVLYTIHADSWGRLWAGCGLDVAGPLALRQALRGSLYYLFSELPQPGTQGFISHGLSPGGLSNGSKEECYWGHIFWDQDIWMFPNILMFHPEAARAIYRVRTLGGALKNGQNLGYQGAKFAWESASTGLEVCPEDIYGTQEIHINGAVAFQLYYYYTQDSKLFQEDGGWDVVSSVAEFWCSRVEWSSQDKMYHLKGVMPPDEYHSGVNNSVYTNVLVQNSLHFAAAKDLGLPIRKQWLEVADRIKIPFDSEQNFHPEFDGYERGEEVKQADVVLLGYPVPFPLTPDIRRKNLETYEAVTSPQGPAMTWSMFAVGWMELRDPSRAQVHLSRSFANVTEPFKVWTENADGSGAVNFLTGMGGFLQAALFGCTGFRITEAGVTFDPLCPDLVSRVSVSGISYLGNKINFAFSKDSVTLEVTARAEPWAPLLEAELWPSLAHLPLTPGQKVSFPHSAGRIQRSSP

SEQ ID NO: 730 - DNA, 25428 bp, Homo sapiens
cctgcggcgagctgctggagaggccgggcacgcgcagcctggctgacctgatcctggaccagtgccccgaccgcggcgcgccggtgccgcagatgctggcccagccgcagcggctgctcttcatcctggacggcgcggacgagctgccggcgctggggggccccgaggccgcgccctgcacagaccccttcgaggcggcgagcggcgcgcgggtgctaggcgggctgctgagcaaggcgctgctgcccacggccctcctgctggtgaccacgcgcgccgccgcccccgggaggctgcagggccgcctgtgttccccgcagtgcgccgaggtgcgcggcttctccgacaaggacaagaagaagtatttctacaagttcttccgggatgagaggagggccgagcgcgcctaccgcttcgtgaaggagaacgagacgctgttcgcgctgtgcttcgtgcccttcgtgtgctggatcgtgtgcaccgtgctgcgccagcagctggagctcggtcgggacctgtcgcgcacgtccaagaccaccacgtcagtgtacctgcttttcatcaccagcgttctgagctcggctccggtagccgacgggccccggttgcagggcgacctgcgcaatctgtgccgcctggcccgcgagggcgtcctcggacgcagggcgcagtttgccgagaaggaactggagcaactggagcttcgtggctccaaagtgcagacgctgtttctcagcaaaaaggagctgccgggcgtgctggagacagaggtcacctaccagttcatcgaccagagcttccaggagttcctcgcggcactgtcctacctgctggaggacggcggggtgcccaggaccgcggctggcggcgttgggacactcctgcgtggggacgcccagccgcacagccacttggtgctcaccacgcgcttcctcttcggactgctgagcgcggagcggatgcgcgacatcgagcgccacttcggctgcatggtttcagagcgtgtgaagcaggaggccctgcggtgggtgcagggacagggacagggctgccccggagtggcaccagaggtgaccgagggggccaaagggctcgaggacaccgaagagccagaggaggaggaggagggagaggagcccaactacccactggagttgctgtactgcctgtacgagacgcaggaggacgcgtttgtgcgccaagccctgtgccggttcccggagctggcgctgcagcgagtgcgcttctgccgcatggacgtggctgttctgagctactgcgtgaggtgctgccctgctggacaggcactgcggctgatcagctgcagattggttgctgcgcaggagaagaagaagaagagcctggggaagcggctccaggccagcctgggtggcggcaggtgcgtctccagggcagagatactctcttgtgtgtgaggtgtgtgtgccggtgcaaacctgtgcacctcagtgtccatctggcatggggcgcacctccagaccagaccctggctccccagatggggaggctttgaccacctccttgcaaggcaaccactgaattcctatcttcttccccagggtgtcctcaccatgcccaccgtcagccacccacaacctatgaaaacttcctagtatggccctacagctctggcccagcccttcttcccattttactttctgacaataagctctggaacacacgatgccctctgtccagagcctctgcacttgcccttccctccacctagaatattctgtttgctgcctgtcctgcaagtctgccctggctcccccagctggctggggacccaactggctccagaagtaccctttcgaccaccctgctgtgacatctgccccacacctccaccagaccctcggctcctccagggcaaggcttttgccagagttcctttgaatatagctccaattcagcccctgcccaggggcttggcatctgttgagaggatgaatgtcacggtgttggcaggggctgggcctggggacccaaagacccatgtaggggatgtgggtgataccgtcccactgacctcactcagacaccccagtgggatgatgcctgggccacagatgagtggttttgctctgggtttggttgggggagtgtgaagggggtggctcagcaaggaggtgaggaggaggggcagctctgagaccccaggactacagatagacaggagtcctttccggcaggcactgtgaggagcagggtgggcttcaccttcctctctgtcccagcagttctcaaggcaccacaaaacaactgccagcctcccttcttcatccactctttcaggcaatgactgacccactgtgccatctgagcagcctcacgtgagtggccacacccccagctcttcccacggagcgggctgagagcaggatgccctgggcagagacggaagtatgacctaggaaagaaggctgaggggtcagaccagagcctgaggcctgtgggtgctggagatggcaggctctgcccacacagagcagagggaggaggggatgagggtctggggcttcattaccaggttaggtactggtaggaaaaggttggtcctggtgagtggaaagcagctaagcacactgagggagggattaaagaagacaagagtgtattttccttctgaagggaggctgccgttggaaactgctgggttctcagaagcagtggaggaaggtgttcaagcgcaggctccaaggtcaggctgtctgcaaatgctagccggcttctgcgtgcccagtagcaagtccatctgtccgagcttccatttcctcccctgtgaaatggagccagtagatccagagagttggggtgagatttaatgtggctacacatgtacagttctttttttttttttttttttttgagacggagcctcgctctgtcgcccaggctggagtgcagtggtgtgatctcagctcactgcaagctccgcctcccgggttcacgccattctcctgcctcagcctaccgagtagctgggactacaggtgcccgccactacgcccggctaattgtttgtatttttagtagagacagggtttcaccgggttagccaggatagtctcgatctcctgacctcgtgatccacccgcctctgcctcccaaagtgctgggatcacaggcatgagccaccgcgcccggccacatgtacagttcttacatggcaataacttgccagtcactcttagctaccaccaagtgagcagaaaggaagaggaaatctaggaactagtactgatggtgaaacaggtccatcctacgttgatggcaactcggcaaattagcttgatatgggggtgggggatttggcaatctggagataaacataagaaccaaaaaggtgatcacatttggcccagcaattctgctggtaaagtaagatgttcagcacaccattatttataatggaaaaaaaaaaaaggagaaacaacacaactacccaaccattagggaatagctgactaaataaactgagttggccacctcatcttggtggacgattgtgcggcaaacatgttgaaacacgtctcagctctccgaagagctcgtagagagtgtcgcagggagaagtgaacacagctccccgggggtgcatggtgacaaagggcagggcaggctctgcggggtccagggaaggatgtggcaccaacacatctctcagctgaaccctgggccaccgggcagcgggcattttgtgcagttggaggtggtgtggtggctgaggcgcctgcaggtaaatctctgtgcttcttgaccacaggctgtcccactgcaaactccctgacgcggtctgccgagacctttctgaggccctgagggcagcccccgcactgacggagctgggcctcctccacaacaggctcagtgaggcgggactgcgtatgctgagtgagggcctagcctggccgcagtgcagggtgcagacggtcaggtgaggcctggcctgggagggaccgtgggatgcccccgccaccccagcagctcctgaggtcggccctcccacagggtacagctgcctgacccccagcgagggctccagtacctggtgggtatgcttcggcagagccctgccctgaccaccctggatctcagcggctgccaactgcccgcccccatggtgacctacctgtgtgcagtcctgcagcaccagggatgcggcctgcagaccctcaggtggaggcaggggtgggaagggtgctggggacacagcctgtcaacccggggagggggagggtgcctgggggctccccctggaccctgaagaggggcccctcccagagacctcccatgtgactgagctcaaacactgacctgggagcccagccctgacagccctgccctctgaagccctggccacagctcggggccttgaccactttgtctgaccaaatgttcatctgttgtctggtgcccatggcagcaccctgggccagtggccccgatacccttttgccacccccaaggtccggcctctgccccctcccccagcctctgacaaacctctcaactgacaccacctgtccctgagtgtctgtggcacagccaagctgacagcccagtcactgcccgcagcccggccgcccccacggcactgcccgtcactgcccgcggcccggctgcccccacggcactgcccccaagccctggctgctttcccccaccgctgaccccgcttctgctctgcgtgtggctgcagtctggcctctgtggagctgagcgagcagtcactacaggagcttcaggctgtgaagagagcaaagccggatctggtcatcacacacccagcgctggacggccacccacaacctcccaaggaactcatctcgaccttctgaggctctggtggccagagcagggtggaagaccctagtcaaagtccctgtggagagaacggcccattccaagggcaggaggatattgctctcggcctttgggaaacttttgagccgagaggccgcagacaggcatgtgggaggcccagacacggcaccctgccccgtccaggacaggcccaggacctgcccctctctccacacctggggtaccccttctcccccagccccaccactactccacccaccttcctctcctgagaccctccagccattccccttgaaaacaccccccgaccccaagccacaataatgacagcgagagctccaattaactaagcacctacctgggggcagaataacccttcactgcctgatccccatctgcagtgtggcccaacagcccccagaactatgcccacatagactggaggtaggcagttcaccgtccctccctgttaggaatgagaccatccctgaggctatggcccaggcccacaggcgtccagtgtctgagatctttgggaagggagactagggcaggtggagacagcgcagaacccccgtgctgggtgggaagcatgaccacatggtgggtgagcagcccccatgcactgacggtaaattcccctgtggactcatttctgttggtttctattacacctggccaggcgtggtacaatacaggtcggtgctcacaatctttccagcattccactttcacagggcaggatggtggcccccggttccccagtgaggaaagtgagtctcagggggcagcctgactgcagaaagtgctgcgacaggggccctgatggacaggacccgcggcggacagtcctcgaatcctggagttttctctgctcaaccctgctgggctgctgagactccagtctgagtggggaggtggggggagactctggattcagccccatcactgcccaggggaaatcccctactataatccactttctaactccatttcttcatttcacaaaacacaaaaacccctgtcctcctagagctgacattctaggtaagaagacaaacacctatatgatacacagtgtaatacaataaatatatatatgatacatacacaacacatatgtgatacacaacgcaatagcacaagtacgtatattatatgtatacgtgtgccaggtgtggtggcgcatgcctgtggtcccagatactcaggaggctgaggcaagagttcgaggcttgagcttaggagttcgaggatgcagtgagctattaggttggttggaaagtaagcaaaaaccgcaattacttttgcaccaacctaatatgattttgccaccacactctggcctgggccacagagagagaccccatcgctaataagtaataaataaatgtgtatctgatacataactacacaccacaatcaataggcctgtgatgtggccgggcgcggtggctcaagcctgtaatcccagcactttgggaggccgaggcgggtggatcacgaggtcaggagttcgagatcatcctggctcacacggtgaaaccccgtctctactaaaaatacaaaaaaattagccgggcgtggtggcgggcgctgtagtcccagctactctggaggctgaggcaggagaatggcacgaacccgggaggtggagcttgcagtgagccaagatcgcgccactgcactccagcctgggcgacagagcgagagtctttctaaaaaaaaaaaaaaaaaaaaaaaaaaaaggcctatgatgcatcaacaagtaacaatgtaataaagattcagaggcggggcggataaatgctgcggaggaaagttaggcagaaccaggggctggtgggaatggatggagcgcagggtttcctgttgcatgaaacgggggtctgaggaagtctaactgacgactgggcatttgaaaacccgaaggagtgagggggcaagccccaaagaggtcttgagaaaaagggcttcaggcaattatgctgccagagcaagccaggcggggagcttggaaagctccagaagcagcaaggaagccaggtagcgacagcggagtaggggagggggaggagatgaggtcagggaacccaggcaggtgcaggaaggggtttgtgggtggagcttgcgtgcttggaaagctccagaagcagcaaggaagccaggtagccgcagcggagtaggggatggggaggagatgaggtcagggaacccaggcaggtgcaggagggggtttgcgggtggagcttgcgtgcttggaaagttccagaagcagcaaggaagccaggtagccgcagcggagtaggggagggggaggagatgaggtcagggaacccaggcagttgcaggagggggtttgcgccgggtggagcttgcgtgaggagcgcttttggatcgtcctccgtgagttgggcgccatggctaccttctgggcagagtgcagggcctgccttaaatgttgtggggggtctgttctcaacaaaggcataagttgggagcgactgagccactccaggaggaggtgtgggcccacggcgtgttggaggtggagccacaggacctgtccataggttggatgccgtgtgggtgacagagagaaaccggggctcacggcctgggcagcgggacgggcggagtcgtcctcacctgtgctggggaccctgtgggagcagcaggcttccgagcacgtgctggaccccggcgtctccggctgcaccgagtggtcaggacattgaggccgggtcagggagcgtgagataccgggacgagcgggcccagggctgagcccagcggcgtccgggtgggcggtggcgttgagatgggaattgggaattgcaccggtggtctcaggaggatggaaaacccaagcagcagctgcaccaggaccgaggcaaagggaccgcagtttaacagaaaacccaaaacgagagcgagaaaacggccaaacacccgtgcgagtgagacgtccatgagccttcccggcaaaacgcccaataagggagaaggggcaggcgcggcgggggccggggttccctgaagtccccttcgtttccagaatccctaaagatcattccgccccccagggaggaaacccaagctccgccgagcgcggcgggtctgtgccttcgcttcgcttccagcctctcgcttccttctgacccgaccccgagttctttctccggacggtgtcgagaacccgggcgccggctggggctggagtctcgctggcctcggagcgcccccgagccctcgggcgacagcgaggcgaggacccaggtggaggcggccgggggcgcgggcggagggaggaggcgcgggagggaacccccggcccgcgggccccacccacagccgccccgggacgcagctcggggtccaggctcgagctttgctcactcagggcgcttcgtgcagggaacgccaggcccccggacgcgacccacgcggccgctgccagcggggaccgaggggagccggggccgcggccgcgagtccacgtcccgcccccgggcccggcccagcgaccgcccccgccgcccagggaccgcccccgcctcccagcgaccgcccgggccctcggggcggggaccgcggaccttcctggtggcgcggcagccgggcggctcctccttcctcccggccctggcgtggagcagagggacacaggttcccacgctggcgcccggcgaccgggtggggctgcggtgagtcccataggcccccgccccgcagctcccggccgccccggcccgtccccccagcccccggtcgccccatcctccctcccccacccgcgcctgccccagccgcctacacccccgagacccccacccgcccggcgccccggcagccccggactccctcccccatcccgcccagcgctccccccaccctccacacacgcccgcccccacgtgccaccaacagacgcaggtcccgaccacagagggtgggggcaagaccggggttgtggggggtgcgtttggaaagcagggttaggactggaattctaaggtagcaggagggagagacacactcaggggctcagctgggttcctggagatcaacctttggggtctgagcccctctgagagtcgagctcctttcctgcgaggccccgtctaggaggggcctcaggaaaatcggggctgcccagctggttccgcaactccccccagttctgagggaggcttcaggggattacagacggtctcaagagggaggcccagccagtcccgcggcccctgacaccccatcaggccgctcaggcccagcagctccatggaggacgccggcgaggaccccaccacgtttgctgcccactctctgcccagtgacccccgtctcttggccactgtgaccaacgcatacctgggcacacgagtgtttcacgacacgctgcacgtgagcggcgtgtacaatggggctggcggggacacgcaccgggccatgctgcccagccccctcaacgtccggctggaggcccctgcagggatgggggagcagctgaccgagaccttcgccctggacaccaacacaggtagcgccacctggcctgcctcacccctgccccaggcattgttccaggtcggtggggcaaccacagcatcgaatcccaccagcacctcctgagtttacacaggaagtctcactaagacaggaggccccagaggcccgcagggtccccccttccctccacctggaggcctcctgtgcagctgtagcgggaacgagcagccgagggcccagagggatccgcctcattgtggggagaggcagcggtcgggtggtccactcctgccccagagaggccatagcttggcaacccacctgccttcgcttctgcctccccaggctcctttcttcacaccctggagggcccccgcttccgggcctcccagtgcatctatgcgcatcgcacgctgccccacgtgctggctttccgagtgtccatcgcccgcctggccccggggagcgggcccatcacgctgctcctgcggtcagccttctccccagaaagcccagacctggacctgcatcagggtcctgacttccagggagcccggtaaggagggggctggatttgcagccagggagtccagggagggagctcatccctgaggcatggccacgctctcacaggtacctgtatggccacaccctcacccctgagcagcccggggggccacagcaagaggtacacatgctgtggacaccagcacccccagacctgacccttggggaaggtgaggaggctaggacgtgggacttcctgacagcagtgggcggcagccaggctgaggctcaggcctgcctcactgaggccctgcagctgcaggccaggggagctctgtatacggctcacgcacaggcctgggcccagctctgggtagaatgtggcttggacgtggtggggcccctgcagctgcgccaggccctgcgtggctccctctactacctgctcagtgccctgccccagcccaaggccccaggatacatctgccatggcctcagtcctgggggcctctccaatgggagccgtgaggaatgctactggggccacgtcttctgggaccaggtgagcactgtacacccagcaccagccacacagcaggcgacacatggaggtccacggtctctgccctccctgggaccagggctatggttggggaagcacagggactgtggcaaaagggaagaggcctggaaggtgtgcaggagtttggtagaggagtgatctaggtgaggggaatggaaggtgcagagaccagagctgagagggcctgaggcactttccagagcgtggggaggggcctccaccaaggcgagaagggctgcaggtccagatcaccagcgtttgtagacagtagtgtggcgcttggagtttacctgagggccagtggagctccagggacctatcaggacggggacctgtggggactgggaaggcctgtggggctgcgtggagcccggtactggaggccgacgggggtgacggggacgctgagggcacagagcggaggggcatgatggctgctgggcgtggaggtgtcgagagtgactgtgctggggctgctccatcgttgtctgagcctcccggtgctgccgctgtggccgtttctttgatgaggctctcagaggccgagtcattcactgccggcctgaagctgcccatggcgcatattcgggctggagcctctgaggccacacaaacgccggctggggaggcgaagtgtggggctgagcaccagaactccaggagcgtctgggctggagacagaactgggtgggcaggtggggagggcctgcagatctgagtgggcagccgaggaggaacccagaagacgccagcgatggagctctgccggggcggaatgtggccaggaggggcgggagcagtgacggcctgtccggcgctagaacgagggaccgtgctctcaggacctctggatgttcccgagtatcctgatgttccacccagaagccgccagggccatcctggagtaccgcatccgcacgctggacggggccctggagaacgcccagaacctgggctaccaggtgaggggacctggggcactggcccgtagggccctgcagggcctgcagcccccacacccctcccaggcctgtatccctctccccaggccccctctggacaaagctgggacatcctagattccccaccctgaggcttgtggggcctcagcagtgccctgcagcccgcacctgagagagaggaggtgggaaccgcagcgggctgggaccctgctttggcccaggaccccctggggtgcccttgctgccctgcaccagggtcagcactcggtgagaactgggcagaagccacctggccccgtgaggacgtgcagtgggccttctagcagtagcacccgccagggtacctggcgcaggccgagccccccctcctccagggcgagggcacgggaaagttggggggccaccgctcccctccaacaaggtcaagtctgccccctcccaacccctcagggagccaagtttgcctgggagagtgcagactccggcctagaggtttgccctgaggacatttacggagtccaggaggtccacgtcaacggggccgtggtgttggccttcgagctgtactaccataccacccaggtgaggtgctgcgtgcccaccattcctgcaagtgtggccaggcagctggtgtagcccccactcctcgtggcttcctgtttggggctggtcctgggaagctggctgaggacaggtgtctcagtgccaggccttgcttctgggcacagacaggccactaggaatgagagtgactggggccctggcctctgtgcctcctcctgctccccaggacctgcagctatttcgagaggctggtggctgggacgtggtcagggctgtggccgagttttggtgcagtcgtgttgagtggagccccagggaggaaaagtaccacctgaggggtgagggccatggtggggaggggctcggggaggaagggtggatgctcccagactcagcagatgattttcagacacctcacgtgtgccagccccacgctgaccaccggcgtggagggaaggcctctgagactctgcactgagcaccatcttggacttgtgtgtccaggagtcatgtcccccgacgagtaccactcaggggtcaacaactctgtgtacaccaacgtcctggtccagaacaggtcagacacaagatcccctcacctcaccccacccccgccccagctggagacctgccccggtgcccccactaggcaggcagcagctggaagtgtaggggttgcagcctcccccacctacctccacctccagcctgcgctttgctgctgccctggcccaggacctgggtcttcccatccccagccagtggctggcggtggctgacaagatcaaggtaccctttgacgtggagcagaacttccacccggagttcgatgggtatgagcctggtgagtggaccccttcaagggctcctcccctgccgtcgagaccctcgagtctgtcctggaacaccttccagtcagcggcacctccctgtaggagaggtggtgaagcaggcagacgtcgtgctcctgggatacccagtccccttctccctgagtcctgatgttcgcaggaaaaatctggagatttacgaggctgtgacgtccccccagggccccgccatgacctgggtgagcaccctggggctgtggagttcctaccccattggcctcagtcttctctgcccacgcagtgggcctcacccctgtgtgtcctcttacctctgaccccagagcatgtttgctgtgggctggatggagctgaaggacgcagtgcgggcccggggcctcctggacaggagctttgccaacatggctgaacccttcaaggtcagcctggccacacctgcctcccactgggccccttgtggtgggagtggagcccagcctcagagcaggcacagcagggtgcacccctggagcttcctgccggatcttgggacagcagcccagagaggacggtgacctgggggtcctggtgtcagctgcccttgcccctgcaggtgtggacggagaatgcagacgggtcaggcgctgtgaacttcctgacaggcatggggggcttcctgcaggcggtggtcttcgggtgcacggggttcaggtaagtgcagaggctggcagagggcagcccatgcccccacctgccacctcacaagcctctcctcccacagggtcacccgagcgggtgtgacctttgaccctgtgtgtctgtcggggatctccagagtgagcgtctccggcatcttctaccaggggaacaagctcaacttctctttttccgaggactccgtgaccgtggaggtcacagctcgagcagggccctgggctcctcacctggaggctgagctgtggccatcccagtcccggctctccctgttgccaggtagaacagcccccaacagcccaggtgcctgcgaccccaggctgcccctcacccccaggctgcctctctccctgcaggacacaaggtctcctttccccgctcggctggccggatacaaatgtcacccccgaagctgcctggaagttccagctccgagttccctgggaggactttttcagatgttagggacccgctccagagccccctctgggtcaccctgggttcctccagccccaccgagtcactcactgtggaccctgcctctgaataatcaggaacggtggcttcagagacgtctcttgggccttccctctggccacgtctgcacccacccctcctgggcaccctcctagcctgccatccctcacctgcagccaggctctcagggaaggtccatgctgcttggcctgagttcaaggctttctgcctgtagcctggactcccgtggacccccgtgggcaggtggcttccccgtggcatctccacaccgcctctgcctgcccctgtggactgatgctatcgcgcacggtcccacgaccccaccccgagctcctgaagccggggtctgagcctgcatcacctctggcctctcatcccccactctcctgagagcagtggtcacagcggccggccgctctgctgagaaggcagagaggcaggctcaggcctcagcgtggacagcagggataaggggcacgaaggacggggactcggccccttcagaattcctcaggactctcaggtgcagctttgccaaaaaggaacttttcatgtcatgcagttgaggggacttagtctcaatcccaggctcctcttgactctgggcagctttaatcaggttgggcagcctctgctacagcgtggggtgggatggctctcttccctcagccacgccgcttgtgaggacagaggtgggggagtgggaagtgggaagtcaccagagaacaggagagggatttgagggcgagaccccagcgctctccacggaccagccagagggactggagccaggtgtgcatgggttcaaggccctggccctgcccagcctttgtcttgggagctcagccccagggttcggtcgtcagcagtttcccaagaacaagatgtgatggcatctgctgctgaaaccctgatgaggaccaggccccctgcaccgctgtcagcctgaggaattaaagctttggtgctgggaagagcattattcctctgaggagccgctgtgcttccttctgaagtgagggccgtgccccgggtcccatttctcctttcacttgagtcgggaagcacagcaactttaaggctcgcgcccagcaacatggctcccctcgcatctgcatctccctcctgctctggtgttgccgctgcaccctgtcctcggaggacagcagaggtttggacggagactcagggagggagggaaggaggcaaggacgcctgtggaaacatctttcaggcagctctagggtctgggggccaggatgcctgggtctcccaaggcctgtctgctgtctctgccaccctcagcggctgccagaagcagcgtgtgggggaggcatgtgctgcagcacacctgcggccgagaccagcactcagaggtcggctcccctgacaggaaccgtgtagggtgcagaaggctgagacctgtggacactgcgtgttttatggcagcttgcttgctggggctcatggccacagtggagaggggccgtgggtcagggcagcccggtgtgcagtccagtgccgggcaggagtcttgcaggggctcatgaccacagtggagaggggctgtgggtcaggggcagcctggcgtgcagtccagtgccgggcaggagtctcacaggggctcgtggccacagtggagaggggctgtgggtcagggggcagcccggcatgcagtccagtgccgggcaggagtctcgcagaatgcagcctgacgcctccacgtggctcccccggcccctacaggctccctcagctgcagagctgggtcccatccgacgctgtcgctgggcagcgagaggcagaggcaggttccccgagggaagcatgggccccttctcccggccacggttgccccagcaggagttcatctttgcagccccagagccagggtgatgtgggcacaggtgtcaagtcagggtggtcggtagccttgcgcccgcaggagagatatggcctgaagcctgctgcacgtgcgtgccacacgcgtgtggggccacctctgcacatcctgaggtgacccttttgggggggtcgtgatggtcagtgcacgtgtgccggcagggctggtcagggttcatcgcctgcccaggagcctgagcctgaggcagggaggtgctggtgaccgttcccccaaggtggctcacccacagcaccgggaatggaccaggtcgtccctgcccctcagtaagcctggggactggcagaccgtctcttttctggggacacgtatccagccacacatgggctgaccccctcccagtctctgcacccgacacagtttgatcccttctcaggccaatcctgaggctcagggctggcacactgtctctatcccaaggcaagcacaggtgggcacactgcccttgtccttggtccactgtgggactggtcctgtctgtctccagcgcccagcatggcctccacacacctctgcctccagggctggctgggcctgccctcagagtccctgccacgccagccgttggctgcaggcatatcacagataggggatgctgcccagggctccgagtagaccaaaagattcctgcccacagcccaggaagagcaggcaggcaacggcgattccccgggaagggaagggccccggagtggggtgctcagaaccctgggccactgtgctgttaaccaccacctcccggcaatggctggcctcagcgaggccccagggcctccccgcagcctcgcagtgtgcatgtccctggccctctcccatcaccaggctgtggtgggtgtgtggggaggctgtggtacacaacgcaggtaaaataatatgagaacatgcacccagcaccaggggactcagagaatgttgcacacatgcccattttctgcctttctggatatagtttggttggggtgtgtgtgtgtgtgtgtgtgtgagagagaaagggaagctgctatccttcccacatgtgtttgtgtgtgtgtccagccccacccatgggatcgtccccgccctgcctttctagccaccctcactggcccaggagggagggaaaccaccgtggggactgggatttctcagaattaagggggcacgcagggtcatggggacagacagaatgacccagaaaggaaggaggtgtacaccagaccgcagatggagcccacccacaggcacggactctcacgcagacttcgagcacgcacacacatgcgcacagagagatggggtggacacacgtggggttgggacgcacccatgatgttctggagcacaggccgctaaaccacagagcagcagagatcaaaggcctgggctctcaaacttagtctaaaatactctgggcctccgccccgtaagccacaggccgcccagtggctgagagaaggggacagttggggccaagcagggctgctgagctgcggggggcgctcccgccactgactctgggggctggccctgtggcatttggctttggtggtccctagggcagctccttcccccacgctaggcaggaaagaggccaggaggcactttctggaaccaggcacttttaatcgtggaaccgaggggcctggagtgtgaggagggaggggcaggatcgggggcagagttagggcccgggaactctcgggttagggtgaagaccccggggtctgactggttcagccttaggtgcccatgttggggctggagggccccaggatcaggatggggcagggatggaggccccacagaaggagggccaggctccggggagtcagtattgggccccaggggcagcagcctggggtcagtgtcctggggctagtgccccagatcaggacccagcctgtcagtcatagtccgcgtcatcaaacttggtgctgaagaaggcggcagagtccttggccagccgggccaggtgcagggcaccagtcaccaccagccccaggagcagcagtggcggcaccagcgtccacatcgcggccaggatgttgtagcacttggctttggagccaaaacgccgggccgcttccaggtcaccaaccaccttctgatctcgggcctgcagagagaccagaccacagggccagatctctatgtgtcctcagggcctgggggcccttccccacccacaccctgggcacctggaaggcccctactgcacccaaaatctggatggaggggtgtggcctgaggagatactccttggggccccagctatggacccgggggccatcccaggccagtgtcagcctatcagagctctctatgggtgagggtcccccagggtgctgagacaccccccaccctgccagccaggagctgaagtcaaagggacctctgttccagaagcccacagcatgtgaaccccctcttgattgcagagacctctgtgggtgcctcccaatggcctctgtgctcttggatgggccagacccccttaagaagaggccccccggccttgccttcgtgaggagctctttcccggccatactgatagctgtgcccacagagcccctcacggacaagcagagccccccgcggcccccagcacggcaaggaccccccacggagctccccatccctcccccttccccccaccttgatggagtagtggagcctcccccgcaacctcggtagggcccctgcccaccttgatggagtaggccagcgccaggaagccgaggcaacacagattcaggtagagggtgctgaacaccgaccagatcaagtggtctcgaggcggggggtgcggggcccccagtgtgagggctgtgtgggcaccggccttgctgggcgtgggggcccgggtgtcctcgcggggatacgccgtgtccatgggttccagcgccgtctcttccacactcagactggtgctgggagggtgggcacccgctcacttatagccctgtcgccctcccggcccagcccctcgacgctatatataacacaaattacagcctgcaggccgagggtgcggcccgccccttagcccccaccccagggagcccctgtccgaggctgccttggaccacccagcagggtccctcctgacagacatcccatcagggagcccccccgcttggaaggctacggccaggcagtggcagagacccccacccatccccccacccccatcaaaggctgctggccaagtgggcagtgggcagaccactggccagagccccctccgtccaggccaagaagagttggaggtgtcgcctcagggccatgggcctcataattcagggatgtacaggagccccctcctcagaaccagagctgctgaaactgcagccccttcattcccagaactcaactctgcccctaacactctcagagcaccagcgccaggccctaggagcgcaggcatccctgcaagggggacagggagggcggctgtcggaggagggcgcgagagagaaggagagaaccacatggggggaaagccagggggtgcagcctgttaggagccggcaggggaacccccagggaccagcaacagctgttaacactggtgtcgggatgcagggagcctgtgggctcctgtggtggacactcccctcagcctcctcggctgccctccctgatcccagaatgtctgtggtgagtggtcctgtttagggctcaaggtccgccccagtcttgtctctggctgtagatgcctgtgtgtgctgacgactcacatttatgtcttcagcccagacttccccccaaagacattggcttggtccccagctctggacacacacacgcaactcctgctctgtggacctccacccacgtgccaacaatagaccctggatcctccctcccaacctcctctgccaagccttccccggagcagtggtggcaactgcaccgggccagaaggctcagcttccccgtctcccagtcggccacactcctgagtgcccaggaccaagctgccctccctcctccaggacgcacactcgccacctgcaggggatggttgggtggggggttccttgctgctgtgcttgagcctgtgaaccccaaatatctgagacaggtctcggttaatttagattattttgccaagattgaggatgtgcctgtgacagcctctggagctcctgaggatctgtacccaaggtggtcggagcacagtttggttttatacattctagggacacaggagacatcagtcaacatatgtaagatgaacattggttcagtctggaaaggcaggacaatgcaaagcaaggcagggaagactcgaagtggggaggcgcttcccggtcgcaggtagataagagacaaaggttgcattcttttgagtttctgacttgcttctccaaaggaggcaaccagatatatgcattcacctcagtgagcagaggggtgactttttttcttttgtttttgttttttttttttttttgtgagacagagtctcactctgtcgcccaggctggagtgcagtggcgtgattttggctcacggcaacctccgcctcccgggttcaagcgattctcctgcctcagcctcccgagccgctggcactacgggctcccgccaccacgcccggctagtttttgtatttgcagtcgagacggggtttcaccatgttggtcaggatgaaaaaagctaactctgtaaagtatttaaagaggtttgtcctacgccgaatatgactgaccacggctcatgatacagcctccagagttccagcaaacgtgccaaaggtggctgggctacagcttggttttatacattgtagggagacagaagttgcaggcaaagacatagatcaatacaagtgtcaacgaaaagagtccaactctgcgaaatatttgaagagatttattctgagccaaatatgagtgaccatggcctgtggtgcggccctcaggaggtcctgagaacatatacccaaggggctcagggcacagcttggttttatacattttagggagacatgaggtatcaatcaaatacatttaagaaatacattggtttggtccagaaaggcgggacaacacaaagctgggggtggggggggtggggggaggggcagcggtgttccaggctataggtgagtttaaacattttcttgttgacaattggttgagcttgtctaaagacttgggattggtagaaaaggagtgttcaggttaagatcaaagattgtggccgggtgcggtggctcatgcctgtaatcccagcactttgggaggccaaggcgggcagatcacaaggtcaggagttcgagaccatcgtgaccaacatggaaaaaccccgtctgtactaaaatacaaaaattagccaggcgtggtggcgcatgcctgtaatcccagctactcaggaggctgaggcatgagaatcacttgaacccaggaggcggaggttgcggtgaaccgagatcgcgccattgcactccagcctgggcaacaagagcaaaactccatctcaaaaaaaaaaaaaaaaaaaaaaaaaagggccaggcgaggtggctcacgcctgtagtctcagcactttgggaggccgaggcgggtgaatcatgaggtcaggagttcgtgaccaccctgaccaacatggtgaaaccccatctctactaaaaatacaaaaattagccaggcgtggtggtgggtgcctgaaattccagctactcaggaggctgaggcaggagaatcgcttgaacccgggaggcggaggttgcagtgagccaagatcagatcgtgccattgcactccagcctgggtgacaaagcgagagactccgtctcaaaaaaataaataaataaaaaataaagattgtggaaaccaaagttcttttgaagtcttatagtggctgcccttagagacaataggtgaccaatatttcctattcatatcttaattaatctcttcaggattgggagggtctggaagaaaaagatctggctatgttaactgagattctttacagatgcaaattttcccccacaaagaacagctatgcaggggccatttcaaaatatggcaaagaaacatgtttttggggtattttgattttcttccttgtttcataatgttatgccagagtcaggttggaaagtaagtcacgatatatagggttaaataaaactcatctggttggccgggcatggtggctcatgcctgtaatcccagcactttgggaggccgcggcaggcagatcacctgaggtcaagagttcgagaccagcctggccaacgtggtgaaacctgtctctactgaaaatacaaaaacaaaacaaacaaacgaaaaccaaaactcatctgatgagaatttaccatttgtaggtaaattccccagacccctttgataggaacttgggcaagataaaaaagtcagagtttagtcctcacgagtaaggtgtacattgcttctgccaggaaaggcaagacatctcaaaggggtgtggtcacaggtcacagtgataccagtgggcttggggaggtccccaattgccagtgggacctggacccccacgggtgtccaggctcttggcacaagaagaaaattcaaggacgagaccgaaaatagtgaaagtagggagatttgttgaaaagtgaaggccaggcgcggtggctcgcgcctgtaatcccagcactttgggaggctgaggcgggtgtatcacctgaggtcaggagttcgagatcagcctggccaacatggcgaaaccctgtctctactaaaaatgcaaaaattagccgggcgcggtggtgcgtgcctgtgatcccagctaatcgggaggctgaggcaggagaatcacttgaaccgggtaggcagaagttgcagtgagatgagatcgcgccactgcactccagtctgggcgacagagcgaggctccctctcaaaaaaaaaagaaagaaagaaaaaaaagagaagtgaaaagtacacactcaagaaagggccgtgtgggcggagactcgagagagtcacttgcaaggggtttgggtgggggttccatctttcagggtttctttcaccaagcgggggagtatcatgaagattcttgcaagaaggtgacgatttctcagaactgaggtgccttgcattttttttttcaagacaacatagagggtctttattggatagcagctgagagaccatgcctcagtcctcttgagggacgcctttccccccggcgtaccacttctttcccacgtttcccttctctgcaggctacagcttgatgcaaaagaaagggatcgtcctacaggtccttatacacaacctttgagggcacagtttggaggtggagtggcagaggacatttgtaaaagtgggacagcaaagtttcactgtagcccacgaggaagtagaacttgcgggcaggcaagtgcctcgggaccagggcacagatctccaaccggttggcccagcactgtaaaaccagcgggtcagccaggcagcccgggaaggcaccccacatgaacttgcgacggaaagcatcctccaccgttcgctccgccgcatggtcctccccaccagggttccccgcgtgagcgacctctggccctcacggcgggcgacgaagtgcggcgcgtgtgcgtcctcataggtcaccggcttgtccccctggcctcggcggactcgggccgccggttcttgttacagaccgcggaagtgtgcggggcccgccccgcgcaaggcagctctcggccccgggacggcacccggggccacccgccacccgccacccgccgcacgcggaggccgccatcttggccgagcgcccgccatgtttacagcagatctgtgtgttcctggaagtgtcgcggtgcgggtgggtgtgggccgagtacgttcctatgaggaggtcctaggggacgcataggtcgcattcagcgccgtggtggctctggtctgtcttagccagcttggcccacactgcttttgaaggtctcatcggcccctcgcttctgcagcaacctcaacagtctcttttgctagtcatgcgaggctgctgcttagaatgttctgttctcccgcagccgctccatattattctgtctcattttgtggatttaaagattttctgatgggcagctggcttaaagagttcagctttggggccgggcgcggtggctcccgcctgtaatcccagcactttgggaggccgaggtgggtggagcacgaggtcaggagatcgagaccatcctggctaacacggtgaaaccccgtctctactaaaaatacaaaaaattagcaggacttggtggcgggcgcctgtagtcccagctactcgggaggctgaggcaggagaatggcgtgagcccgggaggtggaggttgcagtgagccgagatcgcgccactgcagtccggcctggttgacagagcgagactccgtttccaaaaaaaaaaaaaaaaaaaaaaaaaaagttcagctttgcctaaagagttggttagtcgaaagaaattacttgagtttacataaccggggctgtggaagccaaggggcttgttatgcagatgaggcctccaggtggcaggctggagacaaggatgataaaaaaaatctctcttttccacccttaaaaagggctcttagttaaatgtctgttctataggaaaagacctagaaagggaaggagattctctccagaatgcaaatttccctaataagagacagttgtgcaaggccatttcaaaatatgccaaataaatatattttgaggctgtgcatggtggctcacaccagcactttgggaggatgaggcaggtggatcacttgagcccaggagctggagaccagtctgggcaacacagtaaggccccgtctcaaaaataaaaatacatatattttgggggtaaataatttttatttccttcagagcctgctatttgttgtgaaaggaaaataaatattaggaccccgaaatcactgaaccaaaaggagacgtcaagctgggaactgcttagggacacctgcctcccgttctactcctaaaaacggctgctgccgaaacaaaaagctatatacctccctcacagtttgtccacagggaatttccttgtggacaaaagacaaatggaactcaaacttacccttttgctcgctgagataatgcatatctgattgcttcctttgcaaaggctcatcagaaactcaaaacaatgcgatcctttgtctcttctcaacctatgacctggaagccccctccccacttcgagttgtcccgtctttccagactgcactaatgagcgtcgtgcatatattgatgtccatgtctccctgaaatgtataaaaccagctgtgccccgatcatcttgcgcaccctgtcaggacctcctgaggctgtgtcacccgctcatccttaaccttggtcctaaatcgactgagaactttctcagatatttagggtttacactgtcatgtgacgctgtaccacagtcagttggaatttggtaccttattgctacgaagagtctgttttgtcagtactatgagctccatctcagtgt

SEQ ID NO: 731 - DNA, 3098 bp, Homo sapiens
ctgtatggccacaccctcacccctgagcagcccggggggccacagcaagaggtacacatgctgtggacaccagcacccccagacctgacccttggggaaggtgaggaggctaggacgtgggacttcctgacagcagtgggcggcagccaggctgaggctcaggcctgcctcactgaggccctgcagctgcaggccaggggagctctgtatacggctcacgcacaggcctgggcccagctctgggtagaatgtggcttggacgtggtggggcccctgcagctgcgccaggccctgcgtggctccctctactacctgctcagtgccctgccccagcccaaggccccaggatacatctgccatggcctcagtcctgggggcctctccaatgggagccgtgaggaatgctactggggccacgtcttctgggaccaggacctctggatgttcccgagtatcctgatgttccacccagaagccgccagggccatcctggagtaccgcatccgcacgctggacggggccctggagaacgcccagaacctgggctaccagggagccaagtttgcctgggagagtgcagactccggcctagaggtttgccctgaggacatttacggagtccaggaggtccacgtcaacggggccgtggtgttggccttcgagctgtactaccataccacccaggacctgcagctatttcgagaggctggtggctgggacgtggtcagggctgtggccgagttttggtgcagtcgtgttgagtggagccccagggaggaaaagtaccacctgaggggagtcatgtcccccgacgagtaccactcaggggtcaacaactctgtgtacaccaacgtcctggtccagaacagcctgcgctttgctgctgccctggcccaggacctgggtcttcccatccccagccagtggctggcggtggctgacaagatcaaggtaccctttgacgtggagcagaacttccacccggagttcgatgggtatgagcctggagaggtggtgaagcaggcagacgtcgtgctcctgggatacccagtccccttctccctgagtcctgatgttcgcaggaaaaatctggagatttacgaggctgtgacgtccccccagggccccgccatgacctggagcatgtttgctgtgggctggatggagctgaaggacgcagtgcgggcccggggcctcctggacaggagctttgccaacatggctgaacccttcaaggtgtggacggagaatgcagacgggtcaggcgctgtgaacttcctgacaggcatggggggcttcctgcaggcggtggtcttcgggtgcacggggttcagggtcacccgagcgggtgtgacctttgaccctgtgtgtctgtcggggatctccagagtgagcgtctccggcatcttctaccaggggaacaagctcaacttctctttttccgaggactccgtgaccgtggaggtcacagctcgagcagggccctgggctcctcacctggaggctgagctgtggccatcccagtcccggctctccctgttgccaggacacaaggtctcctttccccgctcggctggccggatacaaatgtcacccccgaagctgcctggaagttccagctccgagttccctgggaggactttttcagatgttagggacccgctccagagccccctctgggtcaccctgggttcctccagccccaccgagtcactcactgtggaccctgcctctgaataatcaggaacggtggcttcagagacgtctcttgggccttccctctggccacgtctgcacccacccctcctgggcaccctcctagcctgccatccctcacctgcagccaggctctcagggaaggtccatgctgcttggcctgagttcaaggctttctgcctgtagcctggactcccgtggacccccgtgggcaggtggcttccccgtggcatctccacaccgcctctgcctgcccctgtggactgatgctatcgcgcacggtcccacgaccccaccccgagctcctgaagccggggtctgagcctgcatcacctctggcctctcatcccccactctcctgagagcagtggtcacagcggccggccgctctgctgagaaggcagagaggcaggctcaggcctcagcgtggacagcagggataaggggcacgaaggacggggactcggccccttcagaattcctcaggactctcaggtgcagctttgccaaaaaggaacttttcatgtcatgcagttgaggggacttagtctcaatcccaggctcctcttgactctgggcagctttaatcaggttgggcagcctctgctacagcgtggggtgggatggctctcttccctcagccacgccgcttgtgaggacagaggtgggggagtgggaagtgggaagtcaccagagaacaggagagggatttgagggcgagaccccagcgctctccacggaccagccagagggactggagccaggtgtgcatgggttcaaggccctggccctgcccagcctttgtcttgggagctcagccccagggttcggtcgtcagcagtttcccaagaacaagatgtgatggcatctgctgctgaaaccctgatgaggaccaggccccctgcaccgctgtcagcctgaggaattaaagctttggtgctgggaagagcattattcctctgaggagccgctgtgcttccttctgaagtgagggccgtgccccgggtcccatttctcctttcacttgagtcgggaagcacagcaactttaaggctcgcgcccagcaacatggctcccctcgcatctgcatctccctcctgctctggtgttgccgctgcaccctgtcctcggaggacagcagaggtttggacggagactcagggagggagggaaggaggcaaggacgcctgtggaaacatctttcaggcagctctagggtctgggggccaggatgcctgggtctcccaaggcctgtctgctgtctctgccaccctcagcggctgccagaagcagcgtgtgggggaggcatgtgctgcagcacacctgcggccgagaccagcactcagaggtcggctcccctgacaggaaccgtgtagggtgca

SEQ ID NO: 732 - protein, 552 aa, Homo sapiens
MLWTPAPPDLTLGEGEEARTWDFLTAVGGSQAEAQACLTEALQLQRALYTAHAQAWAQLWVECGLDVVGPLQLRQALRGSLYYLLSALPQPKAPGYICHGLSPGGLSNGSREECYWGHVFWDQDLWMFPSILMFHPEAARAIYRIRTLDGALENAQNLGYQGAKFAWESADSGLEVCPEDIYGVQEVHVNGAVVLAFELYYHTTQDLQLFREAGGWDVVRAVAEFWCSRVEWSPREEKYHLRGVMSPDEYHSGVNNSVYTNVLVQNSLRFAAAQDLGLPIPSQWLAVADKIKVPFDVEQNFHPEFDGYEPGEVVKQADVVLLGYPVPFSLSPDVRRKNLEIYEAVTSPQGPAMTWSMFAVGWMELKDAVRRLLDRSFANMAEPFKVWTENADGSGAVNFLTGMGGFLQAVVFGCTGFRVTRAGVTFDPVCLSGISRVSVSGIFYQGNKLNFSFSEDSVTVEVTARAGPWAPHLEAELWPSQSRLSLLPGHKVSFPRSAGRIQMSPPKLPGSSSSEFPGRTFSDVRDPLQSPLWVTLGSSSPTESLTVDPASE

SEQ ID NO: 733 - DNA, 24535 bp, Mus musculus
actgcagggatgtctgtaagaggcgttcttagctagaggggctagacaaacctcaagacaaactaggctggagtttatcaactgctgttctacactgggataacaaagtaagtaagtgagtaagtggagggaagggtccatgtcagacattaagaagagggaggaggaggagggaggatgccaggccaggctgcagagggagctggtgagccgcagaggagagtcctagatgctctgagaatgcactagggatgcaaagtgtctctgagtctggagcgacaaagacttcactgagctctctctcgagctctctctctctttgtgtgtgtgtgtgtgtgtgtgtgtgtgtgtgtgtgtgtgtatagtctgtagtgccgtttgagcttagttggcttttctgggagatagaagtgggtcagtttccacccacagaaagggtatcaaagttcaacacctgggagagaacccatccattgcttgttgcttatcttaaaattgaaaatgtgtttatcatgcttgtgtgtgatgtgtgcgggtatgtaatgtgtgcgctggtgtgtaatgtgtgtgctggtgtgtggtgtgtgcgctggtgtgtgtgtggtgtgtgtgctggtgtgaacaggtcacagcacttgtggagctcgctggacactggatcgtggagtcagttctttctttcctcctttacgtgggattcagggagagaattgaggtcattggcagcaagggcctttacctgctgagacacttcgcggtcgacactatcacttctttaataaatcctctgtggtggacttcccacttcaaaatcacaacctggagggctagaaaatggctcgggtgatgggagaatgagctgctctcacagacgatccaagtttggttccccacacccacactgggtgactcactgccacctgtgactccagctcaggggaccccaacacctttgctctgctctctctctctctctctctctctctctctctctcacacacacacacacacacacacactgatgagcatgcacacagagacacacagacacaaacacactcatgagcatgcacacacagacacacagacagacacacatacagacacacacacacatacatgcaacctcccacatacataattaaatcttttgaagcttagagagcttgctcagtggttaagagcactagctgctcttgtagaggccataggttcaactcccagcacccacatggtggctcagaactcccgttccagggcatctgcccgcttccgaactctgatagcagcaggtgtgtacatgatacacatacatatgtgcaggtaaaacccccatagacatgaaagaaataaaaaatgatttcagtaagtaagtctttgaaaaatgagggtaaacaaataacatcatgaatatttgcaaatggtaatcacaacaacagaaaggcagaaagacaagccaggggctcacgctgtagctcggaggcagaactcttgccccagcatgcagagactccgggttcaacctccacagctgtagaagtaaattatacaacttaagacatgggagggggctggtgagatggctcagaagttaggagcactgactgctcttccaggggtcatgaattcaattcccagaaaccacatagtggctcacagccatctgtaatgggatccaatgccctcttctggtgtgtctgaggacagggcagtgtcctcacatacatacaataagtaaatacatcatttaaaaaaaaaaaaaggcatggaatgcagcagaggacttgctttcaaccctgctctccctccccagaggcgggcatccttactgggttctagtctcagctggaaagctttatgggtctctaactgcctcgtgactttttccttctcatatgcaaattatcccattgtgctggggtcatctctgataatgtcctgcatcacccttacttctggcgtctggaacttctttgtgcctagctatagggccttagggtggatgccactggttttctgtgggccctttgggagagcctggtccctaggtccctagcgggtgctcccctggtgggatgagaaggctggaatgaacccattgctctgggcctggctcaaagtacttggaccctgaccccaggacagtttgtatccgatactcactgtttgctttcaggcaggtgaggagggtcttttttcttttctgtctttttttgtttgttttgggttttgttgttgtttcctattgttttgtttgagacaaggtttctctatgttgccctggctgtcctggaactagttctgtagacaggctgtcctcaaactgagagatccacctgcctctgcaacccccaacgtaccctcatccctagtactgggattaaaggtgtgaacggccacacccaacctcaggttgggctctgttttttaaagatggagatagaagctgaggctgacctttgacctctcattgcccccttgttcttcaggtcaaggtcagctctgccttccatctcctcacttaatcaatgggccagggaatcttgtaatggaaacgagaagttcctggtcaggctcggtagccagataagaccccagaaactccaaggactccctgaaggctgaagcagatcaaggttgtcctgagcaacttagagatgagaacttacccataataaaaagtaagcgcagggaaccctgggagccagaccagcaggtgatggtgctcgatacccagacacttgagttccatctccagcaggaagtaaatgtggaaggacgcacggcacgtggcaggcacccttgctcactcacactcacacacgtgtgcaagggaacacacatgcacactccagcccgcacactctctcgcatggcatgcacaccagaataaagagaaagggttggggatgtaagtcacagatgcctggttttaattcctagttcagcccgatctacacaccaagttccaagccagccaggcctacctagtaagaccttctctgtacataaataagaagaaacaataagccatcagcctggtgaccaagaggacttgacaagtagtttaaaatacaaagaacttgaaacagctctggatgtaaatgtctaggtggaatcagacaaacccccaaaagaggttaaaaactgaccgtgcacattgcaaatgccagcccagaggtcctaatctcaggcaatagagatagaagggaaggagacaatagctggtgtggaccgagtttgcaaaggaatcctccactccctgctggagggacttaacctttctggaggacatttagatagatgtcatgtttttttatggcgcgcagcggctatgttggcggtgtagcgctaagtggatgagcccagccgttccctgaaactgcttgttttatttgtggcagggggaaaaaaaaaaaagctgggtgatggtggcaaacacctttagtcccagcacacaggcccatctctgtgagtttgaggccagcctggtctacagagcttgttccagggcagccagggcaacaggcagagagctctgtcttgaaaaacagacaaacagcaaggcatccatcctgcccagccccagttccctggttaaacaaattgtgtggactagcaaaatccacagaataaaatgcttacagtgtggcctcccggtgcaagatgcaatcccaaatccctgggaagctgaggcagaaagatcacaggtccagtgaacccagatcgggtttcaaaggaaaaaaacctcgtggctcagaagcctttaccaagcaagcctgatgacttgagtgggtagaacaagactattgtggcacagacctgcaagcccagcactcaagagggacaggtgttcgaagccagcctggcctatgttagctcctatttcagaccgacgaacacggggaatcataatgcagtagtgtggcactgcctggcatggaggtgggcattcgtggtgacaaaaagacgctgcgtttaggtgtgaaggtacacctgaagaaatgcagctgtgtattcaaatcagtcagtcccaggttgctctcctaggacagagagatgcagggaggcactttggccagcagagggcgaaggaggactgcgcctccatcgagggccgggggtagggtgggatggggagcaacggggagcttttgggaagaatattatacatcagaaggatcttttgcagtccctgccctcaggaggctgaggcaagaggataacgaggagataagtctgcttatgagaacttgtcttaaaagcaaatgaagttgtccgtggtgccacacccctttaatcccggactctggagggagagattggtggattcaaggccagcctggtctacagagccaaaagttacacagagaaactctgtctccaaaaccaaaaccaaaacaaacaaacaaacaatcccaaatgtgtttctcggtgtggcattacaggcctttaatccaatcactcaggaggcagaggcaggtgatggatctctgagttcaagggcagcctgctctacagagggagttccaggacagcctggtctacacatagaaacccagtctctaaacccttcttgttctgcaagaagattcagtctggctcttgcctgtaccccaaagtcggctcctgttacctgggccttgcctagcgggcggtctcacctcctggggtgggtgggtggggtgtcttcacttcagcccccagcaaggactgtgagaactgcagtggggacaccaggaagatccactcagacttatgcctggcagagaatgcctgcttctcctcacccacctctggggctcaggtcctccaaagcctggaggaaaatgggcaaccaggttcagatgccaggtgtttctgcacctgctctgacatcttcaggagacagcagccaccaaagtgtcttgtagcccaggttggccttggatggggctatgtgtaggtaaggatgatctagatagtctgcctcctctgggattataggcacgcacagctacaccaggctagccacctagcttttcacttgaggattagaagctaggtaacttccgcctggagaagctcacctggagtaggagtcaatcagccagggctagcctgggtccctgcacccagcgaggaccacaagttctcctgaggtaattttttttgggctggagaactgaatatttgacccagagcctcctgcatgttatagtttcttaaagattttcttgttcaggctagaggtgtggtaacatggaggtgtgcgcacatgggaggcagaggcaggtgggtcgctgtctggtctacatagcaagttctagaagagccatgactatatagctctctctctcgcttctcgctctctctctctctctctctctcacacacacacacacacacacacacatgtcttggtgtttttacctgcattatgtttgtgcactgtaacaagaaaaaggaaaaacgcactagatcccacagaaccagagatacagatggttgtgagctgtcatgtgggtgctgggaactgaagctaggtcttctgcaagagtatcgagggctctgaacaactgcattatctctgcatattgtgtgtgtgtgtgtgtgtgtgtgtgtgtgtgtgtgtgtgtgtgtgtgtgtgtgttaaatatggttgtatggctggctcatttgacaagagtcttgcttgcactaacaggaagctgtggctttgattcctagtacagcataaaactgagtgtagttgtacacacctgtaaccctagaatataagagtcagaggtgggaggatcaggagttcaagactgttgtaggctacagggcaagttagaggacagcctgggctacaagataccagtctgttatcagtcagtcataccaaaagactttgaatagtctctttgaagttcaaaggctacttacaaagatctccccttatctaggaaacaagacttacttccatttcctttgccagccaaatacctttccttcaggtggtctctagagacctgtgatgtctgctcctgggaaggggagggtcagatgtttagggtcatccttggttacatagtgagtttgagatcagtctgggttacagacactctctcaaaaaaaaaaaaaaaaaaaaaaaaagatccaaaataacagcaaaagaattgagggtagggctctggatgtagctcacacacaactcacacacaagcctggctttgacctgtagcactacacagtctaggttcctgcataagatctcagcactagggagataaaggcaggaggatctggaattctaggaaacactggagagagagagagagagagagagagagagagagagagagagagagagagagagcgctggatcaatagctcagcagctaagagcaatagctcttacagtagacctgagtgagtttgtctcccagcagtgacaatgtggcccacaaccacctctaactcaaatgccaggggagtctggcctctgaggacatctgtacatgtggtatgcactcacacaggcacatacatataaacagaatcataaaaatgtggatgggcagtgctggcgcatacctttaatcccagcactcgggaggcagaggcagacagttctctgtgagtttgaggctaactttgtctacagagtgcattccaggacagccagggctacaaagtgatactgtatctcaaaaacaacaacagtaaataagtaaatacattttgttgccagtttgcagatcagtttattaagatgacatcactgctagttactgcagaagagaagctacctgcccaaatcagtgaggttctgaagaactcactgcattagaaaccaatgttcaaatccacaaggaactgttcctgattcccagggacaaggccgaggcaggtgaatctgcacatttacttcaagcttttaaagagcgtgggggccacacagtggtcccgtgcatgcaggaagtcaaagagctcctctgtacagccctcttctgactgtgatcaggaagacacgcgcttatcacacaactctagttgttcctgggcctttacacacttctccagctgttcacagtgctttctcactgttgttgggggcggggtcccctaattcttcctcctcctcttcctctttggggtctccggatccagtgagcctctttcatttgtccttcagtcccatgtcgggagctggcttgggatacaacaagagcagccataaataccttttgggtttttttttttttgttttttttaaagaagattctacattaaacatccccccaccccaccccccgtccctccccccttcattctggaagtgcaggagcgtccagaattctattccactcctacttttgaccagctgcagctaaccgcacactggttcctggcttttgcttatcactgtggggtgggaatcattctgctgttgcatggaattgtacacactctacagcctgccttgttgcatggattttgttgttgttgttgttgttgttgttgttgttgttgttgttgtttttcgagacagggtttctctgtatagccctggctgtcctgaaactcactctgtagaccaggctggcctcgaactcagaaatctgcctgcctctgcctctcgagtgctgggatcaaaggcgtgcgccaccacgtcctgcttgttgtgtggaattgtacatactctacgcctgccttcctttcttttcctgacgggcttctcagtgctagcctcaaagtcccaagctttctagctctgcctccaaagtagaagggatacagatgtatcccccatctggctgtagctattgtttgctgctgtatggtcttctattgtgggtatgcaacctggttagtccgtgtctattgttgatagatatttgagtgttttgttttgttttgtttgggatttctgctctctctctctctctctctctctttctctctctctctctctcttcctttttctttttgatattaagagtacaggtgtcagccaggccatggtggcacacacctttgatcccagcacttgggaggtggagccaggtgaatctctgagttcaagggcagcctggtctaaagagaaaccctgtggggggctggggggggttatttacaggtgtcaggactgtccttttgtttggtctgggtttgaggctggccgtgggttcttagctttggttgctctttagaggcatccagtccttttgacagttaaaattcgatgccaacaaccccgccctagataagcgaatcaggatgtgtctgccagtgagggcagggcgggcttaggtgttttcagacactcttgaggaaaagcttggctgaaaaaccctaggtggcagtcggcctaggaagggagcttcctgggcgtggagagtcacctgtcacccgttaggggctaagtcacacctttcctaagcggcatgccagccagcatccatcatttgaccaagttttactttcaggcctctggcaggtgtgaggttgtgaacaggcctccccttgtgggcttcatttgcctttctctttccttcttactaagcaggcttgggggaggctgagggggtggagtggggggctgctgaaacaaaggatgaaagggatgaaaggaagcctagccaggtgtggatctggaagagaaaacaggactggaggaaggcaggtaccaagcaaggccccgtggtaggaaagcctgttctctgatcataggggatggagaaaagtcaaaacctagtcagctgacttgtccgttgggacgagggtggtggtggggcgctgtgtgctctccctctggactcagggagactcatggatgaactaaatctacccagagggcagtgttctccacgatggttgcctgttgtctgaccatcctcccactcccccaccccccacccccagtgctgggagtctgattctattccctgttgttacctccagtgcctagagactcgatgctagctggtgccccagaggtttccgtagaccctctgctttataggtgtttataaccccatactatgggggtgtgggtttggtttccgaggccacccttcctccctgtgaacgttccaacacgattttcaggaagtcgggagccttagccctggtccttgctacctctgcctcgcacctgcccttattggtgtttcacaatgcaactctaaacacgtccgtcctcagctgaaagtccttccgtgactccccagtgcctgtaaggcaaagtccaaactcctccaaagacccgaggccaggaaatcggacccctcagggtctgcccaacaccaacctcatcctggaacctgctctcaaaggttggacaggcagaagttactgattcttaccccgggcctttcccctcggtgcttcttcacttcctctaggaagtcatagacaccctcccctgtcaggtgaccgttcattgacagtcacagctgtctctccccacctcctttcatcaaatcacacctccctttagtattcgaatcctctgtttattctgtctgtctctctctcccacggccgggaagccatccttgcgtagggcatccctgggtagtgttttgttcagggctgtgtagacagttccaggaacccctaagcgcgtgcatatcatcgcactttctggctccccagcgcccaaaggtcagcagctcggggatgttgcggggcaccgcgctcgtcgtggggcaggcgcggccaccaggggtcgcccgaggagctcggaagccgcgcggtccggtccgggaggagcccaagcggaatctcagcgccacgcggcgggagccccagcagcccaggcgcacctgctccggtctcagtctccggccgcgccgccgccagccattggctcagccttgacaaaggggcgtgacaaacagtacggtcaccccccagccctggtacttaaaggaatttgctgctgctaggggatcgtagtgtgcggccgggcctcgcgagcggagttgactaccgaccttgcgcgacccggtgaccccgactacctaggtcgctctggccaacatgccgcgctccttcctggtcaggaagccgtccgacccccgccggaagcccaactatagcgagctgcaggacgcgtgtgtgggtgcgtggtggggtgcgggacgcgggcggctgggggggatcccaagggtgctggggggaggtgagaatcgggctctgcgggcgcgacaggtggatctggagctccgggtcttggcagttgggatccaccgagggtgctttgacccgggacggggaggctccgggagttgaagactcgaaggcgggggtacttgcggagtccggcgggggaggggaggggcgggcgggaagcccccccacctggcgccccgagaatccgctcagctgactccctgctgtctcttctcttcccgcagagttcaccttccagcagccctacgaccaggcccacctgctggccgccatccctccgcccgaggtcctcaaccccgccgcttcgctgcccaccctcatctgggactctctcctggtaccccaagtgcggccggttgcctgggccaccctcccgctgcgggagagccccaaggccgtagagctgacctcgctgtccgatgaggacagtggcaaaagctcccagccgcccagcccgccctcgccggcgccgtcgtccttctcgtccacctcggcctcgtccctggaggccgaggccttcatcgccttccctggcttgggccaacttcccaagcagctggccaggctctcggtggccaaggacccccagtcgcggaagatcttcaactgcaaatattgtaacaaggagtacctcagcctgggcgctctgaagatgcacatccgaagccacacgctgccttgtgtctgcacgacctgtggaaaggccttctctaggccctggctgcttcagggccacgtccgcacccacactggtgagtgagtgtgcatagctgagctctgagtctgggctgtttggccttagaccctggggggactcaacacttactcctaaggctgccaagcagtggacaaagtagatgttggttgttctccattctgtaccttgctgttcgaggctaggagtgaagaggtgttccctatccgggctcaacccacactgtagaagtcagacaggatattgctagacaggatattctgcacctggccttgaatcctgagtcgagaacttccccagtttcctcgtttctaaaatgtatcagagaacacttcgtggggtctttgtagagtgaagtgctaggtgcaggtgccactaagaaatgacttcccagtgactatgaagacggctcagtggttagagcactggctactcttccagaggtcctgagttcaattcccagcacacatggtagttcacaacttaactaactgcctgttaagagtccagttccagaggacctgacaccctcatacagacatacatgcaggcaacataccaatccatgtaggacaagaatagaatagacacatcttttttttttttttttttttttttttttaagaagagaaacaaagacatgactttgctgtcctctcagccttgggccacgtgggaagcttctagaagtgagggaaggcttcagccaggcttggtgggggttccggttgggctgctctttggaaagtgtgtcaggctttggggtagagctgtgcgtctcttgtggtggccagcattggggcagtgaggcctgggggtggcagggaggtatttgcaggtctcactgacacctttattacttgaataagattacccgtttcccccccccaggcacggattgcctcagatttaacctataaaagtgtaacaggctgcctctctccggctgggttgctaagctgtggggctctactttggggaagagctgaagccctcagggtcctaggctgcctccgaccaccccccaccccccagggactttgttttgatgtaaaggcatggctcagacaaaaccctccttgaaatgcaccacccagttctctaggagttccattgtgtgtcttaatggtagcccagggggtgggggcctgcagggttagagcaggtgcacggggcagcggtgcccagcacctgttcttggccgcagctgctggctcattgcacggcaggcccctttaatccagggggtatcacatgtacagtgtcccccttagtggcctttgtcccagccggcctggtgccgatttcacacttgccaggaacactatgaaggcgtctgggggtcggggatctgtgaagagagagagagtgtgtgtgtgtgtgggggggggggtgtctacacttcctgtgcaagcccagagactcccagctccatcccaccctgtgttatcttgaaacctcccttttgttaagtacttcagttcgcctgtccctgctaaacggacaggtagtggttaggccattctagggagggggcaacaccccttacttgtagggacccacagattgccaaggtccaccaccacccagggctttggagccccacctgtgtagctgaagacttgtgtgggtttgtgccccctaggggggctgaaagcggctctgttcagtgaatacctgctgagtgggtggatcccgcaggatccctgctgagatttcctctatccagaggctcagcacacccaggcgccattcctcagccccgaattccatcactagaatccaaccaaagggcaccgcctgtggactagcaggctgggagggacgggaggcttgccttgttttgaaaatccgtttggcattacagcctcatgcttggcacatagtaggggtgcagcagatgtttggttttgtcggtatttgttaactcagccagactgggtttaaaccagagaccctcctccctctgtctctacaatgctgggttacaaatatggacccccaggctcaggtccccttttttaaaaagcacatttattaattcaggtattcactgaacagagccgctttcagccatcctcgggggcacaaacccacagaagtcttcagctacacagcatgtaattaagcacttactggacacagagcccccgtgtgtccttatagccctggctgggcacggatccggtcaggatcccagatgtctgtaagcccctgggcttgcagttagttaaggagagcttccttactgcagagcggtgggctgctggcagcatgcagaggaatggccttgctggctctgggtgggggtggggaggcctctccaggctgcctctcaagctttgtcccagacaaagtaaatcaaagtaaattcaaggctggtaataggaagtccagtcgcagctcccctgcctgaggcagtgactacaacccgggctatggaggtatggtgggtgacctagagcctgctgcgtacctctgtgcctcagtttccccacctctaataggactgcagaagggacagatgacaggtcaatcagaagtgttcagtgcctgccaggtgggaaggactttgtttcagtgagccccgcctggagtttggagactcagcagtctggtggtgttcagggctgcacagcaggaagcccagagacccgcatccagtgcaggtctggctgtgcttgggctgaccgggccctgtccaggccttcctaaccctgctggtatctctccccaggtgagaagccattctcctgctcccactgcaaccgtgcttttgctgaccgctccaacctgcgtgcccacctccaaacccactcggatgtgaagagataccagtgccaggcctgtgcccgaaccttctcccgcatgtccttgctccacaagcaccaagagtctggctgctccggaggccctcgctgaccctgctacctccccatcctcgctggcatcttcccggagctcaccctcctcctcactgccaggactccttccagccttggtccggggacctgtggcgtccatgtctggacctggttcctgcttggctctcttggtggcctttgccgcaggtggctgatggagtgcctttgtacccgcccagagcctcctacccctcagtattcatgaggtgtagcctctggacacagctgcttcgagccatagaactaaagccaacccactggctgggaagcttgaaccccgctcaggggaccccacttccctacctccctcaaggacccttcaggccaccttctttgaggtacaacagactatgcaatagttcccctcccccccaccccgtccagctgtaaccatgcctcagcagggtggttactggacacatgtccaggtgcccctgggcctgggcaactgtttcagcccccgcccccatttgtcctggtgacacctgtttcacagcagtttaactgtctcagaagggaccatgaataatggccatcacttgttaggggccaagtggggtgcttcagcctggccaatgtgtctcccagaactattttggggcccaacaggtggccccgggagaaagatgtttacattttaaaggtatttatattgtaagcagcattttgtatagttaatatgtacagtttattgatattcaataaaatggttaatttatatactaaaaagtgctcagtgttggggtgggggcaccataaagggacttccaggagggaggggcagggccttaagtcttgtgctttggagttctaactagtcgtgaactttggggcctgggctgcctggcctggtatctgtcccactctggtacagtgcaagcttcctgaactcttagttcttcgggctctcttgggaaggtgctttgtggggcttagccacagcctggccaggagctctggctccaccatagcaggtctttggggcagagctagctgcccctcccagctgaagggaggatgtctttcctgttcccaagcgcctccctgtcaggcaggcccacacctctgtctggctgctgggtaccaaatggtctttgatgcaaggaaatgggctggctggagccaggagggtgagaagccaggccaaagggtaggggtcatacagcttcctgcttggaggaccagggctggagcaatttacctcaggctagttggtgctggtgacctcaactctgagggcctcctggggctcgagagaaaatgagtgtcctttctaagcacaaaaggtgatgaaggtgccagtttcctgtggggagctgagcaggcgtcggctgggagcttcagccagcccagctccaacccggctggggggtggggagcttccagctccaaaggagagatgagtcttctaaacaggaaatggtgacccgcaggcgggaacagcctaatgacttacagctttcctcccaaaaggaaaaaaaaaagtctctaacaatcgccaaattgtggcaggcctccctgaaggggaggttggtgaggtggtattgggggctgggcatcaacgagctgaaggcctactgtgtccccaggaggttcctccacataggttgaacagtgagtgacttcaccccgggcctggagggatgggatgggcctccaggaccagactcagcgctgagggcctggccccaggtctagtgcctaggacttggtcagcctggttctgagcgtgctgggagtcaggtaggcctggctcctggccctgactctcacctctcgctgccagaagcaagcaagagtctctctgctctcggccccagtttctgcctctagaaatccgaggcaacagtgcctgtctctggagaggctgtgaggaaacattccttcagtcattcagtgggtactgtgagccggggtgtgccagtccctgtgaagagtcactgtgctcaggaactctgttctagtcggggagacagaaaacaaacaagcaattaaacacactgctcgcctgcagcagtgccaggatggaatgagaggccgggaagacttgagagcagcaggcagggttcccaccaaggcatccagagccctcgggagggttgacattccagagagggaggaggaggatgggaaggatggaggtggaggaagagggatgggagaatcctgggggaggggaagtaggctgtggggctgggagaagctgtcctgagaaagaccatgtggctgggggcactagaaagccaggaggagagggagatcagggcctctctggaacctcagcccagaatgcagccaaggggcttagagacagcagctgggaccaaggtcccataggccgcctggcagggcagagactagagctaggagaaggaatggaggtggcatagcaggtgacaaagggctcgggccagggctatggtggctgggtagtttactgcccacccagcctggggccttcctcgcttccttgggactggtcctggaccccagtaaatgggagagaggacacagctgtcccagaaggaacctctctaagcctggggccgagtagacagacagacagccttctgtgggaagaactggggtggggactgcaaagggttattcacagaaatgtgcagcttttgacaacgtgaggagaaaaggctgtctctaggagaaggcaggcagccaaactagccaaggagaagtgagagaatcaagggtggaggcgggaggggaggccttctttgagttttagatttgtttgtttttgagacagggtctccctatgtagttccaattgtcctggaacaaacggtagaccaggctggcctggaattcactctgtagaccaggctggcctggaaggcacagagatccacctgcctccgcctcccaagtgctgggattaaagccgtgcgccaatcaacactgccatcatttattttgtttgtttgtttgtttaagcattttgttgttgttgtttgttatttgttttttgtttttttcgagataggatttctctgtgtagccctggctgtcctggaactcactctgtagcccaggctggcctcaaactcagaaatctgtctgcctctgcctcccaagtgctgggattaaaggcatgcgccaaccaacacggccaccgtttattttatttatttatttaagcattatctttgaagcaggcttttgtgtagctcaggctagctacaaagtcttcatgtagtagtgaccctcctgcctccacctcccaagtgctgggataacagatgtatacaactctgtcttgttgtgctcttctgaggatagagcaccaaaaccttgtgtattccaggcaaaaatcctacaaatgaagtttcaatctaagccaaccccacccttatcccctgctttgaagagaaggtatcactttgtagactaggttagcctcaaaaaaaggaaagagagagagagagagagagggagagagagagaggagtgtttgctttctgtgtgaagggctttgaagggcttataagcactgtggttttttgtggtgctggagagatagcccagactctcatatacgctggtcaagtgctctatggctgactgcagagctacagccccagcctgtgatattagttttttttttttttttaagatttatttatttaagtacactgtagctgtcttcagacaccccagaagagggcatcggatctcattacggatggttgtgagccaccatgtggttgctagaatttgaactcaggacctctggaagagcagtcagtgctctttatgtttttgtttgtttgttttttgagaaagggtttctctgtataaccctggctgtcctggaaatcactctgtagaccaggctggccttgaactcagaaatccacctgcctctgcctcccgggtgctgggattaaaggcgtgcgcccaatattagtattttttaaaagtacaggccttctaggcctggtggcccacatcaacactctggaggctaaggcaaaaagattgtcaggagttcaaggtctgcctgagctacatagcaagacctatctcaaaaagaaaaacaaacaaacaaacacacacacacaaacaaaataaaactcaggtgtgatggcaggcaactttaatgtcagctcctgggggacagaggcaggtggatctctgtatgttcaagacaagcctgatctataaagtcagtttgtgctggctagtttcatgtcaacttgacacaagctggagtcatttgggaagagggagcctcagtggagaaagggcccctgtaagatatgcctgtgagctagcctgtggtgcattttcttgattgatgattgatgtggaagggcccagcccactgtaagtgatgtcatccacaggcaggtggccctagatggtcagagaaagaaggctgagtaagtcacgccagtcagcagccctcctcggtggcctctgcaccagctcctgcccccaggttcctgccttgagttcctgagctgagtgcctcacttccttccatgatagacggcgatatgtctgtcctgggagggctggctgggatgggcctcagttggtccagtgctggcgtagcaggcatgaagctctgggcttggtccccgcactgcgtccgctggggccgcatggtgaggtggtgcttgcaggtgatcccagtactctgagtcaaaggaaggaaggaagcacagaagttcaagctcatccgtggcaagttcctaagttggaggccaacctgggctcctgtctctgaaaaccaaacaaagaacccacttgctgcaatggtcctaaaatggagccctttcagcacagcccttctcactgcgctggacagttggcttcctgcctaagaacaagcccctgtctccaccgaagctcgagctgggcctggggagatgcggctcggctcggggctgcaggatctggccgggccattagctcttcccttgggattttctttaaaatcattccaggaaataaactggctgtaaagccacccccgggtgagtgtcccagcaggcaggtctggagccagggccacctctgggcacatctgggccctattagtggcctggcaactgctcagaggtatcccctagactgggatgtgtgggtcccagcaggcagggatctggggcaacctttttttttttttctcttgcttttcaatggtcagtttcacaaatgtgataggaatttatgtcctcaataaaaaacaaaacaaaacaaaataaaaaatctggtgctttagggatggctcagcagttaagagcattagctactcttacagaggattcaggtccgattcccagcatccacagggcagcttacaactgtccgtaactacagttccaggggatccaatgctcttttctgaactctgcaggccccaagcatgtacatggtacatgtacatatgtaccggcgaaaatattcatgcccataagatgtgaactgggaagggggagggggagggctgggaggggacgacatgagcatcaggtgacccacgccatcagctgacccacgccatcactgctttcctggagctttaggtccccagactccaggtcttgaagaacttcatttacattttctcaataaaaaagcaaacgaggctgggatgtggcttaggatgtgtctgcctgcctatcgagcacacagggctcggaaccaccccagagacacccaagcgtggtgtaattcctgtacttcagaggtggaggcagggggatcagaggttcaaggttatccttgactacttaaggagtgtgaggctatcctgggctacatgagactttcaataggaaaaaacaaaacaaaacaaaaaaacagcggtgatacataaccaatgtatcagtttcaggggtgcacacagagagaagccgtcagtggatctctgagacttcgaggccaagctgatctgtgtagtgagttccagaccagcaagagctacatagtgagagtgactttgtctcaaaaaaataaatgaattagctgggcacggtgatatacacctttattcccgacacgtggtataggcaggtggatctgtatgccaagcaggctacacagtgagaccttgccttgacaatcaaccaatcgatcaaacaggcttgagccacggctcactgatagaacccttgcccaccctacacaaggccctgggttttgaccccactgtggcaaaaccaaactagaaccaaatctccagttcttcttgtcccatggggcctgtgtagccctgtcacctccgctcgctctccctgttcttttcagctactccaggtgagcttacgccctgttctcttcagcaggaacactccgtccagggggccacagggtcacctcccaccatccctctcctctttgtcccacagtccttcctgccttgttttgcccttgctactaacgtctgataaaacacatatctccgtgtccacctgtcccccttcacaggtccactgttggccctcttctttccagagcatcaactccacccagggggagctgcagtctgttctctgtcttgcctgttgccactctgtcaaacactgagatcagtgcagcagacattcacaactgacctagggactagcctgggcacagagagggtgagtgacttaccccgagtaagtcagtagaagcagttgaagccctgagatttgaaccctcagctcttgtattactgtttgccctttggttcgttttacttctgagtgtcttaaatgacaaccaattcaacttgtgtctttcacacacttgagctacaggcccagccttttgccgtggtagccagagtcatgagtgctggagagtgagtaaggacatcgcagacctgtgggctaagggggatcctgtgaccgttgtagatcagaaggttccagaccacaacgtgtggctgacaaaccccccaatctggactcctcttctgcttgctcacatggggtttgtgtatctctggcctttccacggtttctctgaaaacgctgtgctgtgacctgggcagcttgaagcagtgagatttcatcactgaccagaaacccaaaggaagtggatcctcagggtaaaggctccgaggcccaggggaaaagcctgcctggagtctttgttccaggatgcgcctcctttggggtcctgttaaactcagagctgttctgccataagctatgtttggctccgtcacatctgcaaagagcctgttgcaaatgaaattgtgtttatgaatcctgtgcttagaacttgaacttgtctttatgggggtagacgtagaggatactgggaatggaacccaggaccttgcatgctgggtaagtgctctaccactgaactacacccagctccattcgtgtgtgtgtgtgtgtgtgtgtgtgtgtgtgtgtgtgcgcgcgcacgcacgcgagcgtgtgcaggcctctgggggggatgtcttgactgttaattgtaagagggtccagcccactgtaggaggtaccattctataggcaggtagtcctcagctgtataagaaagctagctggatagagccagcaaacattgttcctccatggtttttaagtcagagtgcaacagaatgtgaagttagaacataggctctttatgtagatttggctggcctggaactcactaggtaagaccagattggccccaaacttacaagcgaccttctggctctgccacccagacgctgggatcataggtgcatgtcaccacccccagcttctcaggttatctttttgtcttgctttaaatttttaaaacttttacttgtattatggtggaagggggcccatgagtagaggtcagaggtcacaggacaatgccacaaagttagctctcctctttcaccttgacgacagttaggctagccagctcgtgtcgtgcgtgcagcaaactcttttacccactgagcaatcttgccgcttccccagcccttcccttttttttttttttttttttttgaggcaaggtctcctcagtcaaccttgaactgagtaggtgaggatggccttgaacctggatctttctggttcaacctcgtgtgtgctggggttatggcctggacccactgcctctgtcttaaaagtcaaccagttgccaacaattggacgggtctctttaaagtattcgtgaccttttgtaggtttgtttttttgtttttgtttttgttttttttaaagatttattttagtttgtatgtataggtgttctacgtgcatgcatgtctgtgtactacatataagcccagtgcccagtggaggtcagaagaggtctgggatccccagaacctggagttcgaggtgcttgtgagccaccatgtgggtgctgggaagcggagctggttctctgaaagagcgacaagtgctcttaaccactgagccacctttccagccccaccatgcgattttgactatttatacaccaaaccctgtgagaggtcagtcagccagcctggagaaggaaggagggtggggagaagacggagtgagtcagatcttgctgtgtaactcctaggagagagcagccttaagcaaaactcagctaaccctggcctctggggtcacagggtgagcaggcaccggggtgtggatgagtaaggtttgctgtgactagacacaggaccttgcaggtggaagtatgaccttgtcctggggtgcacagggagccacgggagggtacaactgagggaggggtgagtgtttgcactcttgagggagatcctatgcacaggctgtggggtacaagcctgggctgccaggtcagctcttgaggaggtggtcgcagcctgcatcttggcaccaggatgtttagacccaagtgatgaaaggcagaagggtgagacctgatctacatctcagccagagaagagagcaagcactcaggatcctgggtggtctattcctgtaatcccagcatctgggagactgacgcaagagactctctagttcaagtcctgcctgtgccacggagtgagtttaaggctagcctggatgacaagagacccagtctttaaagcaaaacaaaaggggcaagagagatggttcagcagttgagagcactggctgaggaccagtgctcttccagaagacccgggttcaaatcccagcatccatatggcagctcacaactatctgtaactcctgttccaggggatctgacgccatcgcacagacatccttgaagtcaaaacaccaatgtacattaaatcaatgataaataaataaatacaaacaagaaaaacaaactccatcaggcaacaacactaatacaaatcaaatagtattgtgaacagatgatcacctgtcttcaagagattgccagtggccctcagcaaaaaggggcatgactccagactggctggattcagcagtcagttcagcatcatggctgatctgtttgctgtgtgagccacagcaagtggcataacctctctcaagcgtcagcttcctccttcccaggcggttgcaggtgtgggcctgcctcaggcagagctgctaccgtgcccatttcacggacccactgagccttcccactgctgcccagagggtagcccgtgtctcacactctgcttgttttgcacaggctggagcctgagcctgcctgctccctctccaaggcctgtactggcatggagacccccagggttctacagctcagctctggtcaaaagaaaagcatcaatgtggatagaaatgacaatagcaaggagaaatgaaacccatgtcactcggggactgctcaggaggggatcccccaaggaaacccaccattacccgaggaaatagcccaggctgggcagggggctttcctgggccctcgatcctgttttgaggggtgaagcagctttgtctccaaggctaacaaccttagttccaccccagggatgtaaaagcaaactttgggggatttttttgtttatttgtttttgcttttgttttgttttgttttgtttttcttttcttcaaaacagggtttgtgtgtgtagctctggctatcctggaactcactctgcagaccaggctggcctcaaactcatagagatctgcctgcctctgctctgcctcctgggtgctgggattaaaggtatataccactgtacctggctgggtgtaaaataataataataatataataatatttaatttaatttttaatttaaatactttaatgtataagttctatatagtatatatatataacagatgacataacatataacatgtaaataaaataataaattatttaatttagaatatattgcatatgaacaagaacagaggaagaaaagctgtgacctggagcaagcactcaactgacatcctccctaccccgggaattccccattaactcagtgcttggtgaacactttctgacaggaagagagaagggaagatgggaccgtcgccatggtaatcctgaagtgaagtggaggtgacagagagggagaagacccattctgtgggtgcttttgtttgatctgtgcaatcagtgtgtttctctgtgcatgccagtaaccatgcacctggaggccagaggtgtctccctcagtcgcctcccacctgatttttttgaggcagggtctctcagtgaatctggagcccctgattcagtcagactagctggccagggggcctcctcaaggctgggattacagacatccctgctacatctggcttttttttttatgtgagtgggtttgggggaagcaactcaggttatcattttgaggcaa

SEQ ID NO: 734 - DNA, 1540 bp, Mus musculus
tcgctctggccaacatgccgcgctccttcctggtcaggaagccgtccgacccccgccggaagcccaactatagcgagctgcaggacgcgtgtgtggagttcaccttccagcagccctacgaccaggcccacctgctggccgccatccctccgcccgaggtcctcaaccccgccgcttcgctgcccaccctcatctgggactctctcctggtaccccaagtgcggccggttgcctgggccaccctcccgctgcgggagagccccaaggccgtagagctgacctcgctgtccgatgaggacagtggcaaaagctcccagccgcccagcccgccctcgccggcgccgtcgtccttctcgtccacctcggcctcgtccctggaggccgaggccttcatcgccttccctggcttgggccaacttcccaagcagctggccaggctctcggtggccaaggacccccagtcgcggaagatcttcaactgcaaatattgtaacaaggagtacctcagcctgggcgctctgaagatgcacatccgaagccacacgctgccttgtgtctgcacgacctgtggaaaggccttctctaggccctggctgcttcagggccacgtccgcacccacactggtgagaagccattctcctgctcccactgcaaccgtgcttttgctgaccgctccaacctgcgtgcccacctccaaacccactcggatgtgaagagataccagtgccaggcctgtgcccgaaccttctcccgcatgtccttgctccacaagcaccaagagtctggctgctccggaggccctcgctgaccctgctacctccccatcctcgctggcatcttcccggagctcaccctcctcctcactgccaggactccttccagccttggtccggggacctgtggcgtccatgtctggacctggttcctgcttggctctcttggtggcctttgccgcaggtggctgatggagtgcctttgtacccgcccagagcctcctacccctcagtattcatgaggtgtagcctctggacacagctgcttcgagccatagaactaaagccaacccactggctgggaagcttgaaccccgctcaggggaccccacttccctacctccctcaaggacccttcaggccaccttctttgaggtacaacagactatgcaatagttcccctcccccccaccccgtccagctgtaaccatgcctcagcagggtggttactggacacatgtccaggtgcccctgggcctgggcaactgtttcagcccccgcccccatttgtcctggtgacacctgtttcacagcagtttaactgtctcagaagggaccatgaataatggccatcacttgttaggggccaagtggggtgcttcagcctggccaatgtgtctcccagaactattttggggcccaacaggtggccccgggagaaagatgtttacattttaaaggtatttatattgtaagcagcattttgtatagttaatatgtacagtttattgatattcaataaaatggttaatttatatactaaaaa

SEQ ID NO: 735 - protein, 266 aa, Mus musculus
ANMPRSFLVRKPSDPRRKPNYSELQDACVEFTFQQPYDQAHLLAAIPPPEVLNPAASLPTLIWDSLLVPQVRPVAWATLPLRESPKAVELTSLSDEDSGKSSQPPSPPSPAPSSFSSTSASSLEAEAFIAFPGLGQLPKQLARLSVAKDPQSRKIFNCKYCNKEYLSLGALKMHIRSHTLPCVCTTCGKAFSRPWLLQGHVRTHTGEKPFSCSHCNRAFADRSNLRAHLQTHSDVKRYQCQACARTFSRMSLLHKHQESGCSGGPR

SEQ ID NO: 736 - DNA, 25899 bp, Homo sapiens
ccagaccctgttcttggtgctcaggtcatagtagcagacaagacaaagttcctgcctgtgtggagctgtctagagcagaaagtgaatgtttaggttttgcagacttaaatagcaaggatgttatgtcagtactcatataacaagagaaaacaaattcccacaaaatttttatggacaatatttaaattataataatatttgagtacaattttgtttttcatttttttaatttaatttttttttgaggcagggtctctcattgtcacccaggctggagtgcagtggtgcagtattggctcactgcagcctcgatttcccaggttcaagcaatcctcccacctcagcctcctgagtagctgggactataggtacacaccactacacctggctaatttttgtatttattttttggtaaagtcagggttttgccatgttggccaggctggtctcaaacttctgaactcaagcgatccacccttcttggcctcccaaagtgctgggattacaggcgtgagccaccgtgcccagcctgtctgtttttaaaatataaataatagagatagggtcttgatacattgtccaggctggtctggaactcctggactcaactgatcctcccgccttggcctcccaaagtgctgggattacaggtgagaggcactgggcccagccagttttttttgtaagcatgaattattattattattattattaattcaagacagaatctctgttgtccaggctggagttcgatggcacaatcaccgctcacagcacccttgacctcctgggctcaagtgatcctcccacctcagcctcccaagtagctgggactacaggcacatgccaccatgcctggctaagttttgtactttttgtaaagatgaggttttgccattttacctgggctggtctcgaattcctgggctcaaacaatccgcccgcctcaccttccaaagtgctgggactgccggcatgaaccatgaggtccagcaagcatggaattttgaaggttcacatattgccttaattgaggttccaagtaactgttatctaccattaaatcggttgcagtgttcatctgtagaagctactcttagctcaaggaccatacaagaaacaaaccttggtcagatttggcctgagggctgtagtttggcaacctccagtctaaagggaaatcaacaaaatcagtgaaacatacaccatgccagattatgagcgaagtggagaaaaactaagcagcaagaggggaaggcgtgccagagggaaagggaggagagggggatgaagtggtggcctgggaggctttgctgcgatggggggtgagccctgtggctatatgggagaagagctgggaggagacagggaacaccagatgcaaggtccccaaagcaggagcatggctgatgtggtttgccctgcagccggagccttgtgggcgatagtgagtatgggggctagggtggggagctcaaggggccacagggggccaatcctgtagggccttgttgtgggccatagtgaaggctctggattttcctacaagagagctgggaccagggagggtttatgtacccacagaacagcatcgacatttttttttttttttttagatggagtcttcctctgtcccccaggctggatggagtgcagtggcacgatcttggctcactgcaacctccgcctcctgggttcaagcaattcttctgcctcagcctcccaagtaactgggattacaggtgcctgctgccatgcccagctaattttttgtatttttagtggacatgaggtttcaccatgttggccaggctggtctcgaactcctgacctcaagtgatccacccactttggcctcccaaagtactgggattacaggtgtgagccaccgcacctggccgagcatcaacataattttttttcttttttttttgagacggagttttgctcttgttgcccaagctggaatgcaatggcacaatcttggctcactgcaacctctgcctcctgggttcaagtgattcttctgcctcagcctcccaagtagctgggattacaggcatgcaccaccatgcccagctaattttgtatttctagtagagacagggtttctccatgttggtcaggctggtctcgaactccgacctcaggtgatccatccacctcggcctcccaaaatgcagggattacaggcatgagccaccatgcctggccaggcgtgaacattttaacagtcgtgaaagattccattgatgcgcctgttttacactcaacagttcctctatcatggacgactttttttttttttttgagacggagtcttgctctgtcgcccaggctggagtgcagtggcgtgatctcagctcactgcaagctctgcctgttgggttcatgccattctcctgcctcagcctcccgagtagctgggactacaggcgcctgccaccatgcccggctaattttttgaatttttagtagagatggggtttcaccgtgttagccaggatggtcttgatctcccgacctcgtgatccgcccgccttggcctcccaaagtgctgggattacaggcgtgagccactgcgcctggccgtatggacgacttttgctaccctattaaaaattaatccaattgtccagattcgtggctcacacccgaattccaatactttgggaggccgaggagggaggattgcttgagcctaggagttcgagaccagcctgggcaacatagcgagacccagtctctaaaataataataataataatgccgataatacttgtaaatgataaaaaataaaatcaagacatgggaaaggatatttagtaaagaatcttccttccacccctgctgacagctaccagcttctcctcagagacaggcacattaccctctctccagagatggtttaatgtcctaagaaatacctgtataatggtgttttgcaccttgctttttttttttttttttttttttgagacagagtcttactctgttgcccaggctggagtgcagtggtacaatctcggattactgcaacctccacctcacaggttcaagccatgctgcctcagcctcccaagtagctgggattacaggcgcacaccaccgtgcccaggtaatttttttatttttagtagtgacggggttttgccatgttggccaggctggtcttgaatgcctgacctcaggtgctccacttgcctcatcctcccaaagtgctgggattacgggcgtgagccaccgagcccggcttgcaccttgctttttagcacttaatatcttgatatgatttcattacatccagagctttttccttcttttcggggcagatgggtaatgtattcattggtccccgcatggcctcggcctgtatgcaggagcctagaatacaactttgggatgctatagggacatccctgaggtgagcctcctacaacgagcctggcacccagcaggtgctcagtaaataggaatgaaaaggctagctgtaatactagtactttgggaggattaggtgggaggtttgcttgagcccaggagtttgagactagcccgggcaacatagtgagacccccatctctaatttttaaaattataaaaaataaataccattttacaaaggcttgtatagcttatcttggagcctccccccatgggtcatgcccaacggacttagaccttgacccagaaacctcccttagaagcaatttgtattctgaaatggtgacttcacagagggcttattggataaggcccacggctgaatcactgtttgtttttaggcaagtgtgaggcataggaagaggttaaatccaggatgaggatggcagtagagcattgactcattcattgaactttctgtagacaatgtctttctcctggtcaagattaactttccaactcctgatcaattcattcactgataatgagctaatcaacaggggccaccagtctaataaagagctcttagaaattaagaagttcattcactggaaggacatgcaggattttaaaaaaggaaagaaatcaagttcatcaatttggtgaccaaaggacatgaagcaatagttcagagcacagagaaacagaaatggctttggtgtatgtaaaaaatgctccacactgccgggcgtggtggctcacggctgagtgcggtggctcatgcctgtaatcccagcactttgggaggccgaggcaggtggatcacctgaggttggcagtttgagaccagcctgaccaatatggagaaacctcagctctactaaaaatacaaaattaggtgggtgtggtggcacatgcctgtaatcccagctacatgggagggtgaggcaggagaatcacttgaacgtgggaggcggaggttgtggtgagccgagatcacaccattgcactccagcctgggcaacaacagtgaaactctgtcgcaaaaaaaaaaaaaaatgctccaccctagtcatgtgaaatgcaaatgacaacaggagatcccattttcccttatcagacaggcaaagataaaaaagttaaaggccagcaaggtggctcatgactgtaatcccagtactttgggaggccgaggcaggtgaatcacttaagccaaggagtttgagaccagcctagacaacatggcaaaacctcggctctacaaaaaaaaaaaaaaaaaaaaagcaaaagacaattagccagatgtgatgcctcgcacctatagtcccagctactctggaggctgaggtgggaggatcacttgagcctgggaggcggtggttgcagtgagcagggattatgccatggcactccagcctgggtgacagagtgagactgtctcaaaaaataaaaaatagacagggtcaggtgtggtggctcatgcctgtagccctgtagtcctagctgctcaggaggctgaggtaggagaatcacttgagcccaggagatggaggctgcagtgagttatgatcatgccactgcactccagcctgggcaacatagcgagaccctgtctcaaaaaagaaaaacaaaaagacaatactctgtgttgggcaacttttgaaaaggggccctcaactccctgctagtgggagtatagttcagtttcatctttttggatggcatttggacaaatgtatcaacattttatataacataccatttgatgtgaagtgcaatgatgtgtgtagagggcattcattgaaattgccacattatttgtagtagccaataaattgcaatctaacctaaatgcccatcatgagtcttcgtgttaggtaaattgtgtgattgtgctataatccatacaatgaatagtccgcatccctgcagaaaactaagggagctgcgtgtaatgatatggaatgattttcaaaacactgaatattgttatagcattacccatgtgatgacgattcaaaacaaaaaaatgttactatagcaaggtgtaggttagtgtggaggttcctatttgtaatacataaagggctgtacatatatacatatatatatatatatatatatatatatatatatatatatatagttaaagacaggatctcactctgttgcccaagctggagtgcagtggtatgatcttggctcatggacgcctctacctcccaggctcaagtgatcctcccacctcagcctcccgagtagctgggacaacaggcatgtaacctgcctattttttgttttgttttgttttgtttttttgagacagggtcttgctatattgcccgggcttgtctcaaacttctgggctcaagcgatcctcccaccttgaactcccaaagctctgggattacaggtgtgagccaccacgcactgcccatgcacatattaatatatacataggccatccctggaaggtcatacaagacactggtttaaaaaaaaaaaaaggttgctttggggagggaaaaggaggtctggaatggagggagactcttcttttagttgggtaactgtaaatcacattatttagctactggttttacttctagtgggagattggcacctgcagaaaatgcaggtgtctattcaaatgtaccttccttccagaagcctttcgtgagcacactaggtattcccagattgccctcccggcagttataccagccttcacctccctgaaaagcacgtgccccctgcaacccgcgacgattgcagggaggcgccttggccagcagagggcgccagaggaccgcgccccaggcctggggcgggaccccctcgtgcggggagctggggagggcctggccctgccgggtcccaggccacctgggccgcagatgtcgcccatttccgggaggacctgaccccacagtatcaaaagtgtcacctcaccttcccctgcaaagggagctgggtctgcggccgagaggcctggcccgaagcctcctctcacctcgtggtctccgccgcctgcaggagggagtggagcgagggcgggcctggagggggtggcggggacaattcgatccgatctgagcaaggcccctcccctctgcgttgcctcccacccccatgccccgcgcaggtgcctgaccactgaaggaaagtggaaagcgggaggcccaggcagtggctgcctgcaagtacttgattgagcccccattatgtgctttgaagaaaacagaataagacaatgagagagaaaggtgggctgggcgcggtggctcactcctgtaatcccaccaagttgggaggctaaagtgggaggatcaattgagccgcagagtttgagaccagcctgggcaacatagtgggaccccatttctacaaaaaataaattagccaggcatggtagcgcgtctcagtgaaaaaagggggaaaaaaagaaaaaagaaggtgggtgctggggcaagggtgggtcctactttggctagggtgatcagggaaggctcccctgaggaagtgacttacattttttgtgttaaatatattattcatacctaaaagtgtttaaattgtctctgtacactaccatgtcatgaagatacggtaaaataaatagtccatgtacagtagaaagactaacaataaagatccctccctgcctaggaaacagatcattaccaaaattctagaagcttcatgtgcagcctgttcttgcctcccctcctcaccagccactcttcagaattttgtatcaaacatctccttgcagccggcatagtggctcacccctgtaatcccagcactttggcaggctgagctcaggagttccaggcggcagtgagccgtgattgtgccactgcactccagcctgggtgacagagcaagaccccgtctcaaaaacaaaacaaaaaaccacttccttgcttttctttctaattctacaacccccacatacatccctaaataatatagggtttcatttgcctgcttcagaacctcgtataaatccaaataactatgcatttgtttgtgacctctgctcgacattgtgtttttgagattcatccctgttgctgcatggagttgtagttcatttttattgctgtatagtattctattacaggattgcaccagggttcattaatccagtctactgtttataaacatttgtgttgtatccagttttgttttagtttttgctttttttgctattaggaacgagggtacaatgaatatccttttttgttttttcggggtttgggctggacaacagttctttactttgcttggttgctcattataatccccaggggagttttttaaaatgctgatgccagaggccccacccagactaattaaatcaagatgtgggtgggggtggggtgggccgaggcttaggtgttttaatccttccctgtggggatctaatgtgctgccagagctgagaacccctgggatgcagttggtttgaggacagacttgtcagctgcagcccctgggatgcagttggcttgaggacagacagggagaggagtcacctgttgctagctgatgccaaacttttccaaagtgactatgcccaccgaccctctcgccagctctcacctcctcatcaactcttgatagtgaccaaatttttccttgttgtccttctgatgggcgtgaaatggcagctcactgtggcttgaatttgccatttctctcttcactaaacgaggctgagcagttagtgaagttgctgctgaaacaaagaatgaaaggaagccagcgtgaagatctaggagcaagagacgtaggggagaggaggaagagcagcaggtgccaaggtgggaaaggtctgggatgttggaggaacagaaggaaggctgggggtgggatccttgtgcatgggggagggagagaggctcaagccaatgtcagctggggtcagagcagcggggccgagttggctgaggagaggactttggcttttactctgagacaggcgcatgggagggtttgagcagaggagggggtgatctggcctcactttggcttcaagcaaaggatcctgattggagctaaattgacacgggacggggagtattccgcttaatgactgcttactgcctctgtcccccaccctactgcccgctctccagctagaaccaggggaggacgattttgttcacggctgtcacacccggcaccaagtgactaaacagacagtagttctgcccttcaggttggtggtggtggtggtgtggggtgcttataggtttttatagtcttccttcacaggtggaaacaagaacggtgagacctgtgaggtttatttcagagccacccccgggcctggtacgcctcccagggaagctggggtgggggtgcagctgcccctcacttgggcccaccccacatgcattcagtcagggcccctatggagccgtgttacagcctttagacacaggatcgaggatcttcacggggtgaggagacacgcccggcccatgccttctttctcccaccagcctacagggatctttttcaacgaaactctaaccaggtccctcctcagctgaaaatccttcggtggctccccagtgcccttgaggcaaagtccaaactcctacgaggccctggggcccagcacatctgacccctccgggcatgcccatcccaccccatccctggaagctgctctctaggagttactctgaagcagttgccacttcttccctcgggccttttcccttgataattcttcacttcctctgggaagtcaccccgaccccctgtcaggtgacccgcctcttaacggtcgccgcgtcccgtctctcccccaccaaagcacacttccctttgcattgtaattatctgtttacttcgtctgtctccctcactggaccagaagctacccttcgggagaggctctgagtgttctgtccggggctgtgccctggccccaggtacagtgccccacacgtgctgggcgctccgtaaacactggataagggaaggaacgggtgctcttggctagctgggccaggctgctttgcaaaaaggccgtggcatttcaagccgccgagagccacgtgcggtgtccctttcctcgcttcctccccagtgatgtgcgtttccctcgtcaatgccacgctctccaggcgccagccgggcggaggaaatttccgccccctcccaagcccgaggcgggggcgggcgtcggaaggtcaggtgtcccggccggcgcgcagcgccagggggcgtcagaagcgctcagaccaccgggcgctgagccggtgggcgcgcggcgtcctgccggggtcccacctcgcagaggcctcgcttcgctcgacgtcccgccccggacagccccagcaccggggacgacccgcgctgcgccagcgaaccccgcctcggaggagtccccgcccgggctctcaccgccacgcggcgcgagcccggccagcagccggcgcacctgctcggggagtggccttcggcggagacgagcctccgattggcgcggaggtgacaaaggggcgtggcagataaggccccgcccctcccaccccccaccaccccccggagtacttaagggagttggcggcgctgctgcattcattgcgccgcggcacggcctagcgagtggttcttctgcgctactgctgcgcgaatcggcgaccccagtgcctcgaccactatgccgcgctctttcctcgtcaggaagccctccgaccccaatcggaagcctaactacagcgagctgcaggactctaatccaggtgcgttggaggggttctgggctccaggaggtttgggggagacaggcgaaggctgcgtggggggcacctgagggaggcggcctgcctgagccaggatcgagtcacaggatgttttgtggaccattgcgggctcgggagaccgggcaagtgggtccccagttccggggatctgtctgggtggttgggggagtgccgtgtagagggcaggggtcttcagcttggggggcctttgtagccggcgagaggcggaggagctccgcaagaggggaaggagaggaggcctgtgtcaggagggccctctggacgctgctggggagagtccggagtccagagggttgaggggaggggtggggagacgagatgtgtgtgaggagggggattggggcagggtggtggctccggggctgggatgatggggttctggcctcaggctggagactggggacttaggagagggagatcaggaaatgacctccttcaactgggggtcctacgtgtgagagactcagattgggtgacctgggcgaggagggcaggaacctggtctgtcctgtggataatttttttgatctaattatgtattgagaatcggccccacccagcccctggccagcggtgggctcatgtttgttgattgagtgaatgatttaattaacgcctgactctgctttttctccctcagagtttaccttccagcagccctacgaccaggcccacctgctggcagccatcccacctccggagatcctcaaccccaccgcctcgctgccaatgctcatctgggactctgtcctggcgccccaagcccagccaattgcctgggcctcccttcggctccaggagagtcccagggtggcagagctgacctccctgtcagatgaggacagtgggaaaggctcccagccccccagcccaccctcaccggctccttcgtccttctcctctacttcagtctcttccttggaggccgaggcctatgctgccttcccaggcttgggccaagtgcccaagcagctggcccagctctctgaggccaaggatctccaggctcgaaaggccttcaactgcaaatactgcaacaaggaatacctcagcctgggtgccctcaagatgcacatccgaagccacacgctgccctgcgtctgcggaacctgcgggaaggccttctctaggccctggctgctacaaggccatgtccggacccacactggtacgtgcccctccaggcgcccccaccgttgctctctctggcagcttttgtgaatctgggcttgctgttctcattcccaaagctgtggacactgaggccccgagtcttctaacttctagctcaagttccagggcctggctctctggaaacgtttggcagaaactttcttcatcagctaagcagatgggcaaagcagacaccttcccaatcccctgcagcctgtttctcagccaaatgggtcggagctggatatgggaaaggtgcaaccaacaccttgctgtgggggccaggtgtgaaggggcccacccggccacaccctctcccgggtccgccccctccctagccagacaggatgttgtcagaccccccgcctggctctgaatccttctttgagaactttctcaaaacttaggctgatgtttctcttctgtgagcctcattttctctatctttcagatgggcatgagaacagcttttggggtttctatacaggctaaatgcaggaatgcatatgggaagcacctggcaaagtgccggtacctgctaaactctcacaaaaatggttccttggcatttgctctgcttccttgctgtgtgactttgggcaagcaacttaacctctctgagccttaggggaaaactatgatagcatatgttttagagagtggctgtaaaggtggctaatcactttatagtaatttattatacccgaacggttctcaggtcggcttccccacccccactgaatcctagcacacagaccaggaaacggcatctttggggcagaaaacacaatcacgtcttttgaaaatttactaaatgtgtaaaaaactttctggacatggagaaaaggtagaactttttagaacttgaatggtggcagccactgtgcctggagctgctctttggagagtgacagttgagggagaagattccacagggttcaagctggccaggttctgccatttcctggcctggcgcctgacctctgagcggtgagggttagtgaggtgtctgggaggactggcaattcgcgggctttattggcatcttattcgactaaggctacccatttctcttccttcgtgcaccaattgctctgattttaacatgtaaaggtccaactgcctggcctcctgggtgcctgcccagctcacagggctctattttgggacagttgaacccctcagggtgctgcagtcctgcctgcctctctcacctcccatctggacattattttaatgtaaaggcatggctgagacacagaaatccccttgaaatgtatcattgcggtcctcattgactcccattgtgtgccttaatggtgggcccagtgggtgggggctgggaggggtggagcaggtgcatggggcagcggtgcccagcacctgttccagtcacagctgctggcccactgcatggcaggcccctttaatccggggatatcgcatgtacagtgcccccctcggcgccctttgtccccgccggcctggtgccgatttcacacttgccaggagtaccatgaaggcgtctggggggcgagggatccaaggagtgggggtctgtgcctcctgcgtgtgcacacagcccccgcccccagcccatcatgtcctagaatgtctccttccccttttgtttgggttcaggtctcatcacactttgggcacttactgtacaggagggtagtgctcaggacttcaccaacagccctgggaagggaagggaggtgctgtcctaactctggtcttacaaatggactccagccccttttccagatctccagagtcagcccttagttcacaagggtgaacttacccttctcattcacatgaagacttagaatgcaatcaacaaacccttcaggcgtggcgtgtggaggctgctgagtaatggcagagtggagtagtgctcaggcacccctcccccaatcctctatgtcccccaccctttggagtggcgagtttccatttctgccccatgagactgagtccagctctcaggcgctccataagtccctattgaatgcatgggtcccattggagccatcctctggactctctcctaccctggtagctcagtgtggcaccctaggcacccaggaggtgatggaatgaattcactctcagctcttaaattccatccagcgctgggatttcacaggcgggccctgaccttgcgggcatatcagactgggcgtgaggggattggagaattgcatgttttttaaaaagactattcagtattatggaatagtgtctagcacttagtaggagctcagtagattaaaaaaaaaattatagacagggtcttgctttatcgcctaggcttgtctcaaactcctggcttcaagcaatcctgcctcactcggcctcccagagtgatgggattacaagcgtgagccaccacacccagcctcaatagatttttgtttaatgggttactgttatgaccttttatttggaaaatgctgcatcccccagaaaaaaacaaatcaacattattggtgtttttggaactatatagctttttggttggagcagggattgttatgaggcatgagtgagggggcagactcctctgaggcctctttaatttttaaaacagacttatttattctctaagggcttgttgaggatttactgggcacccagctccatgtgcaagacttttcccaacacagccttggccaggcagatggtgtgtcagggccacaggtttccgtagcctcttgggtgatagaaaggggcccaggccctgggctggggctcagaagggactcaaaggaggcccttgcccttatgggactcagcctgattggagaacagacaaggagatttgggattacagcgcaggaggtggggtggtgaggaaagcaggctgctggccgggccccaggagtggcctaaccagcttggaggtgggggtggggaagcctcttaaggctgactctggctttggcccccaacagagtaaatcaaggaatgactccaggactgatggtaaggacaccagtcacgtcctcccttgactgaaggcagtaagggcagtaggtgaaatcagaggctttggggtcctgccaggggaacctgaacatgctacttctgggcctcagtttcactgtctctgaaatgagaccacagtaggatcaagtgacagtaggatgaatcagtaaaggtgttgagtcattgttgaccacttcgcacgtccctgcgggatgtggatgagtaccctaccttctgtcacttatcaacccctatgagtggggggtgaatagccccattttacaggtgggaaaatggaggctcagagaagccagacaacttgctcagagttgcacagtgggaagcagcagagctccgtcaggtcccggcctttggaccctggctgtgtgtttgacggaggcctggctttcctgggatcatgggattctttcagggtttggggtatgcggggagggattcccatcactgccagccgttgtcccacggctcactcggcctttctggcgttctctccccaggcgagaagcccttctcctgtccccactgcagccgtgccttcgctgaccgctccaacctgcgggcccacctccagacccactcagatgtcaagaagtaccagtgccaggcgtgtgctcggaccttctcccgaatgtccctgctccacaagcaccaagagtccggctgctcaggatgtccccgctgaccctcgaggctccctcttcctctccatacctgcccctgcctgacagccttccccagctccagcaggaaggaccccacatccttctcactgccatggaattccctcctgagtgccccacttctggccacatcagccccacaggactttgatgaagaccattttctggttctgtgtcctctgcctgggctctggaagaggccttcccgtggccatttctgtggagggagggcagctggcccccagccctgggggattcctgagctggcctgtctgcgtgggtttttgtatccagagctgtttggatacagctgctttgagctacaggacaaaggctgacagactcactgggaagctcccaccccactcaggggaccccactcccctcacacacccccccccacaaggaaccctcaggccaccctccacgaggtgtgactaactatgcaataatccacccccaggtgcagccccagggcctgcggaggcggtggcagactagagtctgagatgccccgagcccaggcagctatttcagcctcctgtttggtggggtggcacctgtttcccgggcaatttaacaatgtctgaaaagggactgtgagtaatggctgtcacttgtcgggggcccaagtggggtgctctggtctgaccgatgtgtctcccagaactattctgggggcccgacaggtgggcctgggaggaagatgtttacatttttaaaggtacactggtatttatatttcaaacattttgtatcaaggaaacgttttgtatagttatatgtacagtttattgatattcaataaagcagttaatttatatattaaaaagtctttggtgtcatagaggagtgggtattttgaaaggtctttggtaagggaggaggggacaggaattcctgaagcttagatatttctgacacagccttaaatcttgtccttggaaacatcatagggctttggagtcctgggtgtcactgtcagggaccttatgagactgggttttcccgttggcctgggtgtcctgtctgctgctgtttgggtgagccagcggcatccatacgagctcttcactatacactgtggctttttactttctcgttcttgaattttgaagttgatctggcccacggagtgcaaagctggcttcctgggtcttatcaactagacaggctgcaaagctctgccccagcactgcaggtcttttggggtgggattgtccgcttcccccagatgcgagtggaatgcgaccaaggagacagaggatgtccttcctgtttccaagggctccaggcccccttgggcctccttgtcagtcccacacctccgtcttgctgctgggtaccaaatggcctttgatgcgaggaaattggctggctggagccagtagggtgagaagccaggccaaagggtaggggtcactcagcttcctgctccgaggacggcgggacggtcagcatgcgtcttgggctagggtaattcattccccgccagccgatggtggtgacctcaccactgggggcctcttggggccaggagaaaatgagtgtcctttttgaacacaaaaggtgctggaggtgccagtttcctgtgaggagctgaggcgtcccagagcttcggagccccagagtcaggctgggggtggggggagcttcatgttccaaaggagagatgattctttcttctaaacaggaaatggtgacccgcaggccgggagcagcccttaatgacttgcagctttcctcccaaaaggaaaaaaaaaaacgttctctaacaatcgccaaattgtggcctgcctccctgaagggaagttagggagttggggggatgggggttgggcatccatgagctgaaggcctactgtgtcctgggtccctgcgggtccctctaggtcgtctccatccacccacagtaggtgctgaatgaatgatttcatgacttcacataatccctgggggtcgggcctccggaaaatgaggcacagaggtgggcttgcctgaggtcaccaagcccggcccctcaggtcatcctgggagttcggtaggctgggctcatgccgctgactctcagggcacctggagcaaggctctctccctctgggggccccagtttctgtgtctataaaacagggtgacagtagtgccttcctctcggagactgtacagaggcattcattcattcaggggtttcgagggtaccatatgtgccaggccctggggttacacccgtgaacaagacaggccatccctgcgttcatgggacgtatgttctggtcggggagagagaaagcaaacaagtgattaaataaacaagccgcttttctacagtgatggtgccaggacagaatgaaagggtgccaggcactagagaacaacggggtggggctccccaggccaaggcagtgagagccctggaagagctgaattccagcccggacctgaaggaggagaaagatgccggcagggaaggatctgggggagggaatagcaagcctgctggaatgtgctgcccccatgagaaagaccaggatggcggagggactgggaagacagggtgggagaggagagtgggcccagctctgcagagcttgtggtgctaagcaggtgggaattttgtctaagcccctagggcagccactggggctgtaaagcaggagagtgctgaggcctgctgttacctttcctacaaagatctccctggctgcttgggagaatggatctcaggggtccaggaggagaaagacaaaggcagggagaccatgagaaagccagagggggccaggcaccctggctcatgcctgtaatcccagcaatttgggaggcttagacaggcagatcacctgaggctaggagttcgacaccagcctggctaacatggcaaaaccccgtctctactaaaataaaaaattacccgggcatggtggggcatatgcctgtagtcccagctacttgggaagctgaggcaggagaatcgcttgaggtcgggagctgagatctcgccactgcactccagcctgggtcacagaacgagaccttgtctcaaacaaacaaacaaacaaaaaagggccagaggggagagagggaaggaaaggagggaggatggtggcctggctcagggtgttggtggccttggagatgaagcctgtatttaagaaacttgtggcagttgtggccacccagcccatggcccagcacacctgagccctagtgggtgacagttatttagtattattatctggggaactgggcatggtggttcacatctgtgtagtcctagctatttagaggctgaagtgtgagggttgctggagcccaggagtccaaggccagcctggacaacacatcgagacattgtctctacaaaaagatttaaaaattggccgggcgaggtggctcacgcctgtaatcccagaactttgggaggccaaggtggggcagatcacttgaggccaggagttcgagaccagcctggccaacatggtgaaaccccgtctctactaaaaatacaaaaattagctgggtgtggtgtcatatgcctgtaatcccagctacttgagaggctgagcacgagaatcccttgaactcgggaggcagaggttgcagtaagccgaggtcgtgccactgcactccagcctgggctacagagtgacactctgtctcaaaaaaaaaaaaaaaaaaaaaaaaaaaaaaaaaaaagtccgggcttggtggagcacaccaccaaggggatgttggatctagtgggggtagatactatgaagctgagaaaagaatggggaaagcctctatattctgatcctgagcaaaccccaaagcactaagtgaaaaagaaatcaccggcagatgtgctcccttctgtgggcagaagagggatgaaaatcatcaacacgtgattcattcttgtttgtatttgcatacggagactctggaggttaggacaatatactaacaaaagtggttccctggtgggttgcaggaggtgggattggggtggacaaggactggagggagggaagaagggagccattttttaaagatttttaagacgttttactttgaaataattgcagcctgacagaaattgcaagaaacagtaaactggaatcgtacattcagattcttcaatacgttaacgttttatcatggatacatcttccctctcttcctagacatacacacacattatttagttctgaaccatttgaattttttttttttttcagatggagtctcgctgtgtcacccaggctgggatgcaatggcgtgatctcggctcactgcgacatctgcctcctgggttgaagcgattcttgtgcctcagcctccccagtggctggaattacaggcatgtgccaccatgctcagctaatttttgtatttttagtagagacggggtttcaccatattggccaggctggtctcgaacttatggcctcaagtgatctgcccgcctcagcctcccaaagtgccgggattacaggtgtgagccacggcgcccggcctgaaccatatgagagtaagttatagacacagtgcccctttactgctaaatatttaagctatgtgtcctaaggataaggacattctcccatagtttcatgatcaaaattaggaaatttaacattggtgcaatgctactctgtaatccatagtcataatcacatttctgcaagtgccccaatgatgtctttcacagcattttggggggtgtagctggtggggaatgaccaggatgcaatgcaaggatcacacactgcattcacttgtcctcactcttttatttatttatttaaaattttttttctaacagagacaaggtctcactctgttgcccaggctggtctcgaactcttgtgggttcaagcaatctgcccgcctcagcctcccaaagtgctgggattacagacatgcccagctacttgtcctgactcttttttttttttttttttttttttttttgagacagagtttctctcttgttgcccaggctggagtgcaatggcatgatctcggctcactgcaccctccacctcccgggttcaagtgattctcctgcctcagcctcctgagtagctgggattacaggcatgagccaccacgcccggctaattttgtatttttagtagagatggggtttctccatgttagtcaggctggtctcgaactcccaacctcaggtgatccacccgcctcggcctcccaaagtgctgggattaacaggcgtgagccaccgctcacttaatctcttttttcccaaggcagctcctcagcctttctttgtctttcacaacattgacgttttttgaagagtacaggccagttgttttgttgaatgccctccagtttttttcctgatgtttcctcataattacatttgggatatgcactttgggcagaaccacagaagcagcatgtgtcttgtttggtgcaaggtgtcatgaagcacatgaggtcggctcatcccagactgacatcaactttgactgcttggttaaggtggggcccactaggtccctccttgctgaagttcctctttttccctttgcgctcaatctgtatcttgtgaagagatacttgaagaccatgtgatgcctccgagtatctcctcacaagatacggaaaggaccatgtgatcctatgatgcctcaaacttccatccacaagtttcatccctttcaggttctttttgcctaaatcaattacattttgcgatggtagttaccaaatgatgatttcctttctttttttttttttttttttgagacagagtcttgctctgtcgcccaggctggagtgcagtggcacgatcttggctcactgcaagctctgcctcctgggttcacgccattctcctgcctcagcctcccgagtagctgggaccacaggcaccctccaccacacccagctaattttttgtagttttagtagagacggggtttcaccgtgttagccaagatggtctcgatctcctgaccttgggatccgcccgcctcggcctcccaaagtgctgggattacaggcgtgagccactgcgcccggcccaaacggtgattttctaaccccatcattccttctactttactggctggctttctcctgcaggacttcccctctgtcggggcagcggcttagagctgtgggttgggagaaatggggccaggagcagcaggatctggccaggccattagatcctccccggggattttctttaaaacgagtccaggaaataaactggctataaagccagtctccatgcaagtgtcaaggcaggcaggtctggggccaaggccatctctgggcacatctgggctgcattagtgacctgttggctacttatgggtatcctctgagctgggatgagggtctcctggtagacagggatcaggactgtccttgttcttctttgctttcaaactgtttatttttttcgtttttcctttttttttttttttttttgagacagagtgtcacccaggctggagtgcagtggctcaatctcggctcactacaggctcaacctcctgggctcaagagattctcccagctcagcctcctgagtagctgtgactaaacacacacaccatcatacctgcctaatttttgtgttttttgcagagatgtagtttcgtcatgctgcccaggctggtcttgaactcctggactcaacctatcctcccacctcagcttcccaaagtgccgggattacagtcatgagccgctacacctgcccaaattgtcagtttcataaatatcacaggaacgtattccctcctttaaaagagtgagaaggtgacatgtgaagctccagtggcatgtgatcaacactctctatccttatgcctttactgtccccagcatgacgccatggagatcttggtttacatctttgtcagttaaaaaaattagcaactggccgggcgtggtggctcacgcctataatcccagcactttgggaggccgaggtgggtggatcatgaggtcaggggttcgagaccagcctgaccaacatggtgaaacctgatctctactaaaaatacaaaaaaattagctgggcatggtggcgggtgcctgtaatcccagctactcaggaggctgaggcaggagaatagcttgaacccaggaggcggaggttgcagtgagccgagattgtgccactgcgctccagcctgggcaacagagcaagactctgtctccaaaaaaaaaaaaaaaaaagcaactatatttcttttctttctctctctctgtctcttttttttttttttttttttttttgacagagtctcactctgttgcccaggctggagtgcagtggcatgatctgatctcagctcactgcaacctctgcctcctgggttcaagtgattctcctgcctcagcctccaagtagctgggattacaggcgcccaccaccatgccccactaatttttgtatttttagtagagacggagtttcaccatgttggcaaggctggtcttgaactcctgacctcaggtgatccacctgcctcagcctcacaaagtgctgggattatagatgtgagccactgcacccagcaaaaaaaaaatgagcaaatatatttccatgcatacatggctccgtctcacttacctggttccacaagggcctccaccacctctgcctcatccctttccccgcccccctcactccttccagccacaccaggctccctgccccctcagggcctttgcactgccactccttctgccaggagcactaccctagagagccacatggccactcacctcccatccctctccctttcattccaacccctttccctgttattttctccatctgacaaaacactcatttccctgttcagagtttctctgttgactgtcttcccccaccagaatgtcagctccatgcaggtggaatttttttttttttttttttgagatggagtttcgctcttattgcccaggctggagtgcaatggcacgatctcagctcaccacaacctccgcctccagggttcaagcaatgctcccgcctcagcctcccaagtagctgagattacaggtgcacaccaccacgcatggctaatttttgtatttttagtagagacggggtttcaccatgttggttaggctggtcttgaactcctgacctcatgatccgcccgcctcggcctcccaaagtgctgggattacaggcatgagccaccatgcccagccatgcaggtggaaattttgtcttcttcattcactgtgcagtgatccctggagtccctttcacatgtgggaggcacacgctccgggaaacattgctgaaggaatgatgagtgagttgatatgtgcctgtcagaaacaccgtgtggtcaccatttttttttttttttttttttgagatgaaatctccctctgttgcctaggctggagtgcagtagtgtgatctcagctcactgcaacctccgtctaccgggttcaagcaattctcctgcctcagcctgccgagtagctgggattacaggcgcctgccatcatgccttttgttgttgttgtcgtctttttagtagagatggggtttcaccatgttggccacggtgacctcgaactcctgacctcaggtaatccacctgcctcagcctcccaaagtgctgggattacaggcgtgagccactgcgcccagcattttttttttttttttttgaggcagagtctcactgtcacccaggctggagtgcagtggctcgatctcagctcagtgcaacctctgcctcctgggtccaaatgattctcatgtctcagcctcccaagtagctggcattacaggtgtgtgtcaccaagcccagctaattttttttgtatttttagtaggatggagtttcaccatgctggccaggctggtctcgagctcctggcctcaagtgatccgcccacctcagccttccaaagtgctgggattacaggcatgagccactgcgcctggcccattttgaatttttgtttttgagtttgtttggttagacttccttctgctgtgaaacccacagttgggtgatatattagtttcctagggctgcccccaccaaattcccatgaacttggtgggaagagcagaagtttattccttcatggtcccagaggccagaagcaggacatcaaggcatccacagggctgtgtttcctccacagactgtagggtagactccttccttgtctcttctctgtgtctttgtttctctttttttttttttcaagatggagtctcactctctcgcccaggctgctcactgcaacctctgcctcctacttcaagcgattctcctgcctcagcctacagagcagctgggattacaggcatgtgccaccacacccggctaatttttgtatttttagtagagagagggtttcaccatgttggccaggccggtcttgaactcctgacctcaggtgatctgtccgcctcggcctcccaaagtgctgggattacaggcgtgagccactgcgactggttagccgtctctgtttctcttaagacaccagtcattggatgtaggggccaccctaatccaggattatctaatctttacttgattgcatccacaaagatgctatttccagataaggtcacattcccaagtcctgggaattgacttgaacatatctctgggttctacaattcaaccccaggtgtactggtggctacaaccaaaggcttggcaaggctttctcagggtctggaatgaatccaggtgcacttatctgtttatttatttggaggtcggtcgggggggggggtctcacgctgtcgcccaggtggaagtgcagtggtgcaatcacagctcactgtagccttaagcagatccaggaagtttttattattcactcaccaaaccctgcaggagggtcaggaaggtggcctggaggaggggacccttaggaggagacttgggaggtgagtaggattttgcctctgtggctccaggaagagagagagagccctaggtcaaagctccaccaagccctgactgcagaggttactgcatgagcaggtaccccagggttgggtgacagccacagagggagaggtcggcttgcatcagggccaggccatgcgggcctcggagtggggaactacagatttatcctgagggcaatggggagccatgggaggggctggcagggaggggactgagtgggtttactctttggaaagatccctggggccactgtgatgggagcaggtctggcagcaggaagagcagttgaggaggtggccacggccccgtgatggtggcagatgaggcaggggtgctgtttggcgacacatgaatgagcagactgagggaggagacaaggatgatgccgggacaggatttttcgccaagtgagggaaataaggacccagggaggcaaagagcaaacactcaggcaaataataatgacgatgatggtaacagaaacacttcattccagttcactacctgttttgcacggattatttaatttaatcatcacaacagcctgaggcaatgtgggtataagagaaggtcctatagagtttaggggctctagagtcaaacttcctgggttcagtctctgctccattgcctacctcctgtgtgacctagagcaagttgttcaacctctctgagtgtccattttcttatctgacaagcagcctctccttcctggggttgttgtacagattcagtgagtaaatccttgtaaattggccggcacggtggctcacgcctgtaatcccggcattttgggaggccgaggtgggcggattacctgaggtagggagttcaagaccaacctgaccaaaatgaaggaaccccatctctactaaaaatacaaaa

SEQ ID NO: 737 - DNA, 598 bp, Homo sapiens
ctagcgagtggttcttctgcgctactgctgcgcgaatcggcgaccccagtgcctcgaccactatgccgcgctctttcctcgtcaggaagccctccgaccccaatcggaagcctaactacagcgagctgcaggactctaatccagagtttaccttccagcagccctacgaccaggcccacctgctggcagccatcccacgaggtgtgactaactatgcaataatccacccccaggtgcagccccagggcctgcggaggcggtggcagactagagtctgagatgccccgagcccaggcagctatttcagcctcctgtttggtggggtggcacctgtttcccgggcaatttaacaatgtctgaaaagggactgtgagtaatggctgtcacttgtcgggggcccaagtggggtgctctggtctgaccgatgtgtctcccagaactattctgggggcccgacaggtgggcctgggaggaagatgtttacatttttaaaggtacactggtatttatatttcaaacattttgtatcaaggaaacgttttgtatagttatatgtacagtttattgatattcaataaagcagttaatttatatatta

SEQ ID NO: 738 - protein, 71 aa, Homo sapiens
MPRSFLVRKPSDPNRKPNYSELQDSNPEFTFQQPYDQAHLLAAIPRGVTNYAIIHPQVQPQGLRRRWQTRV

SEQ ID NO: 739 - DNA, 1697 bp, Homo sapiens
gcggcacggcctagcgagtggttcttctgcgctactgctgcgcgaatcggcgaccccagtgcctcgaccactatgccgcgctctttcctcgtcaggaagccctccgaccccaatcggaagcctaactacagcgagctgcaggactctaatccagagtttaccttccagcagccctacgaccaggcccacctgctggcagccatcccacctccggagatcctcaaccccaccgcctcgctgccaatgctcatctgggactctgtcctggcgccccaagcccagccaattgcctgggcctcccttcggctccaggagagtcccagggtggcagagctgacctccctgtcagatgaggacagtgggaaaggctcccagccccccagcccaccctcaccggctccttcgtccttctcctctacttcagtctcttccttggaggccgaggcctatgctgccttcccaggcttgggccaagtgcccaagcagctggcccagctctctgaggccaaggatctccaggctcgaaaggccttcaactgcaaatactgcaacaaggaatacctcagcctgggtgccctcaagatgcacatccgaagccacacgctgccctgcgtctgcggaacctgcgggaaggccttctctaggccctggctgctacaaggccatgtccggacccacactggcgagaagcccttctcctgtccccactgcagccgtgccttcgctgaccgctccaacctgcgggcccacctccagacccactcagatgtcaagaagtaccagtgccaggcgtgtgctcggaccttctcccgaatgtccctgctccacaagcaccaagagtccggctgctcaggatgtccccgctgaccctcgaggctccctcttcctctccatacctgcccctgcctgacagccttccccagctccagcaggaaggaccccacatccttctcactgccatggaattccctcctgagtgccccacttctggccacatcagccccacaggactttgatgaagaccattttctggttctgtgtcctctgcctgggctctggaagaggccttcccgtggccatttctgtggagggagggcagctggcccccagccctgggggattcctgagctggcctgtctgcgtgggtttttgtatccagagctgtttggatacagctgctttgagctacaggacaaaggctgacagactcactgggaagctcccaccccactcaggggaccccactcccctcacacacccccccccacaaggaaccctcaggccaccctccacgaggtgtgactaactatgcaataatccacccccaggtgcagccccagggcctgcggaggcggtggcagactagagtctgagatgccccgagcccaggcagctatttcagcctcctgtttggtggggtggcacctgtttcccgggcaatttaacaatgtctgaaaagggactgtgagtaatggctgtcacttgtcgggggcccaagtggggtgctctggtctgaccgatgtgtctcccagaactattctgggggcccgacaggtgggcctgggaggaagatgtttacatttttaaaggtacactggtatttatatttcaaacattttgtatcaaggaaacgttttgtatagttatatgtacagtttattgatattcaataaagcagttaatttatatattaaaaa

SEQ ID NO: 740 - protein, 264 aa, Homo sapiens
MPRSFLVRKPSDPNRKPNYSELQDSNPEFTFQQPYDQAHLLAAIPPPEILNPTASLPMLIWDSVLAPQAQPIAWASLRLQESPRVAELTSLSDEDSGKGSQPPSPPSPAPSSFSSTSVSSLEAEAYAAFPGLGQVPKQLAQLSEAKDLQARKAFNCKYCNKEYLSLGALKMHIRSHTLPCVCGTCGKAFSRPWLLQGHVRTHTGEKPFSCPHCSRAFADRSNLRAHLQTHSDVKKYQCQACARTFSRMSLLHKHQESGCSGCPR

SEQ ID NO: 741 - DNA, 21064 bp, Mus musculus
  misc_feature (1)...(21064): n = A,T,C or G
gatcccattacagatggttgtgagccaccatgtggttgctgggacttgaactcaggacctctggaagagcagttggtgctcttaaccgctgagccatctctccagcccacagcagcttgctttttaacatgataatctcagagaatcatctttgggctggtgaggaaggacaggcctttacacagagagctggtggtggaccacagaggcaagaccaagcagtcgaccagcacttagctctgccaggacttagcccagtacttaacaccgtcatgcagcatgggaggagttcgtcctagtactcagcctcaattttgtggggctggggcagggtatgcgaatgccatggagggagcatggacattgactcgactctctcctcccactaagatgcaaaatcttaagaagaagaagatcacagagggaaattaggttgggaagtacggatgaagggctgagaatgctacaacaggggagccttgctgtccagtgtccccagagtccctcagagctcaagaatggccaatgtcccaaacttttagctaggtatcaggagttcacataatgactttgaggaccaacctggaatacaagatctgggaaagccaaaactgtcaaagcagcctggtacccagagccttgtccccagccttgacgaggacctggagccctgagaacctcccacatgtgaagctgtcccctcgatgagggcgtgtgctctcttatgctctgtgcctgggtgcttcattcaggactgtggttatggccgagggctagaacagatttctctggggaatcttatcttacaagatccagtggaacacctgaagaggacagtagggacgaacactgagccacagtaccctgccaggacacactgccatgcgatctcgtgtctacacctgacagccattctaacaaggagaaacagaccagtgagcattccagaaacagagaacattgagtttccaggcttgaaagatccactgaatggatgggttccataggaagtagattcccagggaggctgaatgttcctgaacagggagcaagctctctgctttcagagagaagcgactgtttgaatggcgccactgttttgagggtctctggcagctgtagagaagtcacctgcagtgtatcgctcaagcaccatgaaccacgtgagaacagacgctctcacatacactaggtttcaaaatcacatatttctccccctccacttttttccatacagggtttctctatgttgtcctggctgtcctggaacttgcattgtagaccaggctggccttggactcagagatcctcctgtctcccaagtgctaagattaaaggcatgtgcctccactatcaggttcctccacctcttttttttttttgcttgttttgttgttttttacttttcttaatgtttattttgtgtatttgagtgtttttgcttgcatgtgtgtctttgcgccatgttcctgctggcatctgaatgaacaaaagaaataaaaaggaaaggaaaggacataactgctcctacgtatggtggaggagaaagtttattatagataggcaagcatagccagaggcagacacatctgggagaatccagagtggctctgaccctgagccatgtggggggaaggggagaggaagaggggagccaagtacagcagccaagaggccaaaggagagtcacactgtgtctgggctatatggggaagagtagctcaggctctgggctgcagagttcagggaagagggcggggtgtgccagccttaccctgtatcaggtagggactgagggatgctgggagaacctggaggccaggtcctctttagtatgtttaataggcacatcagcttcttgtacaaggtttgaaacttaatggcatccatagagagaggcaagaaggggacattggatccctgagactggagttacagatggtgtgagctgtgggtgctgggaactgaatttgagtcttctgtaggagcagccagtgctctaaccattgggctgtctctctattccccctcccccttgggaagccgttggagcaccggcttcatagcgagtgagaagaagctataactttcaaaaatgaggttgagtcttgcatatggggtgaaggctgtcctgaggcactggtgaggggcctggggggtgctgtctcagcaggaagtactcactcttctttgggaggcagtgcagagggcgggaacaacgttgaaccaggagcaattccgtgtaaaaccaaagtagcagaagatgagaatggttccaaaaagaaacaccccagtaccaccttccacacagctcagcaagccatgctcagggcatcttcagatccataccgaacactaactaatgtccagttacagcaaataactgggagactgcaggacacgaaggtgcaaggcatggaggctggggaaaggagccacggtgtggctctcgatgagccagagagcgagcatccttccaggaggtggccagaagcaggctgttgagcttccctgtgaatgagtgcaggcgccaaggctgctgctccggggttggcagtgctgagtcccaccagctgtaaactgagtaccagaagcccggggtgccaatttaagcgggaaggaagccattgcagccgtctcctctgcttccttcttgtggatggcttcgtagttttagctccagtgctgaaccacctgctcccaccagttacagagcgcttctgaggggctggaggaaccagcacaccagtgcccatctgcgctacctttctcttccctccctagattatcctctggacttgaaccacagtgaagcctttcccccaaccacgacctttcttcctgaagatttcacctactttgccaaccacccttgcccagagaggctcccttccatgagtaagtagctccaacttgcctcctcagctcccagcaggtttctgttaccctgggagggagagagtgacctgcctctttggataatgaaatggctccctgttctgggagtcagagctgtaagaattccttatgactcagcccctctttgctaagcccgttgctgctgccccatatgcttggtggtgctgtgttctgtcccgtgtaatgacccttataacatgtcctaaggaaagatctgggcattgactgtgtcactgcagcaccactggtactaagagtaagaggtttgatgcaggagccctctgtccccacctccctcctgtcactcttgttttcacttgttctggcccaccaggctcacccctcacttccctcccaccatgcttacgactgatagttgctacaagttcttttctctttcttagtattttacttagatttccattctctgtgtacacgtgttctgccttcatgtgtgtctgtgcaccgcccgtgatggagcttgaggtgataagcctccatatgggtgctgggaactgaacttgggtcctttgcaacaagcgcttttagccactgagccagccatccagccctagaagctattttctaaaaaaaatactggttttttaaaaaaaattagggctgggggctggtgagatggctcagtgggtaagagtacccgactgctcttccaaaggtcccggagttcaaatcccagcaactacatggtggctcacaacaatccgtaacgagatctgatgccctcttctggtgtgtctgaagacagctaaataaataaataagggctggagagatggctcagtggtcaggagcactgactactcttccaggagtcctgggttcaattcccagcaaccacatggtggctcacaaccatctgtaatgggatccaatgccctcttctagtgtctgaagacagcaatagtgtacttacattaaaaaaataataataataaatcttttttaaaaaagattaaagccatgcctttaatctcagtgatagtattcctagctatcttggaattcaccgtgtagagcaggctggcctggaactcacaaagatcctcctgcctctacttcccaagtgctgggattaaagcccccgcacctggcgtccctagcactgattgtcatagtgtcgtggttttggggctttgagtgtggccaccttaagtcagaatccccactcatggtggaggaggagaggccggcagccgactgtgctgccgatggagctgacgagccaaatgtgctgcctcgcttcctctgatgaattcagctgccacttaggaggctttccagagggccagcagtttattgagaagtgaaataggagctcccagcagcagggaggggtcttgagaaagagctgcctctttcagtttcaaagtcttcgtttctttctccacctcggcagaagcaggtctccaaggtgttgtcccttcggtatgcttccttgccagatggtagtgacacactaaagagcgatgagctggctgttgggaaacgctaattgtttctcctcccgctgcagagggcccgatagatataaacatgagtgagatcgcaatggacgatattcatgagctgttctccagagacccggccattaagctcggagggcactggaagcctgcagactgtgtgcctcggtggaaggtgggtatgagtcagacccgggtgctgggaacccatctgggattgccggggtgcgagaactatgacgtcagggagcttgcaccctacctctcattcttgagaaatggtttccccccaggactgctgtagccatagacattggcaacaccctgatgctgtctaggggcactgaacacctttgttcccaggcaggcttatttgcaggagggagggccagtaggtcagctgacacaattgtggactgtgcatctgcagagcagggcttcctgcctggcctcccagcttcctgcctggcctcccagcttcctagaggatacgtggactgcaatgcaggtctctagctagacgcttaggcctctgcaggatggctgtatcgggaaagagacagcagcttatggctgttttatgagcaagtgtttaataaagcgcttgtgcattgctggccctgtgaagggagggaagtgtcttgacacgagccagggataagcttagtgcagtggcagcagtgtccccagatgcagtgtggagtgagctgtgtgcagctttggagagctttgagccttgatgtttgcacacctctggagggactttggtgctgggtcaccatggatctgtggaactcctagagctgcattctggacaggatccaggtatctccagggtggccttgcctgcacaggtcagcgttaaaggatgcctggggcaagaagaggagcctcgtagcattccccaagggttgcacatccaggagtacacaactttgtagtgatgcagagaacttgctggtaagctggagccagcagccagctgatggctcccttccctgtgatctgcaggtggctatcctcatccccttccggaaccgccatgagcacctcccggtcctcctgagacacctgctccccatgcttcagcgccagcgcctgcagttcgccttctatgtgatcgagcaagtgagtgctccgtggttcctttctctttcttctgagcctgaaatctgaaaaggtgcatgtgacactgtcttcaggtgagctgagtcctcccacatcaatcgttaatcaagaaagcactcctcagagccaccccaggccagtctcaaggagctgttttctcagctgagagcccctcgtccagccttcctctcagctgtgtcaggttgacaatcagcacattcctgtgcctctcctgagtatgtgttctggtactggccggggtaagtgaaggttaatgtgcagcccacctaggccataactagtgtaaactagcctcccctgccacagaatccataatcctcagacatttgtccttggagggctcagtggctgttgtggagggagctttagaacagacatgctgagatgaccagaagggcccgccctctttgatgttcatgaagtaggtggccccgtggagggcacagtgaagacagtgtgggcatgtaggctggagacttgagtgcctggcctgcccctgtataacctgtggctgtgtgttcagctgcagtgcatgctgctgcagtgctctctgaaggaacaaggcacaaccacaacccagcaggctccctgatgaccgtgggctgagcagctctgcccagactctgtgggccctcaggtctttctgtgcggcttctaggagcccttttggtgtgcagagaaggcagtcaggtcttcacttaaggaacacattgttctttcaggttggcacccagccctttaaccgagccatgcttttcaatgttggttttcaagaagccatgaaggacttggattgggattgtctgatcttccatgacgtcgatcacatacctgagagtgaccgaaactactatggctgcgggcagatgcccaggcactttgcaaccaagctggacaagtacatgtacctgtgcgtgctcctcctcctcttcctcctcctcctcctcctcctcctcctcctcctcctccttctcctaagcccgggctaagctgatgagtggcttgcagtgtggtcctgcgtgcagacctcagcagggagcaggcgtgggaccaggtgtcaccattttgctcactgtggaaagtgggtcattgtgactgtgggggtgtgaagtggaaagtggattgtattttgactgtggggtatgaagtgctgtgaagtgggttatattgtgactgtggggtgtgaagtgggttatattgtgactggggtgtgaaatggtcaggtagtaacagcccgaggtggcagtggagtaactgaactctgattgtgaccttggttggacattgagtgagttctgtgctgtcattcattgtgcaatgagcttggtgctcagtcctcttgcctgactgggtgaaccgctaagtcccatccccagccttgcaggaaaacaaagccaagctcctgaggagctcagccccagctctctaacccaggcggctctcctttccaggctgccctacactgagttttttggtggcgtgagcggcctgactgtagaacagtttcggaaaatcaatggctttcctaatgccttctggggctggggcggagaagatgacgacttgtggaacaggtatacacccgtcccaccccctgagccactgtcaccccctgcactaccccaccctcaccccctgaagcatccccacacagcaccacccagtctcacagaccaggagccacacggtcactttgcacccttgcagccatgttggaaaaagctcccaggataacgtctccgcatgcagtcggtgtcaggctgagggtatgtcctgccctgcacctttgcgtgctcctgcccagcttttccctgtgagcagccagcgcccgcacagccttcctggactgagttctagggctgcctgccttattttctttcatgatggagatgagtattgagagtcagatgagtatttgtagtttgttttaaaaaatatacagctagaactgtatagacaacagaaaacccttctaacgcaaactaaaagtatattttctatgtcccattaaggcaactacacattttcccctttgacatgaaaaaataaacttaaaataacagcttaacaccttttgtatactaatgaacatggggcctggaaaagtgactcagcagttaagaacacatacggcttccccagaacacctaagtttgcttcccagccaagtgtaactaactctagcttggaggattcagtgtcccctgtaggcaccagcactcacatgcgtgtgctacacacatacacactcacacagacagaattaaaatgttaaacattaattcgaggccagagaattggcttagagagcttgctactcttgcccagaacttgggttcaattcccagcactcacatggcggctcacaacagtccattataacttcagttccaagggatcctttgcctacttctgacctccaagggcaccaggcttgcatagggtgcgtgtacacgtatgcagacaaaacactcatatacataaagttttcttagactataatttcagctcctaggaggctgtggaggagagttctgcgaggtcaaagccagcccaggctgcctagtcagactcttgcaccatagagcagggaagagaagtctgcttactggaaaattcataagaatagaaatcagtttccccagtctgcacaccccaaaacagcatcattaccatttcagtgtgtctttaaaacatggcgaatgagtcacgccagatgtgtttgtcagtttctcagacctgtagtggcggcatatcagtcccagggtgagtatccctgctggggtcctgtgtggaataccatctgtcatttacatgccttcttactggcatggtcagtgttctcatgtgtgcgggctgtgactaagcaggctgtttcacttgcactgggccttgggaaagatcctagaggtgaagttggtcagaatgcagtgtgttaaggctcttgggcttcgttgacaacttttccccatgttccctgtggctctctgtgctacgtggccacattggtgggacctccctccccaagctgagggtggactgcttggtgacctgctcaggtgtggccctgctgtgttggggatctttcagtgaacctggaattcagtgattcagccagcctggctagcactgaactccaggcagagagctgccctcgactctcctccgcccagtgctggggttatagacacagcggggccagcttttacatggcttcttggagatccaaacccaaggccccgtcctgcaagcttggcacttaccgcctgagccaccttcccagcccctcagacagaaaggagtgctagttaatcctctgcggagagtcccatgccgggggtgccatcctctgttcacatgggcagcatttctccagattaaatgtttactgtgatatacagtcaaaagcacattatgacaggtgtggctcaggaatggaacattttcctagcatgcactagccctgactgctctctctctctccctccctccctctccctcttaaaaactgagagaaaacctggagctggctcagttgttaaaagtgctggctttgatctctgaaaccatgtttcttgtttgtttaaaggcactgagagtggtggctctatctatcagttacttttctgttgctgtgataaaacaccaaggccaaggtgacttctagaggggtgaacgtatctgggcctagggctgcagaggattagagtcatcatggccaggaggcagcaggcatgtagctggagcaggctgctaagagcacacatctgccacctcaaacatgaagtggagagagccacctggaaatggctgtaaattctcaaagcccacttccagtgactggcttcttccagcaaggccacatcttttaagcctccccaaacagcactgccagctggggatcaagtgttcaaatattaaaggctgtaggtacatttgtcacaataccaccacagtaccacatgactataatcccagcccttgggaggcaggcaggaggatgtctgtgagttccaggtcaggcagatctattctatatagggagtcagagctacacagacagtgagaccctgtctcaaaaaagttgttggtctcagtagcacacacctgtaatcccagcaatggaagtggagacctcaaaccccccccccccccccggctgtccacctatgtgatgagctctgggccagtgagggaccttgtctccaaaaagaaaagtcacatggtgcctgaagagtgacatgcgaggttgtctcctgaccttcacaagcacatccaagtgcatgcgtgcacacgcacgcgcacccacccatgaaatgttaagtaaccatcaactagctcagtgagctgcaacagaaggcgcttggacattgttgctggagaggtcgagaggtgtcttaaagcttactagtctctgggtctccgcggctcactgttgttcctttggttttggacagggtacaaaatgcaggctattctgtgagccggccagaaggggacacaggaaaatacaagtccattcctcaccaccatcgaggagaggtccagtttcttggcaggttggtgctgtttattggtcctcagggtggctggtagctgatttctcccctcagctttctcagccagcccattctgttgcttttgtcatttgcggccgtgtctatgcttggcttggcctccagctctccatcctcctgccgttgacccctcactgctgaaattgctgcgtgcaccagctctgccacagtgtgtggcgggcaccatgggtgtgcatctgtcctgatgagccagggtagacattttaggtgaccattggtgagatagagttgaggtcaccttctgctaacccctgtgctgtaaaggtatctacaagggagtggtagggctctaagcctgacttctttctgcccctcctctgtaatctccggagctccccagttctgacctgggattcgtctctggagcctccgtttccttgggcctcagaggcattagatgagatgctggaagacgggtccaggcatctgccctggacttgtaaagctgggcgtcagctctcctccctctctgtcctcggctccccaggtacgctctgctgaggaagtcaaaggagcggcaaggactggatggcctcaacaacctgaactactctgcgaatgtcacgtacgacgccttgtataaaaacataactgtcaacttgacacccgagctggctcaggtgactgagtactgagatgcgaagagaagccgcactcacctacccaccgctcccttggacgggctgcgacccgccatcctgggggtcaacacaggaggacagaagagagtggagcacaggaccataggggttccagaaaactgtcacagagcacacgcacaaaggccttcgctgtagggcccaacagggacaggagacttgaggacacctgtcatcagcactggtgtctattccacaagacagatgtctgccctgccactcccttccgtccgtccctgtccgtccccccccccccaccgcccccaggtcctgtctcagctgcaacccatagaactgcagggccaggctaggtgccccttggatagatgggtggccaagccccctggcctgaaggcccgtctctgcatctctacagttctctttggttttcatttttcatttggcttagtttaggggtttttgtttgtttgggtttttttgttttgttttgttttgttttgttttggttttggtttgtttgtggggttttggggttgtttttttttttggtggttttttttttttttttttttaaagaaaaattttctgctttgggtggggactgaggacagaggggagggacttggtgtgatagacatataacagtcacttcttgaagaagtgcagttgtaaataagccatgtaaaatgcctttttaaagtttaattttatagctggctccacatcaaagtgagggcctcatatgttagatcaccttgggtggcaaacaccccagttcccacgcagttgagtgtcatcacccaagtccctgtcatctaggaaggaagtggatgcagggtggaacaaagaacctccggtcactgtagcccctcttctctgctctgcccctcctttcctgtcccctcctttagccccttcccccaaggacttcctcctggagactcagcccctaagctggaactgctgttaggggcacagtgctctcccctcttacagacccagcggagccagctgggatgtgcaggggaggggaggcaaaggcccagggcacaggcttatcactccagtatggatggcgggagctagagaccaggagatatgaggccagtgtgagctgtgtcacaagttccaggtcagcctgtgctgtgtagcacagtccagctccctacacctcctcacacacacagtggctgctgggtgaccgttcccttttttctttggaacttggccacagtttctctgggctgtgcctgcatgaccagctggcttcagtgatttctccgtttccctctttagtttctaggaagccactgtgctgtgctaagaagcagttggtcaggagggctcagcccaggagcaggtggccctggggtgcatgtcagccaggggccagtcagcccagcagtctcccctgctccctgacatgagttcctaaagggcactgaaaagggcacctccttcctgtgtctgcctccactgcacccccagtccctaaagcagggatcgtgtgtggtgaggaacgctctcttctggcctcaagctctttgcctctttgccttcagcacccttgatgttcatggtttacatgggtgggggtgggatgtagatatgtgggggtggggttttgcatcacacagttggttctgaggacagatgatccccacagactgtgggagtgattggccaggccttgttttttcttgtgttttgttctttttgtagactagtgtggtaactagggaacagatggcactgcagagtgcttcccgctcatatgagagagcaggtgtctgcccttgagagctggtgagccgcgtcatctgtttgcgctgggcaaggagctgcaccgctgcgttgacctgccttgtcttacggtacacacagcaataaagcctgggttccgcccggtctccaccctccctccgcctcccttggttagtttcacagtgctggcaatgaagcccgtggcccaccacgctaggcgagtgctctgccactgagtcacggcccagccctctctccctcattcttctgtttccataccaaaggccaggagtgcttcactgtgctggagccatggtgtcctttggagggacaacggtgcacgcggcatgtatcctggctgaagcgctgcaatcttacactagccacagggtactgttttgagccaaaggctgatacttaattgaagagggaaaatgcagatttggggacaaaggtctttttactgctcaagtagggtcgcttctgtcctgttgcaatcatgtccaagtttgtttttagtgtggacttttgtgggcactgtctgtcattggccacccagtcacgtaccgagtgggcagtgtcacagccaaagctaccactgagccacagcgtaggtcattgcttgaaaaaaatgacagtgacaatggagtgtgaccttggtgtactgtggcagcccagatgactgagtgctacagacgagtgacccttagatgacctcctcaactgcctgccttgtgtgtgcgcgcaaggcccctctctgcacaggggttcttcgggggagggggtatttgcaaaaccttaattttgttaaaatgggggactctgtcaggggactctgtcatcgcttcccttcctcagaggacagcacagagccgcggcgtacacactgacgtacccaccaccaacagattgaggcactgacgcagccagcttagcccagcattactgtctctgttgtgagcttgctctttgttttaaaaggtgccaggggtacatttttgcactgaaacctaaagatgttttaaaaacacttttcacagaaatagtccttgtcattacattgttcactcatgtgtttgtacatttttgtatgttaatttatgaatgattttttcagtaaaaaatacatattcaataaccaaaccttggtagtcgtctctctgtctagctgcctctcagggtggtttcccttcctctgtagaacaccacacactggcgacaccagggaatgaagatctggctccagaacattctcggtgggcagtcctgggttctttctgccagaacattctcggtgggcagtcctgggttctttctgccagatcctgctcgtgttgtaatcacaaactgttaggaattgaaggcttgtcattcccggtgtgtgtgcattttgacttattttcccatctcgtagcccaggctggccctaacttgttctgtgtgtgtacttgaggatggtcgtgaacttctggtagctatgtaccaccaagctcagtttgtgtggtgctgggattagcgtccaggcctccgtgcttgttcgccagctctcatcaacagagccccagctctgctgtcttgtctgtctgtccgtcatccttccctccctcccttccatggttgaggcccacaaaggccagaagagagctcttgctcacctggacctagagttaacgagccaccatggtggtggtgggaattgaattcagattctccttcgctagagtagtccgtgctcataaccaccgagctctctccacccatcccacctcctcatcccccagtattctctttacctgcatctagtcactgccgacaagagaagggaccactctcagtccatagaatgttctgggaaagaaggctgctggctggtccttacttggtcaaagtggaggccatgtggggtagagctggagacccgggaaagggaagatgtgtgctcacagcaccaaagtgcaggcaaaactcagcaggacccgtgggaccgggaaggaggctgggcacatactaagaaagatggagttggggctgtatatggtgggatttcacagtttctagggacgtcgcccactggggggcaagagtgaagagcaaagatgtcagggtggtaaggagtgatggaagaagaggccagggtgggaccccaggcctggggggtggggaagtccttgggagctgccatcttccccgctttgtgtggtaccatcttctgtattgtgtttaaggggctgaagaccaccaagcaaaaatagcaggtgggaagttgtaatctggcgagggcatcagggaaagagccattttggcctggaggatcagttcctggaggaggggggaggaggtgctgagaacaggactcagagggttaggggttacagaagacaagatgcttgggtctgggtggggtctgtgggacggacagcaggaagcatggagctgtgctgcatcccggaagaagtgcggctgcaggggacacagggaaagttgggcattctcaagaatcattgaggggctggtgagatggctcagtgggtaagagcacccgactgctcttccaaaggtcaggagttcaaatcccagcaaccacatggtggctcacaaccatccgtaacaagatctgactccctcttctggagtgtctgaagacagctacagtgtacttacatataataaataaataaatctttaaaaaaaaaaaaaaaaaagaatcattgaatacagttcaaaagtgacaccggatgaaggatggaaaatggagatgggcagtgggtatcacaggtactgcgatccagggaaggtggcaggaagacccaggggtgctggccctggggagatagctgagcacagcagagggggtctcaacgccagtgggaggggagtcaccctcctgatagatgtgacagtctgtagagcatgctgtgaagatgtctccatccctggagtcaccttctccggagaactgtatctcatctcaatggttcactcaaccttcacctgagtctcctgtgggacccagggtggggccttgttatgggtgtttgacagcctttgccactaagtgccaacctgagaagtcactacacttgagtgactcagatgggacctaaggaggctgctttgaggtcagaaagtgagctgtgaagtattgcccggagctgaaaccctatcaggggctacccggctgctcttcattgtgtgcacttaaaagctttgccaggcatagtctaaaagtaatttgttctaaaagcaataagtgagtttttgtttgcttgggggtggggggggccccccccccccccctcccccccccctcccccccccccccccctcccccccccccctcccccttttcctccctccccccccctttcccccccctttcttttttnnnnnnnnnnnnnnnnnnnnnnnnnnnnnnnnnnnnnnnnnnnnnnnnnnnnnnnnnnnnnnnnnnnnnnnnnnnnnnnnnnnnnnnnnnnnnnnnnnnnnnnnnnnnnnnnnnnnnnnnnnnnnnnnnnnnnnnnnnnnnnnnnnnnnnnnnnnnnnnnnnnnnnnnnnnnnnnnnnnnnnnnnnnnnnnnnnnnnnnnnnnnnnnnnnnnnnnnnnnnnnnnnnnnnnnnnnnnnnnnnnnnnnnnnnnnnnnnnnnnnnnnnnnnnnnnnnnnnnnnnnnnnnnnnnnnnnnnnnnnnnnnnnnnnnnnnnnnnnnnnnnnnnnnnnnnnnnnnnnnnnnnnnnnnnnnnnnnnnnnnnnnnnnnnnnnnnnnnnnnnnnnnnnnnnnnnnnnnnnnnnnnnnnnnnnnnnnnnnnnnnnnnnnnnnnnnnnnnnnnnnnnnnnnnnnnnnnnnnnnnnnnnnnnnnnnnnnnnnnnnnnnnnnnnnnnnnnnnnnnnnnnnnnnnnnnnnnnnnnnnnnnnnnnnnnnnnnnnnnnnnnnnnnnnnnnnnnnnnnnnnnnnnnnnnnnnnnnnnnnnnnnnnnnnnnnnnnnnnnnnnnnnnnnnnnnnnnnnnnnnnnnnnnnnnnnnnnnnnnnnnnnnnnnnnnnnnnnnnnnnnnnnnnnnnnnnnnnnnnnnnnnnnnnnnnnnnnnnnnnnnnnnnnnnnnnnnnnnnnnnnnnnnnnnnnnnnnnnnnnnnnnnnnnnnnnnnnnnnnnnnnnnnnnnnnnnnnnnnnnnnnnnnnnnnnnnnnnnnnnnnnnnnnnnnnnnngacagagagggctacacaggaaatcctggctctgtctccaaaaccaaaccaaaccaaactaacacaaaaataagagagaagggagggagctagggaagggagggagggagagagagagagagtgagttagttcagaccatcctcagctacatacatagcaaattcaaggtcagcccaaattctttgggtcacagagatcctgtctcaaaaattaaaatgaacaaggaggcatggaataaggggggaggggtgaaaccccacgtttgagcctttgctgcgcatgcgtgaggctccatccgcagcacggaagaaaggaaggagagggaaaggaaaagaagcgaattctcagcaaacctggtcaagacagaacacaggaagagctggactggggaaagacaggagtcataatcgcaagcccttctcggaattcgtgaaacacgcatcacgagtgtgtaagagctgcagggagcagagactgctgggaagcccgccccctggggcacattctatggggagcagacagactgctcagggcctcggagccacaggggaggtttgaagcgggcagaggcagcgaagttcccagtgtgctcagacccacatcccaggcacttgggagattgagctggaaggctggtggttcaaggcttgactgtgtcactgaatgaatgagttcaaaagaccgtcgggggttggggggggggcgggggtagctcagtgtgagacactaggttcaagccgtatactgtaaataaaattaaccgaggtctagaagaaatagtaaggacaacaggtgtgtgaagggacagacgtggaccagagagagtggcagaggagggaaggcaggagagggaggcaaacagcactgaggggtggtaggggctcttgcagggccacatgggccatggctagaggctggagcccactgcaggtcttgcctggggagactgtgagccttggagaggaacaaatgacagctcatgccttagagcagcccagagcagccagtggggcagtgggaaaggcaccagcatggaactgcaccctgggaagcctgtagccccgcccagccgggagatgatgggtgatagagacctctgggagtgaaggggagccacagagttgactccccggtgacggggaacccctggagctgtcagcatgggaagcagctctcagcccgagagcatggccctgtctgagactgggtctctccacaaggacagtcctgtcttgtcatgagatcttttctgcatgggacagctcaaaaaggccactcagtgcccttggccagtgcgctcgccatgttttggtcttctgctctttgtatttgccaaggggtgctgcatgtctgccctgctgtgtctcctggtatacccatgggctgatgggtattagagcacgtgatgaccccacgctttggttactcagtttccctaacacagctcacccctcacaaaaatctccaactgcagcaggactagggatgtggcgatcagaaagaccgcatggcaggatgatgggacaaaggcctgagcctcccacagactgatgcctggcgtatccctggggttcatcagagcacccttctgcagccacgccccactggtcacagggggcttcagacttccctgtcacctcagcaccctcacttgagcaatgacaaaggtgattcagtggacattttgtcactcagtgacggcgttcagtggccagcgggtccctgacctgcactcctgctcctcatacctaggttcagtcatgagtttctcacacactcacccatacacactcagtgttccctctctgcacacacacatacacacacacacatacacacacacacatacacacacacacacacacacacacacacacacacacacacacacacatacacacacacacacacacacacacacacacaccagtcagtcatcactgacgtagctgagcaggggtcaaagctgagtcagaggaagataacgtgagttgccgctctgccatgctgggaggcaggacctgacccctggccttccgtgagttggcgctctccttccttcctgtgatctcagacactgttcatctggcttggagtctgcacccactacttacattggttaatttttatgtcagcttgacacaagctagagccacttgcgagggggaaacataattgagacaatgcctccatcacatgggcctactggccttctcttgtcttcctttctttgtttccttgtttctgtttttttttttttcctttcttttttttctttttctttttctttttttttttttttttttttctggctgtcctggaactcactctatagaccaggctggcctcaacctcacagagatccacctgcctctacctcctgcatcaccacacctgcccacattttcttaatgactgattggtgtgggaggggccagccgtctgtgggcagctggccctggattgtatcaatcagccgactgtcccgtgaggaacaagcctgcgtgctccacagcctctgcttcagtttctgtctccagcttcccgactgagctcctgccctgccctcctgaggacggacagactgctgagataggacagactgctgagatagggaaatgagcccctccctgctagctgcttatggtcacactgtttgagaaacagtaacaaagctgagacccgcagtggcccctttcctaatacttctgtatgaattacttgcttatcttctgggggtagagggagcccccaacttgggaacagttcagaaagggtttcttttaaaaagatttatttatctatttgttttatttatatgagtacactgtagctgtggctctcttcttgcctctgaagacccttggatgacatggtacgaacacgggctcctcaccgagtagcgctgccaccagaaagggggtggggggcgcttgctgttccattagaaactttcctgcaaggtcggatctctgtcaccagatgacttctcccaacacctgacggctttcatagcatgactcacctgggtggcagttcttatgaccattctgcctatggcagctcccctggtgagttaactgttcaaggttctgaggataagtttttcctggtaaatgaaagggcaagagtcaaggccccacctagttggcctgctctggggagattagctcacacgctacacacagctgttggccaaaaagccttgagcagtcagtcagcaagcagagcagtttgaagacagaagcccatgacaagcagctggaagagttgggggtgagggggcggtgacacatgacagtgggacacaacacagcaccagctggaagcagctcccagaggcagggtggttgctgggaaagagaaaagatgaaaaatctcagagcatcatgtttccccagagttggggggagggctgcggggggaggggacaggcagggacccggccacctggataccaaacgcctctgggcagctgtgagggccacatcacactggctgaacggcttgagccatgccacgtgtctcttgagctcagtggtctcccctaacgtggtttgagaataaagggtgtctggtctgggagtggtcacctgcaaagtcaggtgtggtgtttgctgtgatggtcagctccgaggacctgctgtcgtggccctaatcagctgaggcagtcactattgtgatcggtggtaacagcgacagcagtcaccatgaaggtcagatgtcagggtcactgtgatggtcagtcatcggtcctcagtgtaatatggtcactcgtcatggtcagtggtgggcaggtatgatgttattgtttaggagtcagctctggtggtcacggttatggtcaaccacagtattcgatgtggtcagctgtctcagccactctggtgggtggttatagtgtttattggaatggtcatctgtagtggtcactattacagccagctctaacagtcacttagatttccatcatggtggtccgctgtagttgctaagcactgtagtcagctgtagcagccgctttggatgtcagttgtcggggccgctgtggtgatcagccatagtggactgtggtggtgatgtaatagctgtagccatccatcgactcaagctgtcactatggtgatcagttgtagtggccactgtaatggtcagtcacagtggtcactgtgttggtgagctatagtgtttactgctgttacctgtagtaaacactgcaactagtcacatcagtgaccaccagtgactgttataagtgaccactacactgaccacgatggctgaccatcacagtgaacactacaattgaccacttcaaaaaaaaaaagaa

SEQ ID NO: 742 - DNA, 538 bp, Mus musculus
tttggacagggtacaaaatgcaggctattctgtgagccggccagaaggggacacaggaaaatacaagtccattcctcaccaccatcgaggagaggtccagtttcttggcaggtacgctctgctgaggaagtcaaaggagcggcaaggactggatggcctcaacaacctgaactactctgcgaatgtcacgtacgacgccttgtataaaaacataactgtcaacttgacacccgagctggctcaggtgactgagtactgagatgcgaagagaagccgcactcacctacccaccgctcccttggacgggctgcgacccgccatcctgggggtcaacacaggaggacagaagagagtggagcacaggaccataggggttccagaaaactgtcacagagcacacgcacaaaggccttcgctgtagggcccaacagggacaggagacttgaggacacctgtcatcagcactggtgtctattccacaagacagatgtctgccctgccactcccttccgtccgtccctgtccgtccccccccccc

SEQ ID NO: 743 - protein, 94 aa, Mus musculus
  VARIANT (1)...(94): Xaa = Any Amino Acid
VLRCEEKPHSPTSLGRAATRHPGGQHRRTEESGAQDHRGSRKLSQSTRTKAFAVGPNRDRRLEDTCHQHWCLFHKTDVCPATPFRPSLSVPPPX

SEQ ID NO: 744 - DNA, 99291 bp, Homo sapiens
tgtaaaaatttagcaaactatacttttgttacaatgtgtatttttctgtatgtgtgctatgattcaattaaaattaaaaaaacacacttgtaaaaacctcagcagatgcaaaactggggaaggaaagaaaggcaggttaggactaggtgaattcaagagtcaaactatatcattaggactcaatttctctttgctgtttgtatcagtctgtttatatgctcatttcattctcaggttccacatgttgataaaacagttgccattgctgtggcctcacaacctgtcatgtttatgtctagcatgaaagagaaagttggcctctccaaaggcacaaagaaagctggacatttagcatcattggctctggctggtctgctcagccctgaaccaatcactgttgcaaaaggaatataatattctgactggccaggctagttcatatcatgtctggagatggaaatggagttaacaacctcagagaaccacatagactgaaaacaaggagagaaggaaatctggctgtttcagaagtcaagtgaatggatgctgggtgactaaaaaattcagtaaatacctggtccctagatggcagtggcatcatcattattatcatcataattttctcttagcatctagaaaaatgtctggcatctagtttggtacttgataaatattattattttttcttttttttgagacagagtctcactctatcacccaggctggagtgcagtggggcgaccttggctcactgcaacctctgccttccagattcaagcgattcccatgcctcagcctcccgagtacctgggattaccggcacctgccgctacacctggctaattatatatatatatatatttttttgtatttttagtggagatgggatttcaccatgtaggccaggctggtctcaaactcctgacctcaagtgatctgcctgtcttggcctcccaaagtgctgggattacaggtgtgagccaccatgcccggccagtacttgataaatactaatatctgttgaatgagagaatgagttatatcaggcaatactaggagcaatcttgtcatgccttaggccttcctctacaggataggaaagactgaggagaatttagagaagggatataagtcagtttttattttttatttttattattattattattttttgaaacagagtttcactgttgtcgccgaggctagagtgtgatggtgtgatctcagctcattgcaacctctgcctcagcctcctgagtagctggaattacaggcgccggccaccacgcccagctaatttttgtatttttcgtagagacggggtttcaccacattggccaagctggtcttgaactcctggcctcaggtgatctgcccgccttggcctcccaaagtgctgggattacaggcgtgagccaccatgcccgggttattttattttatttttaattttttaattattttagaggcagggtctcataatgttgcctaggctggagtgcggtggctattcacaggcgcaatcccacaactaatcaacactggagttttgacctgctccatttccaacctgggctggttcatccctccttagacaacctggtggtccccccatcctgggaggttgctgtattgatgccgaacttagtgcagacacccaaatgacatagtacactacaacacagaactcttggactcaagtgatcctcctgtctcagccccccgagtaggtgggactacaggctcatgctaccgcgcctggctataagtcagttttttttgacagcaaagacatagtcctgtacagaatcaaagctcttggaggcctttgctaacttttaccttactctctctcttcagaggggattggtggcagaaggaccaaaccctggaaaattctgattacagtaacggtgggtgaagcaggaaataaaggaagccctccttcactgctgctaggagtataaattgctacaagcatttttgagaacaatttggaaaatagtaaagcagaagatatgcatacctcacctgttcaccaaatcctctcttgtaaaccatgtgacctggagacatttttgccacatgcacaaattacatacagacgcgtgttgagccagttgcagtggctcatgcctgtaattccaacactttgggaggccgaggcagggggctgcggggaatcacttgaggtcaggagttcgagacccgcctggacgacacgacgaaaccctgtctctattaaaaatacgaaaattagctgggcgtggtggcgtgcacctgtaatctcagctacttgggagactgaggcaggagaatcacttgaagccaggaggcaaaggttgcagtgagctgagattgcaccactgcacttcagcctgggtaaaaaagcaagactccctctcaaaaaaaaaaaaaaaaaaagcgtgttgctccagttactactgctgcagcataacaaattatcccaaatttagttgtgtaaaacaataaccattttatcattttggaaagggcacagtgggacagcttgtctggggctttagatgggaaggtttaaagggtgaggatgacttgacagctgggagttgggacatctaaagccttgttctctgacatgcttggtggctgatgctggctgtcatctggaacctctgccagggctgctgaccagagcatctgtatgtggcctctccacttggcctgggcttcttcacagcataggggttccaggctccaaaggtgagtgtcccagtgatcaagtcagaagctgcattgcctcacaaattgtgcagcatcatttccatcttttttttttttttttttttttttttttttgagacagagtctcacttactctgtctcccaggctggagtgcagtagggcaatctcagaatctcggctcactgcaacctccacctgccaggttcaagctattctctcacctcagcctcctaagtagctgggattacaggcatgcaccaccacgcttgggctaatttttgtatttttagtagagatggggtttcaccatgccagccaggttggtcttgaactcctgacctcagatgatccacctgcctcagcctcccaaagtgctgggatgacagacatgagccactatacctggccattttcatctttttattggttatagatgattcacaatcccacccagattcacaggaagaggaattagagaaagttctagaagagcatgaggacaggaaatattgttgagggcatctttggaaaatacattctgccacacgcatacatcgcagtcatgtttgtgcctgtccaccatcccttatccaaagccgttggggctaaacgtgttttgaattttagaaattcttagaattttgaggccgggcgtggtggctcatgcctgtaatcccagcactttgggaggccgaggtgggtggatcacctgaggttgggagttagagaccagcctgaccaatatggtgaaaccctgtctctactaaaaatgcaaaattagccgggcatggtggtccatgcctgtaatcccagctacttaggaggctgaggcaggagaattgcttgaatctgggaggcggaggttgcggtgagccgagatcaggccattgcactccagcctgggcaaaaagagtgaaactccgtctcaaaaaagaaaaaaaaaaagaaattcttagaattttgaaagacaatatggtgcattcatgaaatctcctatcataccccttgagaggactggttcatcctgtaagcaaaaatctaaactcggtatggtggcccatgcctgtagtaccagctgttcaggaggctgaggcaggaggatcgattgagcccaggaggttgatgctgcagtgagctgtgattgcgcctctgcactccagcctgggcgacagagggagaccctgtctcaaaaaaaaaaaaaaaaacaaaacaaaacaaaacaaaacaaaaacactaaatatttcctcagtggaacatatgaatattcacattaagtggcataatgattataaatagctttctgtctattcaggtcaggttttgccactaaagaagttcaaatcaggtcagatcttgctgctaaataaattataaaaagccttccatttttaggtttcctggaatttgaattgtagctaaggatttatggaccagtatgaggaaaaaattggaacaaacttaaatagacatcattaggaaaaaggattttaaaaggtgaggccaagttatatgataaaatattacacagcagtgaaaatgaataaacttgagccacatgtatcattatggaaatatcttataaaaataatgtcaggagaaagcaagttgcagaacggtatatttatgataagtaaggataggccaggttttctgtattaaaaatagcccttggcctggcgcggtggctcatgcctataattccagcactttgggcggccgaggcgggcagatcacttgaggtcaggagttggagaccagcatggccaagatggtgaaaccctgtctctactaaaaatacaataattagctgagcatggtggtgcacgcctgtagtcccagctacttgggaggctgaggcaggagaatcacttgaacccaggaggcagaggttgcaatgagttgagatcatgccactgcactccagcctgggcaacagagcaagacttgtctcaaaaaaaaaaagcccctatatctcagaggctttatttattgctcatgctacgtgtcattgttggcaaaatggagttgggagcatctcctcctcattctggaacttagctggtgggtggctgctctgaacaacattgatggttatttgatagaaggaaaagtagagggaaggatgcaccggctttttttatttttattttttttcttgagacggagttttgttctttattgcccaggctggagtccagtggcacgatctcagctcactacaacctccgcctcctgggttcaagtgattctcctgtctcagtctcccgagtagctgggattacaggtgcccaccaccacacctggctaatttttgtatttttagtagagacggggtttcaccatgttggccaggctggtctcaaactcttgacctcaggtgacctgcccatctcagccttccaaagtgctgggattacaggcatgagccaccatgccctgccggattgttttctttatgtgtgtgatttcagccagcctgcaattgggtgttgacaagcacaagaggcccaacctgtgctctcccgagatttcaccaaggacctccctttctttaggccactcccctgcgctaaaaccttcaagggctctctatggctcagaggaaaaagttaagaatagtgatggctcccatggattgagcacttcctacatatcaggccctttatagagatactatttgtaatctgtgcacaatcctagaaagaaggaactgtctgatctccattttacagatgcggaaatggaggttccgagaggtgaagtgacttgccaagatgacagagtgagggcagggaggaaggaagactggcagccagatccatctaattccagggcccatgctgagccacagggtcagacctcactcttccagcctcacccctcacctctttcttttccttggcaggactagctgctccaaccaggcaggcctcttctcactgccccttgagcaaacctgtctcaatgtcccttcaaagaccatctagaatctcacagaacaccttttcctactgccagccatgctgagtcctgcccttatgacagtgtccctcagttagtcactttcctgtagctcatatgtcactaggctgcaagaatgtcttagtcatctttgcatctgccatgcccagcacacagtcactgcacacctgtcgtccttcaacaattattcagcgcctactggctgctgagcactgtgctaggtgcaaggatacagcagagagtgaaaccaaatccctgctctcgtgaagtttacattctgatctgggagaagaaaatgaacaagtaaacgcgtacatgtatagtagaatgtcaggggataaaaagtgctatggagaaaaatcaagctgaggaaggctatggatagagagtgctgggatggggagaagaaagctactttagaggaaaggtctttttgagacggtaacatttgagcagagattagaatacagtgagtttgtctgaggagctgaatagtcaaatgaatatataatgaatacatgctttagtgagttggaaacctaacttggagatgaaaaagtagtgtggaggaaggagtttgaggtagggatccctggatactcctgacatacttctttttcttccatttaaaaacataaactgccggaggcggtggctcatgcctgtaatcccagcactttgggaggtcgaggcaggcagattacctgaggtcaggagttcgagaccagtctgaccaacatggtgaaaccctgtctctactaaaaatgcaaaattagccgggcatggtggcgtatgcctgtaatcccagctacttgggaggctgaggcaggagaatctcttgaacctggaaggcgaaggttgcggtgagcagacaatgtgccattgcactgcagcctgggcaacaagagcgaaactccactgaaacaaacaaacagacaaaaaccataaccagtttatttatttatttttgagacggagtcttgctctgtcgcccaggctggagtgcagtggtatgatctcagctcattgcaacctccacctccagagttcaagcgattcttgtgcctcagcctcccaaatagctgggattacaggctgcctgacaccgtgcctggctaatttttgtattttgcattttttttttgaggtggagtctcactctgttgtccaggctggagtgcaatggcacgattttggctcactgcaacctctgcctctgcctcccaggttcaagcaatcctcctgcctcagcctcccgagtagctgggattacaggcacgtgccaccacgcccagctaatttttgtatgttttagtagagatggggtttcatgttgttggccaggctggtctcaaactcttcacctcaagtgatctgcctgcctcggcctcccaaagtggtggggttacaggcgtgagccactgtacccggcctaaaacataaccaatttattttgatgccttgttatttcagataggtcagaaatagagactgatcattggtacatagtttaaatgtaggaaggtttctctttctctgtctatccagaacagaccggatgttacagaatgttatggtataattgttaattctcttagtattactgtggttttgaaggataatgtaattttccttaggatttgctactgaagtattaaggcatgaagtactagtaaggcaacaacttacttttttttattgtttttttgagtcagggtctcactctgtctcccaggctggagtgcagtggcgctatcttggctcactgcaacctccacctcctgggcttaagagatcctcccacctcagcctcccaagtagctgggactataggcacacgtcatcacgcccagctaattcttttgtattttttgtggaaatggagttttgccatgttggccagactgatctcaaactcctgagctcaagcgatccatctgcctttgcctcccaaagtgctgggattacaggtgtaatcgcccagcctacctttaaatatttagcaaaaaataaaaattttcaacatatgaatatagatacatacatgtggaaaaatgataacaatgatcaaatccaggtggggagtgtacagatgtttcttgtactattctttcaacttttctgtatgtttgaaaatgtttcatagatacgagggttgggaggggccattgtgtgggccaacaaaaactatttgcaagttagatgattccggctagtctgggatttctggtccagggccttacctgcactatttcatcgaatccacatcacatccccgtggggtgggcagcactgggtccgattcacaggtgatgaatagagaagctcagagaggtaagtgactttcccagagtcacacagccaggagatgccaagccgagatttgaactcacatctatctgagtcaaaattctctgctttcctttttgatcgtttaagcctcttctcttccaccataccattctccaggggtattgaattaggtgacagctaagcactcttactatgtgcactttgcatgtattacttaaatcctcgcaacaacctgatgaggttgctaataacctcctccattttaccgaggcacagagagtttaacttgcgtgaggtcacacagctaacaatggaaaagctgggagtcagagaacctgggcagtgtggctctagactccccacttaaaggatcaaagaaacactgtaaaaagtagaaatcactttaggaatataaatcagaattattgttgattctcacagaatccctgcaaagtcctctcccctccccactgcttctggcattccaagacagtaccctagtttcagatatgtctacacagggacactggcctcctcagtccagctccttgaggctactgcttcttgccataaatttctaggactgttcattgccttctgaggtcctttgagctgatgctgatctgaaagcatttttttggatatggtcccatacccaggtgatggggataggataccgatttgcctgcaggataagaattagaggccatacagactgctgagacagttacaacctagaggtcaagggcctgacatgggagacaggccagttttgatttaagcccttactgcaaggcttgggtgaattgcctttccatctagaaacctcagtttcctcatttgtatgatagtaataataacagcacacatctcaagactggtgggggaatttcatggcatgagtgaagtccatgtttctcagcagaagtctagagacattgacaattgttatcattatgctatttctgatacagtaggatccctgactacagctccaagctcatccctatttccccccctacttcactggattttatccatgttggccttggattcaactcgggggcagatcagcccttttcctacctcagggcctttacacctgctgttccccctggtatgactgctttttccccagcttattcaaaaaagctggcgctttctcacccttttatatctcagttcgtgtcactgctcagtgaggccttccttgaccactccagcctgcctgcaatacatcctcctgttttatcgtattcatatgtgttaccagtacctgatattactagctgatttgtttcttttatctctcacataatgtaagtttcaagtagacagagatttttatcgttttttttctctgtagcatgcccagcgccaacaactgtgtctggcattcaataaataaatggtgaattgaatgaatgaatgaatgaatgaatgagggtgtataccaggccgaacccccaagccttgcagtccccactcttctgctgcagtgggcaacgagatgagtcagactttgtagatggccccttggcccccgagatgggggacgagctagcgcggagcacttgggagacattccccgaaagcctgggcggtggccgcactgggagagggtctgtcgccatttggcgattactccatgcgggctgctgtgggcgccgagcgagggtcggcggcgagcgcaagcgcgcgggtcttttgcgacggtgcccggcggcactggccccgcctcccgcgcgtgcgccccgcctccgcccccgccgctgcgcccgctcggggccgctctggcccccgcccgcttcatgtggcccggcccgcgacggccggcggctgggagcggcgaggcggcggcggcggcgagtggcggcccgcgaggcccgggaggcggtggccgaggcccaggcggtggcggcggcggcccaggaggcggcggacggggagctgcgggagcaggcccggcctggctctctagcggccgcctggctgcagcatgcgcgcccgccgggggctgctgcggctgccgcgccgctcgctgctcgccgcgctcttcttcttttctctctcgtcctcgctgctgtacttcgtctatgtggcgcccggcataggtaggaagggggcttgggaccgcggcggctgccgctctggccttgagggacccggggaatccccgcccctccctaaggggccccggccgggaggcggccctgagcctggtcctccgaagactccggagtcctggcccggctctcggggacgccaggacattcctgccctccgcaccccaacaggcgcccgggatccctctcccgcgccagcctccggcccaccccgcccctcctaacgccaccctcgcgaacccgactgtaccttcacgcccgccccttgctccggaacccccttcccgctcttgcctcgctggaactcccacttcccgctcctctgctcgagaactcccgcttccccttcccttccccggggtctcctcgaacccccattcccggcattccccgcaccccagtcccccgcggcgcgcccgctcttcgccgagcccatgtgcccgggtcccaggccgccccaccttctagctcccatccatcctcccccactccccatgactccatcgtttcctgctcccgtgagccccctccctcccctttcttcctctacttcccctattacatccacctccaggtcctcctccctaactcacgttcacctcttcagtggcctgatctctctgcctgccggtggcaccccccttccccttacagaggtccacccccattcaatctcctgctaatcccctgagcgtcccatgcctcttccccatctcccccccccccacctcgcgtacccacaagggcacatccttgtcacctttgcccccagccccccagactttcagccacagcttctttctcaactgaagacctggggaaggggtgctgtctgtgttctttcttccacttctgccctctcctagccttgagggtagatggtgtggttcttcagtattggatagtgcctgctctgcggacaaaggagaagtttaaattgtccgtagagaaggggatatgattggggcctttgggaaatggtaccaggtgagaagggggagcatggaggaaagatgtaatgggtactccttcttttcaaagtcttatcctttaaaggaaaggcggtctctggagaaactgaccctcccacccctcccccgcctgccccaagcatagtcttttataagaccacagggcaccagttaggacaggaagagatcagaaggaaagacagcatgaaggttaagagcggaggacacagaggtcagacttggattccaatctctgccctgtatgaccttgggcaggttactaagcctttgcatttctcctctgtaaaatgggaatgtgagtcccaatctcatacagtgttaaggatggaagtagatacatgttctttaaaagcacttaccactgtacctggtgcttgaagagttttaaaaataagtaaataaaggcagctattacatgtaacttccaggaagaagggagttaggtggaacgcttaaggaatgtgtttgcctgacttggcatcactatgaggaaacctcagtttatggtgaaaaatgatcagaagatgctgctggggtaggggcagggagagtaaattctgctagaaaaattttggattatatggattttaggaaagggttgatggtttagctgtagggaaatgccttttaggattgtagcaataactagtgccattctctgttgacctgtcaacgcagaactagctgaatagagaaatttccagatagagcaggagatcgtctcctgattattttttaagcatattttacttgtggttaatgttgatgttttgaactatcaactagatctgggaagatagaacaggcagcatcagattgccttgtttacaaagtgtcatcacgaaaagtgttcctctaggaaggcataatatgtggcctgatggatttgatgagtagattgtaaaagggttgggattctggcagaacaagaagagataactaattagtggaattaactgagaaaagagttcattagcatgttggctattagactctaataaaaatgggtgtgaaaagatgggatttggacctagaggcagtcttagagccataatcctttttttctccttttgtgaaagtgacaggtacttctggtctgagtccataaatcagctatatctaaatggaaaactatatcccactgggatggtaatcacccttttgatagaaaggttagaagccagattcttcaacagaaatggaacttatcaatttaattaagattcctcaacagtagatttttaggtcagtggaacccctgtgtaaagcgatgtgctactgccatgcctagaatcctatatcactgatagctgaaaaagaggcagagcacttacattttcattagtactgtatccccttgaatgtaagccttctgaaggggaattctacttaggatggaaattttgtttgtgagaaaggggaacaataaaaaaaggatgtggagtagttacatttagctgtttgcccttcctactaatttttttttttttttttgatagagagtctctgttgcccaggctgtcgtgcagtgatgctcatagcttactgcagccttgatctcctgggcacaagggatcctcctccctcagcctcctgagtagctgggactccaggtacatgccaccctgcctggctaacttttaaaacagttttttgtagagacaggatctcactatgatgcacaggctctgttgaacttaaatttttagaatgtctagctttggacagtggggcggcaaattttttcaaggttaaggcaatctggagaaatagaaggttgttttgtgttccttgggttatgaagaccttatttgaatagttattaaaatgagcttagaaaataatactaggttggctgggtgtggtggctcacacctgtaatcccagcactttgggaggctaaggtgggtggatcatgaggtcaggagttcaagtccagcctatccaagatggtgaaaccctgtcagtactaaaaatacaaaaattagccgggcgtggtggcaggtgcctgtaatcccagctactcaggaggctgaggcaggagaatcacttgaacccaggaggcagaggttgctgtgagccgagattgcgccattgcactccagcctgggtgatagagtgagactctgtctcatacacacacacacacaaaaaaaaaaaaaaaagagagagagaaaataacagaaaataacattaggttgagccatatgaaatttctgtttttgcaggtcaaaaacagttgtatatcagcagtttcatgtagttcactttaataaatttcccaatgacaattctgttttctggcacagtggaattattggacttatatttccttctaggtttaactttttccagtgcttgcttttgatttgctttgtataccctgtggctacattgtgctcaagggctagagatatcatcactccaagagattcagaaatagtagacttgaatttgaaataagaaaaatcatgtagctataaatgttatgaattgtccatgtatactgtaacccagccaaaatttcagcctaaccattaacttagtatttttgagctctaatgccacttaatgtgggtgacccgtattctaagagcaaaggaaacttttcttggacttgagagtcatccgtgaaatggggtaccatctcacatagaaaattggatatgaggaaaattactaaataagactattaatagtgtgtttgcaaaaaatataaaatgccctcagctactataataataccatttgatccatttaatgttttaaaaatacgacttcgttggaattttttttttttttttgagacggagtttcgctcttttgcccaggctggagtgaaatggtgtgatctcagctcactgcaacctctgccccccaggttcaaaggattctcctgcttcagcctccagaatagctgggattataggcgcttgccaccactggctaatttttgtatttttagtagagatggggttttaccatgttggccaggttcgtctcgaactcccgacctcaagtgatccacccacctcagtctcccaaagtgctaggattacaggcgtgagccaccgtgcctggccgggagttgtgtttgtattgttaattttggaagtagtgttttatatcagcaatttaaaaggagaaggttgggacagaaagtgagagagtgaaagagagaaagtggtggatttgataaggagcaaggtaataatgttgcataaaaatgtgatgtcccttctcttcaaccctctaccctctggcctttatgattctcatttatttaatcacttgttttatttgcaatgttgaaatatccctattcccttcagggttctgcagaaaacttttgaacttatttatgacctgttaacttaaaaaaaaatccgagagctcagagtacttccgtactccagtctgatcaggtcttttaaaagataacagaagcgagctatttataaatatacatatgaggtgctgatttaaaatcttaataagtttatggtaccatcatatggcaaggttgtgtagaggttactgaccttagcaaattgtcgaaacagttatcggtttcaagagaggtgcctgtgcatggttaggggtaattgtttatgcattgatgactttttttttttttttttgagatggagtctcgctctgttgcccaggctagagtgcagtggcgcaatctcagctcactgcaacctccgcctcctgggttcaagcaattctcctgcctcagcctcctgagttgctgggattacgggcacctgccaccacacccggctaatttttgatggggtttcaccatgttggtcaggctggtcttgaactcctgacctcgtggtctgcccaccttggcctcccatagtgctgggattacagacatgagccattgcgcctggccgatgacattttattaattgaaattctgttctacatttaaactaatttttctctttccttgattactgaagaaaagagatggggaatgattttgacatttttggcctgcttagttccaagagaaatttgatttatggctggcttttggaaggcaggagccagtaattctaatcttacctgatttgatcgaatgaccttgagcaagtgacttgatttcaatgatctgatactttcaaaaaatcccaaagccctttgaaaaactagaactgcatcttagtcaatcttttagagaatttttaagaaatcatacctcaataaagctagtgagatgctttcatatatagaaagttgataattcatttacattctacataaacattggtcctaagattttaatttatttttatcttactattttttgagatgaagtctctcgctctgtcacccaggctggagtgcagtggtatgatcttggctcactgcaacctctgcctcctgggttcaagtgatcctcctgcctcagcttcccaagtagctgggattacaggcgcctgccaccatgcccagctatttttttttttttttttgtatttttagtagagacggggttttaccatgttggccaggcaggctggtctcaaacttctgacctcagatgatacgcccaccaaagcctcccaaagtgctgggattagaggtgtgagccaccgtgcccggccattcctaagattttagacaaaaaaaaaaaaaaaaggctgggcaaggtggctcatgcctttaatcccggcactctgggaagccaagatgggcggattccttgtgtccaggagttcaagacgatcctgggcaacatagtgaaacctcgtctctactaaaaatacaaaaaaattagttggatgtggtgcctgcctgtaatcccagctactcgggaggctgaggtcagaagatcacctgagcctgggaggtcgaggctgcaatgagccatgattgaaccactgcactctgtctgggtacccagagtgagaccctgtctccaaacaacgattttagagaagatacatgttttatataatcaaatacaacttttcctaataaccacatgaaaatttcagattttccccattcaagtgtagtctgaaaatagccttttttttttcttgacatgaaaaagccctctgaatccctcagcacactcagtttctgagctttctagaatgaaatacatatggggaaatatgggttacttcacttcagagaattaaagagccttatcccgtgaaggacaccttttttttttgctccaaatccacatgcactcttgcgcacatatttgagtatagtgttgtcccttcttcttaggaggaagccgtgtttggagaacaggttgatgttacaaaagtaaacagcaccacttttgaccaggactttggtgatgttttatgttctctttgtggagtttttgctatattggaagccaggtcttgggtttggagttgaaattttctttagtagaaagaaagtggttggttttggatagtctcagccattcaaacagtattaattactgttccaggatacctagccggcagatgattctgttccagcatcaactccccccgccccagctgaacaggccagtgggagccttgtataataatcaccaggaaggaggggctctgtgttgccatgcctctttagagctctctgagagagcagaaattccaaagcagcagaaggccagaatacaattgacttcttgcttccctaaattttgctgctttttagatcttggaagtatgttcggcacatctaatcacataaggcaaagaaaaaccttagcacgtaagaagtgagcaatgtaatgctgctgaggcctgtcagagaaatagagaaaaagggaggttaccactggctaagacaaacagataatcgtaagcaagcaggttgggtgtgggctgaagagaagaggcaggcctatgtgcactgtggggaaaagggcagttgttcttcactttctagtagccaataaaggtatgcttgcctttgcacacgagttatgttttgtagaaaattgtgaggaaaaattaatgggattttaagatccacttaaaatcctggagctacccaggtacccagcatttgagtgtcatgttatcagttatgggagatctttgaattctaaacttttgactacatctgtcaatttatagatgatcatataagtcaagttgagtcattaacttgcccaaagttgagaattattaagatattcctgaagcacatacaatgtggttgaaaagagatctgggttcagatcagcttggagtgggcagattcattttgttttcaaatagaggatactacctttctcaggctacttgtcagaattaagtagaatatgcacataaaagggcttagcacagagcttgacacaaaggtccttatgtttatgattttttttttttttttgagatggagtttcgctctcttgttgcccagactggagttctatggtgcgatcttggctcactgcaacctccgcctcctgggttcaagtgattctcaatctgcttcaccctcctgagtagctgggattacaggcacctgcaaccatgcccagctaatttttttttttttttttgtatttttagtagagatggggtttcaccatgttagccaggctggtctctaactccagacctcaggtgatccgtcctccttggccttccaaagtgctgggattacaggtgtgagccactgcacccggccttatgattcttatttataaccataggaggtgccctcttggtctcatgctcatattaaactgagattaggtttgggctcctgtctgactttaccaataactaggtatgaattttttttcctgttttctgtgaactgaggagactggactattgtgcagattctagggtccctttcagatctgaagtttcatgattctgagcatgtgtgaattgaacctttgaagtaaagaaggaatcattttgtcaagtaaagacactgtcttttaaagttctgatttcccgttgacttcatctcctccccagactgctgcggtgagaatggtgacatgcttgtgtgtaatcttcagactttatagtttcagtctttggggtgaatggcaaggtccccactgtgcagtgccattgctttcggacattagcctgggaactccagacttcgtgtctctacatggaaatctgtctttgaaatcattgtcactaaggaagggagggaaaattgtgctgtcttggtcaaaggaaagaaaatcagaaagaatttttggaaatatctttgggatgttaagaccattttttcctttttttggaccattttttttgtcctgtgggctaatccttttacattttgatctgctaagccagtcctttcctctggcttcacacttcagcttttaagtgtgaaatagagccccagactcattacctcaatcctctaggtagttggatgttaaatgaaaatgaatattgcatttggattcagtaattctttttatatggtgccttttatactgaggagcattccagctcctgctggttgcatgaattcagtgttttcccaagcatgggaatcacattaaataatttagagtgctgccccttctctacttcctcttttttttttctccttttgttagtttgagtaagcaattattagaccctgggtattgttcctctgcctttgcaggtgacggagctacccaggtactttgcagcaatcagaagcgaacctgttcattgtttctgaggcaccttcattactgtcatcaattatgaacagttctcttaggtggttagtagcctaattataaagatgaaaaatattgtggagtattgggtaccggaaagagtaggttgtaagacagcaatgttgtggtttttttttgtttttttttgttttttttttgagacagagtcttgctctgtcgcccaggctggagtgcagtggcgggatctcggctcactgcaagctccgcctcccgggttcacgccattctcctgcctcagcctcccaagtagctgggactacaggcgcccgccactacgcccggctaattttttgtatttttagtagagacggggtttcaccgttttagccgggatggtctcgatctcctgacctcgtgatccgcccacctcggcctcccaaagtgctgggattacaggcgtgagccaccgcgcccggccgcaatgttgtgtttttacatgtcagtggatccagggtatgctagtgagcacaactgtatattatttttattaaaaagttgtaggatatttaaatatcagtaaagaggtaactttttccaccccctcccaagtagtcctaaaagtatggataattgacatttaaaccttcttcttaattctactgtgttgaacaatcataagcttgggaagatggagagacagggttattttttcctcacagagctgctcattatcccattttaagttctactttcaggaaccaagcctaaattgtattcctgatcaggatgtgtgtatttgctgattggtagacttggctggtgaaggtcataaaatagtgttttcctaaatactgtgttgtgtcttgcttatgtaattgaaaaaggaaaaaaatgttttattcctgttcagaaaaatgacagaattgccaacctaaggaagtcaaaccagatagaccaaaaatgatagtagactgactttaggattcatgatatagttattttgaatctgtattttttttttttttcctgagatggagtctcactcagttgcccaggctggagtgcagtggtgcgatcagggctcactgcaacccctgcttcctgggttcgtgtgatactgctgcctcagcctcctgagtagctgggattacaggcgagcaccatgacccctggctattttttttttattattattttttttttgtagaaatgcggctttgccgtgttagccaggctggtctcgaactcctgacctcaggtgatccacctgccttgggctcctaaagtgctgggattacaggcttgagccaccatgcccggctgaatctgtatgttttaaataaaagcatttaatgctttaacttttttagaaaagctcatttgacccatatcctcataatctatatagtcatgagagggaagttttctggattgtaatttccttgtgcctaggatggtgcccagcacgttgtatgtacttaaatatttaatgaaatgaaagaagaaactattgtctgggcagaccagcctcttggtcgttggactgcatttactttggggaaaggaattaattaatcctgattttgaagtgactgaattaattttttccaaatctactttgtacatttttcttcttttggtggtaaaatatgaaatttgccatgtatctattttagtaatttaagtaattaagtgtacagtttagtggcataaattacattcataatgttatgcagtaatcactttttttttttttttttttttgagacggagtctcgcccaggctggagtgcagtggcgcaatctggtctcactgcaagctccgcctcccgggttcgtgccattctcctgcctcagactgtcgagtagctgggactacaggcacccaccaccaagcccggctaatttttttgtatttttagtagagacggggtttcatcgtgtcagccaggatggtcttgatctcctgacctcatgatccgcccgcctcagcctcccaaagtgctgacattacaggcgtgagccaccgcgcctggccagtaatcactattttttagggtttttttttgttttttgagatggactctcgctctgttgcccatgctggagtgcagtggcactatcacggctcactgcagcctcaacctctcaggctcaagtagttctctcacctcagcctcccaagcagctgagaccaccagtgcgtgccagcaagcccggctgatttttacattatttgtagagatgggattgccctatgttgcccaggccggtctcaaactcgtggactgaagccatcctcccacccccgcctcccagagtgctgggattacaggcatgagccaccatgcccggcctgttaggagttctttacggattctgaataatattaaacctttatcagatacatgatttacaaatattttctattctgtgggttgtcttttcacttctgatagtgtcctttgatgcacaaaaaagtttttaatgaggcccaatttacctaattttttgtttatgcttttaaaatacactactttgtaaatattatcacttaccttttgctccctacagtgtgcccattctttttctgcccatgaaggtctttataagctactgatgtgatttttgagaaagcaggagtcatggttttttttgtttgtttgtttctcttgctctaacgtgtttaagtttgaagctgttttctttctttattattctctgtctttattcatttatttagattcggattcggcaggcgacacgggatttattttttgccatacaggaatgaaaagacatgatgatttcgaagatagggaaaagcacattttgtttggtatttcctttttttgttgttgttttttgaggtggaatcttactgtcacccaggctgtagtgcaatggcatgatctcaactcactgcaacctctgcctcctaggttcaagtgattctcctgtctccgcctcctgagtagctggggttacaggcgcatgccaccacccccagctaatttttttatttttggtagagatggggtttcaccattttggtcaggctggtcttgaacacctgatccacctgtcttggcttcccaaagtgctgggattacaggcatgagccaccacgcctagcctgtttggtattttcttagccccaaatctccattaatcagcatcatttatgttttggtgtttagtattaagtagttacaataaagaccctgaggcatgactttcagtttggtattgtgggtgttttttttgtttgtttttgccttctaattctttgaaaattagtaatgctttattcaccagaatattctgtttccccgtgccttcctcgtccacaacacaggcacagggtggcaggtggtgaagagaaacaggctgccaagatggtccctagatgactaggaggggcgtgatgtgtgcacagggtttttttttctgttatcctttataacatcagaaaatgatgtcaaatgctgacgaatgaggaaatagaaaaatctaacgtgtaaaagctgctggactcccacagctctgacttagtaaaatttgacaatttgatacatatttttttttctgatatcagctgaactgcaaatgtatttatctaaatgtgagtgataaaaatggtgattaaaggcaggggtgggtacttagaaaacttttatgttctggtgcctgtgataaaagagaaaaaattacaaactcatctttgcatttgcctgattttgctattttcttatagctaaattcattaatctctgtgtaacacccctacagtgtgctagacttgaaggatacagtgatgaacaaagcagacagtgtatcactgttattttttaagtcttctaaggagcatgcttcactttagtaaatttttagttttgggtgattttatatttctggacagatgtgtttaattgagggccaattcatctggtgttcagttggagttaacattctttaattgccaggaatgatagtgaataaggtagtcacccccttatccagagtttcactttctgtggtttcactgagttctgaaaatattaaatggaaaattccagaaataaacatttcacaaattttaaattgtgcaccattctgagtggcgtgatgaaatctttcaccatcctgctctgtccccctttgtcttgcctgggatgtgagtcattcctttgtccagcatacccacgctgtatacacatttagtagtcgtctggattatcacatcatcatcgtggtgtcacagtgcttgtgttcaagtgacccttattttaattttattatttgtaatacttttgaattttaatcttatggccaggtgtggtggctcatgcctgtaatcccagcattttgggaggccgaggctggaggatcgcttaagcccaggagtttgagaccagcctaggcaacctgggggaaaacttgtttctacaaaaatacaaataaaaattagccaggtgtggtggcacatgcctgtagccccagctacttgggatcgcatgagcctgggagtttgaggcagcagtgagccatgatcactccagcctgggcaacagagtgagactctctcagaaaaattaactttacttaattacttttattattgttataattgttccattttattgttgttgttgttgttgtaaaccaaattgtaaaaccattttatatttgttgcaaaccaaaaagtatctgagacaggtctcaatttatttagaagtttattttaccaaggttaagggcatgcacccaggcccaaggtctgtgcctttctcctaagatgattttgagggcttcagtatttaaagggggagaaattttaggaaggcgtggtagataggaggcaaatggttacattcttttgagtctttgatcagctattcacatgtggcgggcaagggtggggggcagcggaggaatagtcccttatgcattcatctagctcagtgaatctgcatttttacataagacaaaatatacttaccgggcagaggaagtgatgagattatgcatttgtctcaggtaagcagaggaatgactttaagttctgtcctttgtcccatacctgtgaagataagctgtcaatttacgttgtcagggtgaaattcagcagagtggttgtagggtaaggatgttgaggtccacaaggaatttcctattgggcagattgtgagggaggtaggtttgcatgatgccgttcctatcttgacttttctctttgacttagtgggtttggggtccccaagtttattttccttttacattgttattcatcttttactgtgcctaatttataatttaaactttaccataggtatgtgtgtataggaaaaagcaatgtatttagatctggtactacctgcagtttcaggcacccactggggaatttcagaacgtatcccttgaagataagggaggactactgtatgattcatagcacagtttcagattaatcatgtccgatgcagtcagatgcttgatggttatatggggcctggtttgtgggcaaatgactagtggggtttttttttttttttttttttgctcatttaggattcaagatgggttttaaccttttaagttacaattaagcactttgtgtcgtacagtatgtatacaataatgctttgaaatggctagtcatgaatgtattaatggtttgtcttgcactgaaacctgaaatgtagatgaaaaagttgataaacataaggcaatcagtactgattgtcattgtcatctaccccagtacattctaagtgtggtagatacagtaattcttatatgttgctattaacgtcatttctgatttttgattagaaaaatatttaggttaatggctttcttgttggtttcaaatttatagtaaaagctatacctttatgtcttgaatctgcttgccagtctttgctttgataggtggtttttgcttaggctacgataaattgtttcatcttttctaaagagggatgaggaagtatttactttgtgaaattggaaaaccgtgtggttggtgtggaaaataagcatgttattaataaacagctagtcttgtgctccatactcttggatggaaggtagaaataaccttgcctctattgctgagatttaaaaaaataaaaagctaggctactacccgtgccttcctcgtccacaacacaggcacagggtggcaggtagtgatgagaaacaggctgccaagatggtccctggatgactaggaggtgtgtgatgtgcgtccagttgtctggatggggcaactggaatccttcattgtgtggttcatgcttgtgtgtgtgtgtgaatgcgagagtgggaggaagttcaatgttttggctttggtgtgggattaattttctcttcgattgttaatttggcatacctgactttttcattctggtttaaagtattagaaatcttaagatttgtgtgaattagaagattgggatttatttgaatttcatttggcactagggaaaattcactttaggtaagagctactttttgggttggctttatgttcaaagcagttttttccttaagagtttcattttattatggaaattttcttttttctttttttatttttttgagatggagttttgctctgtcccccaggccggagtgtggtgccaccgtctcggctcactgcaacctccactttccaggttcaagcaattctcccacctcagcctcccgagtatctgggattacaggtgcgtgccaccatgcccggctaatttttgtagtttttactagagatggggtttcgccatgttggccaggctggtcttgaactcctgacttcaggtaatctgcctgcctctgcctctcgagtagctgggattataggcatgagccaccgcgcccggctggaaatttccaaacatataaaagtaaacttaatagtacagtataatggaccccatgaacaaaagtaatttttctaacctcaaaagcaggggcagtttatttaatcaggtaaaaactgagccttaaaagtcagactttgctaaaagaaaacagtatttttttcactgtcctgaatataacattaaggaaataggatttggttaggtctagataacatttaataatttcaactgtgttaaagacaaaagtaatttttgatgtgaccatggacttgtcatgaaaaatataaaggtgaaagggattccatcccccttcctctaaacagaatggaacataagcacaggtttaggctaattcataacctggatttttaaagcttttacatagttgggtttcatgttgttcagatgtcttactaaaccaggtatctaaatgagtgtttttctgttaaaaaaaaaaaaaaaaggacatgtccccttcctctgccatcccttaatcacggggctccactggaatagagatgggcggataaagaaggaaacttagtgttagcagctccagtgaactggtatgaggtagaggagggttgaagccattgatcacagtgacgtttccagaggatttaagctttcccattgtcccatccttcatttgaaccctcagaatgtacagccagaagtccaagagcaagcgtctctgcgaagggtaaaccttccaggctgtgctccctcaaaggcgccgctgcgcttgaggagcaggtgctgtggctgctgaagtcaggtgctctgggagcagacaacaactgcctgggtgtgtagcacctgtgtccttttggctcccctggccttgtcttctgagactctgttgttaatttctttagctgtttatgtcagctttgaccaaagcccactgcaaagcttagaagggtaaggaggcaacaatatccctttgaagacttattttggcacagattttgtgatttgtgaatagtaacattcctcagtagccacaaattaaacaacatcgatctaattttggtattaattagttgtataattaaaatagtaaaaccatctgcatagattgaagctatagtttcaggttgtattatatgtgtgaaaaaccgactcttcattgtgaattttgagtagacttcccagtagattatttatgtaagctgtgtcatcagaaacattccagaatgaatcacgtttaattaggatctaacaaatgttaccacctttgttctgttgaacaatatttttaaaccattaaatcaacttggttgataaaaggaaattgcagtaatttattcataaccctttcatcacaagtgttttcacttgtgtccttgtcattgtatacacagatatttgaaaattttgcacctcaggaattgctgggctgggagaaaaaggatggcagcaatttaaatctgtatttgtgctagaataatcttttacaatctctttgctataagatcttttcctggccagttctgttttccccactataacgaaacatcctgtcttaatataagattatttctggcaagggattcttgaaagctgtaaagaaaacatacctgctgtctttaccgataatgtggaaaacttcatgggaaattctagccccttcgatgtcaagtctatttaatctcattcctttactattaataaatttaaatagatgaatttcaaatctcattaaatgttacaacagtatgtctaattagtttttttctttctttgattggattccacaaagtagaataaagctcttctcagaaacctgtttggacttagtaattatttttctctagattgttattttttctctagtttgtcaagagtgagtaaactttgaatgattgagagtctgttatgacataggtcaaatcaattgagcaggaccaaagagttgggctaccctggtcacattaactatatacatttactgcgattatttccattgtttcttcatacacagctgtgtgacacagcgtgccttttgcatcggtaaaggagttaaatctgtagttaatttgtgtggcattctctaggctgagccaggctttcttagccctttggaagatcccacatggaagcattagacataatgaaaactcagcatatttctttgcttctgagttgttggaaatgattagattgaaactcaatgtgttgttttcttttcccacccccaccctttagaaaggtatctgtatgtacagaatgggaatatcattaatgtcatgcagtttattcttttctacaaaggtgattatattaaatagttctgctataacatggcataagcatttctaacagtgaccacactggccgggcccggtggctcacacctgtaatcctagcactttgggaggccaaacacctgaggtcgggagttcaagaccagcctggccaatgtggtgaaaccccatctctactaaaaatacaaaattagccgggcatggtggcatatgcttgtaatcccagctactcgggaggctgaggcaggagaatcgcttgaacccgggaggtggaggttacagtgagccgagattgcgccattgcgctccagcttggcgacagagcaagactccacctcaaaaaaaaaaaaaaataaaccacaacagactgtcatgataggttcacttcaccctgtggttaatgagttaatccatataaagcagtggtctccaacctttttggcaccagggaccagttccgtggaagacattctgaaaggggctggggattgtgtagggggttgtgtgttgtgccactccagcctgggcaacatgagcaaaagtctgtctaaaaaaaaaaaaaattactgcactatgccagattgttcaataaaagccatagagattatgaaaaattggagttaggtgtgcaaaaactgcattagttactcatcaccaaaaaaaaaaaaaaagaacctaatgaaaacagtgcaggtgttcacatgttaagcagttaaggaatactgtaaatatggcactttgaaaatctaaatctgtggtttgctcatagaagtgagcatcagcagggttgcagcttgagttattgtgaagtggtagaaggagggttctctgaaatggcattgagagttctaacatcagatgtgtgtggcacccacttggtgaactgagtagctggtagatgcttcagggtgtgtgtgtgtgtgtgtgtgtatctgtctgtctttccagctgggtgtagttttctgggttttcctcgtggatgaaattgtgcatatgcaaaggcagagttcaggttatgcgcatattgttcccaggtgttatcagttgtgttagagcaaacttgccttccctttccctttccctttccctttccttttccctttccctttcccttctcagcagggccttgctgtgtcaccaaggctggagtgcagtggtgtgatcacacctcattgcagcctttacctcctgggcccaagtgatcctcccacctcaccctcccaagtagctaggaccagtagctactttttaaaaaatttttttgtagggactaggtctccctgtgttgcttaggctggtctcaaattcctgggctcaagtgaccttcccacctcgccctcccagagtgctggggttacatgtgtgagccaccgtgcccagactttgatttgcctttgatttaggaagaggaagttacagttttcccaactataactttcaaaagttatagttgggaaaagaaaaatagatgcgcaaatcggtggtaggtaggtgtgaagcctaggtaaacccattcttttcccatctaggcacatcgcctctctatacagaaagggcactttgaagtatgaggaacatactttttctaacttctttctggaaataaatgtgaaaattagggtgttaataaaaagtacgtttacataagctgtctgcttttcaaggaagagtggcttagacttctgctagcttagttgatcaggtcatctcacttctgttatttttttgtaaatctaatgaggtggctaattatcgaaagtgaggtgtccatcctgtcactttgagttatcttccaggtgcagagattaattttgttgtgcctttgttcccttcattaactgtttgtgggtaggcatttgtaaggtcactttctgggattggggaacctcccctgaggctaccccttatgcaaagagttgttctttatgcaaagctgcatacctgccctggagtccacctggcaccttaacctcatttgcactgttctctaaacttctggggcctagctagtcacctgagcataagcgcacactgctgccagcaggcttttggaaaatgtcttaaaaagtggtggcgaaagtaagcttgtttcttgatgatatgtaaccatgaatagtgaagacgtttatactcagaattcctagactcctagaaatcagatgtagagagcttccctattagtcatctaccttagggcctttagaaacagcaaggtagagatactgtgttgtgttgtttaggacaaggagaattagcctgcaccttggagagagaaactgcaatgagctgtggagcctaatgattcttagctcttgtccccgctctgcaacttactggtttggtgactttgggccagttactggaccattctgttcgaacttcagtttcttcattggaattgatattagtttctacctgatagtgaagaacttagcaaagtccctgtggtggcaagcatatgcagtcagtgttattgctaccatgattgatattctgactattgggagattataatctcagatgtgttttcaggatgaattcacaaacacagtcatatgttgcataagtatggggatacatcctgagaaatgcgttgttaagctattttgtcattgtggcaacatcatggagtgtacttacaccaacctagatggtatagcctattacaccccttggctgtatggtatagcctattattcgtaggctacaaatctctacagcatggtactgtactgaatactgtaggtaagtaaatgtgtagctaaatatatctaaacagaaaaggtatagtaaaaatacagtattataatcttagaggatcaccattggatatgcagctagtcgttgactgaaacgtcattatgcggcacatgactgtgtaagatacaacaggatctgaagaatcgcaacattttggataattttttttggtgtgtgtaatttttcaaaaacataattgaacttacattatatgtacagttttatatactaactaaaaacgttaaatgtagtctagaggcagtgtgacaggttttcagtggaaaggatactcaaaattattgggcttacccctgtatcttacaggtgggaaaacagaatcatggaaaggtttaaaggatatactcagcctcctaggcaatgccagcactacaactgagtcccattctagttgttattccaaggattttcaccagtttacatcaggaattttcataaagttggcattggatgatgatatggtgataccaagatattttctattgtttttgttttgttttgttttttgagacagggtctcgctctgtcacccaggctggaatgcagtgatgcgatcatagctcactgcagccttgacttcctgggctcaggtgatcctcctgcctcagcctcctgagtagttgggactacaggcacgcgccaccatgcctggctacttttttttttttcttttgtagagacaggctctcactttgttgcccaggctgggatgttttcttttggatgggagtgaaaggcttatgtataaatagaaacagcacactcaacatacctattgtttttataaggcacactacagtgaatacattaaaaaaaaaacagtaggtgagaatactctgaagatagtgagaaagcataattgtaggggacatagtttttaaatggttgaattactgtctgaggcctctttacagacatggggtaagtgggatgccaaggtgtgttgttgccaggagaatcaggttatatgtacctttgggtggcagcaaggataaatcaggacaaagggcattcattcattgtagcttcataatcacagtgtgataaaatcagtcatttggtgatcattacaggtcagtcactgcctagggttttgttttttccccggtatctttattttggattttaaaaataatacattcagtgtataaaatttgggaaatacagcgaagcataaggaaaataaagacaatctaaaacctcataacccaaagataacacactgttaacattttggtgctttttcttctggatctttttttaggggagtatgtgtaatttttcaaaaacgtaattgagcttacattatatgtacagatttatatactaactaaaaatgttaaaactgtagtctagaggcaaagtgactgtcaggttttcagtcctgtaagaaaatgtggactctaccatatactgcagaagaacatgttttggcgtgtgggtttttttttgtttgttttgtgagactctgtcactcaggctggagtgcagtgtggcaatcatggctcactgcagccttgaacctcccaggatcaagcgatcctcccaccttaacctcctgagtagctgggactacagttacgtagtaccatcacgcctggctaatttaaaattttttttgtagagacagggcctcactatgttgcccaggctggtctcaaactcctgggctcaagcagtccttccacctctgcctcccaaagtgttgggattacaggcgtgagcccctgctcctggcctggcatgtacttgatataggagcagtgtctaaagctggctgattgccccgcaccgtcattttaatcagaatgactcatttttcccatctatagctagtctcaaaaattaataataaattacttaaccctccaggaagtttcagcaaacacccggttgatcatttaccactcttatctgctatctcttaaataatattctaggaccagagcacaggcataatctgctaatttacgttaaattatctgtctgccagttagagccaggtaactacagttcacagtagaggcagcaatccattcttgccaagaaaggattccatttggttatatgcagaagggaaacccaggtattcaaggaatataaattatagataaattgcaatttcagggtaaggattcttctctaggatattttgtgtctccatgaattcataaaaatagaattttaggaaacaagaatacttgtgttgaacatatcaatcggtatgccttctttgagactaaacatttcattgaaaattagctgttagattgataccatttaaatggcttatatgcatttaaagatgtaacagatataacttttttgcaactttttgtaagtattaaatttagcttcaggaatatggtttcatttactattttataattaaaatataattgtcacccccccctttttttttttgagttagagtttcactgttgttgcccaggctggagtgcaatggttcaatctcggcttactgcaacctccgcctcccagattcaagtgattctcctgcctcagcctcccgagtagctgggattacaggcatgcaccaccatgcctggctatttatcccttttaaacattacttttctaagactgtctcttcacaccagagacttgaagattgttcaaagtgccgtgggttaaaaataacacttgtggccaggcatgatggctcatgcctgtaatccccgcactttgggaggcggaagtaggtagatcacttgaggtcaggagttcgagaccagcctgaccaacatggcgaaaccctgtctctactaaaaatacaaaagaagtagccaggtgtagtggtgtgtgcttctaatcccagctacttgggagattgaggcaggagaattgcttgaggccaggaggcagaggttgcagaaagctgagatcatgccactgcactccagcctgggtgacagagggagactgtctcaaaaacaaacaaacaaataacaacaacaaaaacacttgtgctatgtatgcctagagacctagctcctcagaacctgaggccaggagttccaggacagcctgggcaatatagcgagaccccgtctccaaacaaacaaaaaaacatttattctgagagagggaaataagggtagggattgactggaaaggggcttgggaaacctttcaggagtgattgtaatgtttcatatcttgatagggatttagattacacaggtatgtgcatttgtcaaactccgcaaatgcacacctattcattgcatgaacttttacaccaagaagggaaaaaaaatctaattaattaacatgcatgttgaagtgtttagcaggaagtatactgatctccgcagtttacttggaaataggtcacaaagtaagatggattaatggatatatttgtgataagcaagttaatagtggaatcaagatggtgagtatatgggagttcactgtaaaatcctttcaactttgctgtatatttgaaatttttcataataaaacggtttaaaaatgttaaaaattttcacatcggtgattagatatcaaaaaagatgttacaaatttgtatctgtgaaattgtagttcccacggggcagaaacggatccattgaatcacaccactcccgtgatcattttaactttgagattgataagagagtgagctaagaattatcaggttcttcatcctcagtatgttaaggatctctcttatctttctcattgagtctaaatattttttttctgattattttgctgtctttgttacttggaaatcaagtaacataaatcctgtataattgtcaaagaggtgacatctgtgtttatttctgcatgtatcatccaatggatacctaaacactgttttgctgagacattttctcaggctagcactcaatacaaatctgtatttttctattctccttccttctcctccagctttcagtctagatgttttctgatggcatagcttttggatcaatcattctctttttttgctctgtcttatccaatattaaaatattacaccctgttttttttttttttttttgagatggagtttcactcttgttacccaggctgaagtggaatggcacgatctcggctcactgccacctctgcctcccggacttaagcaattctcctgcctcagcctcctgagtagctgggattacaggcacgcgccaccaagcctggcaattttgtaattttagtagagatggggtttctccacgttggtcaggctggtctcgaactcctgaccttaggtgatctgcctggcttggcctcccaaagtgttgggattacaggcgtgagccactgcacccggccttgacactcattttgtcctatcttttggcatgcctgttaatttttattgaaaagtgggcattgtatataaaaaaattgtagcgaccctagatgattttctaatatctagatggcttacaccatttgctaggcaaatagaatgggggctgattccatttatcttgtctgagctgaccacagcaagggcgtggttttggtcaggctccatctctttttggtttgcctctactctttggaagtaccctgcaggagttctggctaagaactggggcccttcccccatggtgtgtcctgaactttaatctttgtcccccacggtgtgtcctgaactttaatctttgtcttcttagtacatgggattggtgaagaaacctgctgtgctattcagaggctttctgcttggtttcagccttctgacctgtgcatctttgggattttgtaaaatgtcttcagggtaaaacactcagttcttttcacaggaatcctaggcccttgtctctatttttctttcttcaggcctgagacattaccatgagctctgctggtttctctgcctgtgaatagtggctctggtcatgttcccaggctgcttttctgtttcctcagcctccttcctggcacctagcattggcagattccctgaggggcaaagcagttgtggcatattggcttgctcctaaagggtttacccttccggattgtgtctcttcaagtcatagtagcttccacagttctccaaagtcttcagactttgaaaaaaaaaatttttttttttttaattttctctggctgttggagttgtttctctgagggatctctggtctgccacaggctctcagtcatagccagaagcagaggctactttatgcaaatcttgcacatgtgcattgttacttatgttgcagaaaaggtgatgctagtctgtgctccatttactaaggaagaaatattcagtttatagggaatcgaaaataaattatctgtttattttattttattttttattttttcccaggacagagtcttgctctgttacccaggctggagtgcagtggtgcaatcttggctcactgcaacctccgcctcccgagttcaagcaattctcctgcctcagcctcccgagtagctgggattacacgcgcctgccaccacacccggctaatttttgtatttttagtagagacagggtttcaccatgttggccaggctggtctcgaactactgaccttatgatccgcccacctcagcctctcaaagtgctgggattacaggcatgagccaccgcgcccagcatgtttattaatccaataaatgtgaaccagcaaatataaacttaacgtttatgcattactgctgtactttctaacagtgtcagtggttaatttaaaagtcagtagaagttaagtgatttgtctaaggcagagtttctcaaccttggcactgttgacatgctgctttgttgttgaggctgtcctgtgccttgtaggatgttttgcagcctctgtggcctttacccaagagatgccagtagcacctttctcccgcagtggtgacaacgaaaaatgcccccagatactgccaaatgtcccctgggaagcaaaagcacccctaattgagaactactggcctaaaggaagggaatagttttcctaatttgatataatgccagaaaagcagaattggattttgagttactcaagtcattgtctctgaccattggactatatgccagcttcattcttttttttttctttggtaaagatggggtctcgctgtgtcacccaggctggagtatagaggcataattatagctcattgcagcctcgaacttctgggctgaagggatccttccacctcagccttgtgggtctctggggctgtaggtgtgcaccaccacacttggctttttttttttttttttttttgggcagagacaaggtcttgctatgttgcctatgcaacatagcaagaacccttggcctcaagaggtcctcttgcctcggtctcccaaagtgctgaggttacaggcatgagccactccacctggcccagcttcattttttactgacaatttgatggtaaattctagggtcctaaaaatggttgtaagagtaaatgtattttttttttaaccattggcttgccatctgtgaattgggaacttaggtcacttggttgcttattctagggttaagaagacagactcttgatttctaggcagtagtaagtgttaacatcctatgtgtggtatctcttgggcttctgcagagcagttctgttgcagtctgtcttcattggatctaatgcgtgtacagcagttctttaaaactgacaggagcaaaccaacacagagaaatccactcagaatgtaagtagtaaccatttggaatgtaaggtaggaaagacataaagagatcagaattagagctaaaactaagggagaaaaagacagcttagaagattagaatggacaattttgaatggcatgacactaccaaaaataatttaagctgttagctcccctttctcttattctgcagacattttccggttttccaaatcattctgctttgatgccaaatgtcttgttaataatgcatggcttttttatagtactcccttcccatcatgcctcttaggtgctgagtcagaggagatgttacagcagcagctcaggagaaaggagaaatccctctgcaatgctcaaatactactttttttttttttttgcacatttatctcttagcaagcttttcactttaaatactctaaagcttcaattcaggggatgcatttttcttactgttaaagaacaagacttttaaaactatccaaaaatgtctaataacgtgaggtttttgaaagctcttaaaagcagatctaaatgttagtgtgtattgtatttgatttctaggacaatagctgttatttttctacttttctacctattgtctggatatgcctcttctgagtccgtaatttctattctgtaaaatttaaaataatattttcacattgcctttatgatagacagctataggagacaaacagataattgaggaaatgggacaaatgattgtccggtgagcactgggatccaggcttggatccagcgtttttctcccctactgtttgccagcccattgcattctgggtggctactcagaggctgacttttgaggctcagcagttgctacccctgctgctttcaaaggctgggctgtctgggtcacagagtttttcgttttctgttggttaggaaatactgtgttttgaagggccctggtagagggaaagtaatttttgaagcccctgggtttgtggtatgagttgagaggaggcacccactgcacctgctgaagttccttttagagacggcaacatggagaaagtgttcctaggtctgtgatacacatgttagcctcttagtcatgtctgcctttaaactgtgtaacacatcttaacaaacttgggaaatcagttcacctgatgcggagtggtgtgtttaagtgcataaatcagaagtttcctagagtgacagtattctttgttgtcatggatttttaaggtgtaatttagaaattgtttacctctcttcacaatcagaataacaatattgttgaaaataaaataacagcatggaaactctgtgtactatattcacaacttttctataattctaaaattactctaaactgaaaggcttatacaaataataactgtgacttcctgaaggcctactctgtttcaatcactctggaatctacatttgttatttctaactctcctaagactgtaagaagtttggtcacgagctcaagatcacacagctaagccgagcagggactcaaacctctgtcttagctgagtgaaactctaatcctaccgcatgccacctctgttctctggggaattggaatggaattatttgaacaaggacgtggctcttcagtatgtcgtttaagtctgcaggtatgccttgatttctttctgttgtagatcagtacttactgtatggcacttgctgattttgcgtgcttatgttcttgatatgtggcctctttcagttcagggaccaacttttttttcttcttgaggagtcttgctctatcgcccaggctggagtgcagtggcgcaaccttggctcactgcaagctctgcctcctgggttcacaccattctgctgtctcagcctccccaacagctgggactacaggcgcacactgccacgctcagctaatttttttgtgtctttagtagagaccgggtttcactgtgttagccaggatggtctcgatctcctgaccttgtgatccgcctgcctcagcctcccaaagtgctgggattagaggcatgagccaccgcgcccagccaactttttttttaaattaaagtaaattctgaatgaacacattagcgctcaccatatacaagactcccttagagctctgcatgtgttgcttctcttcctgacccagtgaggtaggtactattactttgctcttttttttttgagatggaatcttgctctgttgcccaggctggaaagcagcggtgtgatctcagctcactgcagcctccacctcctgggttcaagcgatcctccctcctcagccttccaagtagctgagattacaagcatgtgccaccacacctggctaatttttgtatttttagtagagacagggttttactatgttggccaggctggtctcaaacttctgacctcaagtgatccacccacctcggcctcccaaagtgctgggattacaggcgtgagccaccgtgcctggctgcagtctttattcttaaatgttttaccaatattaactcattcaatacaaatgagatagggatattattatccccgttttatggatgaggaaacacagaatgaataatttgccaaaggtcattcagctgactagaatttaaacctgtctaggccgggcgcagtggctcatgcctgtaatcccagcattcgggaggccgaggtgggcaaatcatctgaggttggcagatcatctgaggtcaggagttcaagaccacgctggccaacatggtgaaccgacatctctacaaaaatacaaaaattagccgggcatgatggtgggtgcctgtaatctcagctactcaggaggctgagacatgagaatcgcttgaacccaggaggcggaggttgtagtgagccgagattgcaccattgcactccagcctgggcaacagagtgagactccatctccaaaaaaaaaaaaaaaaaaaaaaaaatttaaacctgtctagccctcctccagagttaatactttcaaccattaaaccatttacctgacaatttattcagcttaaagataaaaggaaaaccagaaaatacctgttagactaaacagagcacatttatgtgcagatagtttgcaacttctaaggagaacattatttgtgaaatcaaaacagtttatttctaggataacttttattatttaacttttagttgagaatttgtatttgttgtatataagcatatgtcgtccttctatgtcactttttttttttcctccccagaaacagggtctcccactctgttaaccaggctggagtgcagtggtgcaatcacagttcactgcagccttgaactcctgggctcaagcagacttcccacctcagcctcccaactggctgggactacaggtgcacaccaccatgccgggctaatatttttttatgtcagtagagaaggggccttcctatgttgcccaggctgatcttaaactcctgggctcaagtgatcctcctgccttaacctcctgaagtgttaggattgcagatgtgagccactgcgccggcctagaattggaatcttgaatttttgccttaggctcactaataatactctttaactacatttaacaaatatttattgggctgctgctatgtggtaggcaaacttgtgtgtccttttaggtaattagtgctttggagaagcagaggaaagtggatgctttgcagggagtagagagaggaaattttgcaattttaaatatattgtgatgagggaaggtctcactgaagtgaggtattcaggaggtgtgcgagcaagccatgtggttgtctgggcagcgctgccaagacagtggttgggtcagtggcctgtggtgagagcttgcatgggtatcttcaggacaggacagcgagaaggcccgtgtggctggaacagagtgagtgaggtgcagaactagagagatgaggtcagagggataagggaaatcatttaagagctggtgtagacagacttgctctgcgaagggccagatgtaaacgttttcgactctgcagtccatagcaacaactcaactctgcctgcaatgccgaagcagtagtaggcagtgcacagaggggcacagggtgtccagcagtgctttattcacactggcaggcactgggcaggattcacccaccacagcttctgactcctggtttagtgtaagccattgtccagagtttgatgtgtactctgaatgagatgagaattcattggagggtttttatttatttatttatttttgagacagggtctggctcctttgtccaggctggagtgcagtgatgcaatggaagctcactacaacctcaacctcaaaggctcaaatgctcctcccactttagcctcccaaggacctgggactacaggcgcaagccaccatgccggactaatttttgtattttttgtagagacggggtcttgccaggttgcccaaactggtcttaaactcttgagctcaagcccttcacccacctcagccttccaaagtgctgggattacaggcgtgagccaccacgcccagcctttcttggaggttttcaaatagaggaattagaaaatttgactgctgttgtaaggaatgccactggttgcctaattgagaatgaactgacaaggaatgagggtaaaagggtagagttaccattaaccaggatgggaagactgcggtagaacaggtttgtggacgggaaggacagtgatctggttttggacaaatttgaggtaactgttaggcttctgagtggagatggcagggaggctgttggtctacaatcctggtgctcagtgcagaagtcagggctcaatataaggatttgggagtgtccagcaaacaggtggtatttgaaatcatgagactggatgagatcaccaagggagtgagtgtagatcgagaagtccagggtctgggccttggggatctgcagcattaaaatgagagaaattagtttggggctgttttgtcactttgggagtgtggattctttgattctgattacggatgcatgtagcgctctgactcttaacgtgaattttaaatacagaacctcagtgtccttccggctaagtttattatttaccacctatgttcttcttactatttttttttttttttttttttttagagatggggtcttgctctgttgcgcaggctggagtccagtggtgtgatcatagctcactataacctaaaacacatgggctcaaacaaacctccagcctcagcctcctgagtagctgggacaacagatgcatgccaccacgcctggctaattgtttttggtagaaataaggtttaactctgtttcccaggctggtctcaaactcctggcctcaggtagttctcccacgtcagcctccccaaagtgctggaacttattaaattataattctagtttttatgtacagtttttttaaattgtggtaaaatatatggtaaaatatacataacataaaataggccattttaggttgtcctgcctatggagtagccattcttttatttctttactttcttaataaacttgctttcactttacggaaaaaaaaaagtaccatttaaatcatttgaagtatacaatttagtggcgttaagtacattctcaatattacgcaaccattactactattcgtttccagaacttgatttcttcattccaaacagaaactctgcacctattaaaaattagtccccttctcaacctctattattagtccacctattattagtccccttctccgcaacttctaataatcaccattctactttccgtgtctgtgaatttacctattctgggtacctcagataaatggaatcatataatatttgtacttttgtgttctggcatagttcacttagcatgttttcaaggttcatctatgttacagcatgtttcactgctttttaagtttaaattttttaagttttaattttgctaaacatcctaggatgcacatcagtgcttttattattattattttttaaaacaacctctaatatcgagtcttatttctgacaggaattctttgctgcagaagggtctccatagctcagccttatgttccaaaacactcatggtctctgtgtccagaacactccaagagcttgttgaaatggctcttcagcccatgcagccctcttatttgtgctactagtaaaataatgataatgctattgaatagctggattgttgaccctctggctaatatgatttgatggattttattatatggcattttaatcaaaggataagcttgtctcatttgaaatagatagaaaacctgaaaaagggacagtttaaaggtagcaatcaagtcaaaatagttttcttcttctggaatgtgataaatgtatttagtgagaggtatcttggagagcgtgattttaccacttactcatttgacaaattgctgagcttaggggccaagtcctgtaatatttccctgttgcttcaaggcaggtatactgaaaaaaatcagttattaaatatttgccatatttcctaaataacctattcattctttgcctgataacagcagtttttatggcagcaatatgtgttaaaggaaaacctggctgtcctttggggttcagtagtcaggtccactgaaagttcagctgatgtgtgaaacaaggtttttgttttttgttttttttttttttgaagatgtagtctcactttgttgcccaggttggagtgcagtggtgggatctcggctcactgcaacctccgcctcctgggttcaagtgattctcctgcctcagcctcctgagtagctgggactacaggtgcatgccaccacgcctggctaattttttgtatttttttttttttagtagagacggggtttcaccctgttagccaggctggtctcgaacttctgacctcatgatccgcctgtctcggcctcccaaagtgctgggaaacaaggtatttgtttaactaactttcggtattgtaggaaagactcattaatgttcttgattgtggtgctagagaatgaccaaggataaaatgaaaataaatttttagcttcattttaggactggtgattgcgaaacaacaacaacgaaacagcaaaaaaccctttttagtcaaaaaaattgggggagaagaaaattagaggcaagaggttatttttaagatgtggccacagttcagtctggtttccagtagacttttaggccatttcccataatctattgagtcatcccagcagttctgcagtcagctataatgaaagtttaaaaggaagatcatagtatccattcttctctccttttgtattgtggttaactttgggtcttggctttatgttaccctccccacccccagccccttttaatgtaatcatgtagtgggcaagggattaaattaatgtaattaggagaatggagggaactttgctttgtgctccaggaaccctggggattccccccagcccccattaccagtaacagcactaacaatgtttatattgaagtggatatggaagccaaggatcttcaaggtcttagtagcaagcctagtagtgagctgttaagccaaatgaaagcagtgattgagtctcagcttgtttttctatgagagtactaatacctactttatcgaagttaaatgaaaccttttaacccttaatattgattaaggcttgtgttaggaggaagtttgagagaatgtgtccttgctacatgtctgtccaactcccaaaggcccgagggtacctggatggcttccagggctcagtgattatgtattttatgcattagtaggcttctttcaagatatcttggccagataattatgaggcttgtccttcagaggcagcatgcacaccaccacgtagggactcatggctggtgcctgtcttgcagctagaatagcaagacatcttcattcttggaacagtgagagtgaactcagaaaagggcctgcattcttgtccagccaaattattgttcacctgtcctagactataaataattccatgacatgtgtccagtcctttgtgagttccagggttggttttgcttttctattttgattgccttggacttgctctgcgaaattagtaacgaagttgaccttcatcttttagtttagcccaggactctaggccctgtgtgcttgccatatcaggaggggtgagatcaaggccccacttccagtgtcatttgattctctaccctgccatttgctgtgttctgaagaaataaagtttgtttgctgtttgtcctaaggtggaacatatctttcagagcacatgctaacaagatttaaaagatatttcaggctgggcgtgatgactcacgcctataattccagcacttggggaggctgaggcgggcagatcacctgaggtcaggggttcgagaccagcctgaccaacatggtgaaactcctgtctctactaaaaaatacaaaaattagctgggcatggtggcacatgcctgtaatcccagctactcaggaggctgaggcaggagaattgcttcaacttgggaggcggagatggcagtgagccgagattgcaccattgcactccagccagggcgttagagtgagactccatcccaaaaatcaatcaatcaatcaatcaatcaaagatatttcacctctcacagccaaatacagatgtaattttgggggagtacgatccttattttatattgtgttctgattatatgtaatttttgttttatcctttcagctgcgtaagaaaaactcaatttccactctttttgcagacaattcttcaaaaatagattgcaaagttttcttgtattcattttaccatttgttcttaagaagacttactttaacataattaccaacaaatgtttgcacctagcatttctgctcagagaatggtgtgaaaggggataaaaatagtaagccttagccagtgccaaagttgtcagtggattaaagaatagtgctatcctggaaatgctgctttaggggagttggaggcagggggtcttgctggggatggtgtgcagagggtggttggtgcaggtaggaagaggttccaagcaccttgttaggcttagtttctgtgctattatcttagggctagacttttgggaggggttgtacttgtacttcagtttgtatgtgggtcatgtttgcaccatagcgggtgtggttattgacaactgtgtttcccggtggttccccttccagcccatgctcaccagatgccattagcaagttgtaccttctctaataccctgaggtttttctgagaaggctgcagaaataccccctagaacaaagaagtcagcaaaaacaaaacaaaacaaaaaacaccacttaagggtaagcacacaaacacatacaaatataaggacatacatcataggtattgtaatgttccaatcccataattttggaatgattacataggtggaatacagaagtatccctgcttttcagcatgactgcccttgatgactcatcaaaaaacagcagtgctagtcatcttagacacagaggatgtgtgccatttagacttgttcttttaaatagtgaaaattattgctttatggttttattctgtgccccccgccctcatgcccctatgggccagagaggcagttcaccaacttctctccagttgtgcctccccttccttcctgtgactttagggagtttgtacgcatctgctctagtcctagaaccatggggccttcatagcccctgcgcagtagccaagagcaatgggccttcttacggaaggaagagctcagttggcaagtatatcctgagctgagttgtgaaggcacacattcatacctctctttatttttaatggggttagcacagtcttcaatcaatagcttaacttcatctctgcttttatttctgctcctagcataaattatttagcacaaatgcagacataatctcagaaattacttagtattagtgtcctgctgtgagcatcattttcttgagtgtgttgtgttctaaccgcaaattagcaaaagacccttcaagaaagtctttctgtggattcatttagggggaatttagaaggttgtagtcagtgctacctgatcacttttattttcagtgaaattttgttttattcatagtatagttaatagctttcctgtaacacacacacacacactctctctctctacatatatatgtattatgtacatttttaaaagtcactttttacctggtaatatcttaatcccttaaggatttgtcagttgacccatcggtggactgagtcactttatgagtagggattccgaaaatgccaagctttgtctgggggggttgggttgggggaggatgcaataataaaaactctaaccttgaagatgcggggagggcctacagacatgttggaattcaacaattaggtatattttagtgtagcctcatagtgcagcgacccagctgtaaagatgaagtcactcattcctgtaatgatttgctagcttgttgaactaaagtctagagttgaaaattctgctccttttgaacagtgatctaattgtgaaacggacagttggctactgacagttttcaaatattagccagttgctgattttaaaaataactgtgagaaaggaagaccaaggtgagaagagactaaaaatcaaacagtcacatgaggttttgtatcttcagacagctgaagaaacccgacaacctacaaagatatgatatttgcttgggtagttgtagttcaggtgtttccttgtgcaccgagcccctagtgcattgctcataataggttctggggcagaggtacctgctcatagctccacagggtcataagcaactttgaacacccccaggagccttgttgttgggcgtggtgggaaatgttaattggcctctgagtgaactaggaggtactgttaggattcttatcccttgataaacttactccctgtggccgtcttgttaatatttaaaagtaaagtgtaaatccattacaggacaccataatttaatatttgttgcatttctgagctatgtggttgccagcatagggtcagtatcctaaggcctttgagttttctgagttttaactctcagcttgactgtggggtgtgtgggcttgggaattgacttttgtttgagagtaacagcaatcttaggaattagtgatttttttggtccttgcaaatgttactgaacacacggaacaagccagccaccaggctgctcgtggaaggggaagggaggcaaagttgggtttggtccccctcccctgctcttatcccctccactcccttttcttcctgagctcatgcttttgttgtgatagattatttttcccgggattttttgcttttgaaatcttagtttttgtgtctttgcacctagccagtaggagcagcattgtctgagatcttagcaggttccagagaactgtccattgtgggtagagttgggagtggcaagaactgaaattccagaggcaggagccaggttttatggacttttctgagtcatactaagcatgaggaatttggaccttgaaagtggtggaaagccattgagagacaacaggaggatatatttatcatttcttttagttcacctatgacattataggacgttataggtaaagactaaatgcaattctttttcttcttcttcttcttttttttttttaatagggatggggtctcgctatgtttcccaggctggtctggtctctgtaactactgggctcaagtgatcctcccacctcggtctcctgtgcctcccttccccttccatgagcagtcctgcggctggcttattcagtaacatttgcagactcactaaaaaaagttactaattcctgggattttgtaattccaaagtgttgggattacaggcatgagccaccacacccgaccctaaatgcagttcttgattccaaagactaaagaatactttacgggcatagaaaaaccctgcagtgctttaacttcttatgtgaacattgctagggtctttattccctctgtaacaattcctggcccatttacaggatttttaatattagtatactttgatttaggtttagttggcaatctagatacatcccaaaccaaacttttcccacatcttttttttttttttttttgagatggagtcttgctctgtcgcccaggctggagtgcagtgacacagtctcggctcactgcaagctctgcctcagcctcccgagtagctgggactacaggcacctgccaccacacctggctaattttttttttttttttttttttttgtatttttaatagagatgggatttcactgtgttagccaggatggtctaaatctcctgacctcgtgatccgcccacctcggcctcccaaagtggtgggattacaggcgtgaaccaccatgcctggcccccagaactttttattatgaaaaaattcaaacttacagaaaagttgcaagaataacacaataaaagcattatcttccatctggagtcaacagttaccactattttgctttttttgtttgaactgtggctctgctttctccactgagccacgttaaattgttgataattatccaggcagttaacctttaaatacttcagcacacatctctttaaaaaatgacattctcctgtttaatcaaagtactattattgcatctaagaaaattaacagtactttcataatcttttcaatacttgatcttagccagaaggccgagaagtgatcataatactttctaatatccagtcctcatccagtggtgctcagaatgttatttgtagctgcccccatccccaaaataacatattacatttggttatgtctgttagtctttagtagctttctcaccccatccactgctcattgtagtaactctttgagaaagagttcaggccagtattattgcatgtcctacattctggaattgcctagtgtcactttgatgtgttccctagttttctggttgtttttttttttgagttggagtctctctttgtcacccaggctggggtgcagtggcacgatctcggcttgctgcaatctctgcctcctgggttcaagcgattctcctgtctcagcctcctgagtagctgggattacaggcatccaccaccacgcccagctaatttttgtatttttagtagagatggggtttcaccatgttggccaggctggtctcgaactcctgaccttgtgatccgcctgcctcggcttcccaaagtgctgggattacaggtgtgagccactgcgcctggccaatccactgtatttttgtaaaccagaagataagtctaagagcttgattcgatttaaattaaaagtttttggcaagaatactcagaaggtaatcttagtttgttctagttggtgataacccagtttgggcacttggttaagtgatacctatctgatctctccattgtaaatgcacgtttccccctttgcagttatgtgatctgtgggaagaatttgtttttgattttctttccaaagtgtagccttacaagatttgttttttgtttgttttttttctggtttgttttcttttttaaatccaagcctttgcggaggtcgaggccaagccacccaccttggcttctcaaagggcttggattataggtgtgagccaccttgcctgactccttacaagtttccatcaatcatgctcttccaacgtgcctttgtagagtaggttggcccttctgtttctgtggacttgggtcttgaattgctttaaaatgtgaacattacttagctaaagaaagaaaagtttatgtctgatcaagtgacagagtctgtctgtcataatagatgacagaaaaataatccagcattctgcatggcccagagaacccgtttctaggactacaagttgatatatgcaaaagacaagccatctggaggagaggaagggtttcattacccacaaggtgttaaggaaagactttgttttgctaagtgtgtgtgccttagaagctagaaattttcaagtgctttctctggcatcttttgcctttttatggaaagcatggctctgatttcctatgtttgacagtttgggtgttaataccagttggaatgctgccttcttggaagcacttaaattcccaacgagtagataacccattagtctgttacaagcttccaggctaacaataatgtgattaaaatatattatccccataggacatgaagaataatctttccaaaagagaatcaggagggagaccaaagaacagtatgtggaagaatatgtttggatggtaggctagatagaggaaacttgcttgatgaagttaaagctagaagcaccaagagctttaggatcattatgaatcatttggggtaggataatttgggggtagaataacagtttgagattaggggaattattagggtctggagcaatgaagaggggaggaatctcttactaaggcagaaggttgtgtttttgtgcttcccccgaccccatacaaaaatttattgattattgttttaaaaaaaatgaaaagaaaaagaccctgcccaaaggcagcattcctaaagggtgctcataaagtagatgctgtgtgaaaaggggttctcagtaactttggaaactttgaaattttgggtcagttgatttaaacagatttggttactgcagtttttcactagtggaacagagaacctccttatcttacagggttctgatgttcatggaaatgttgcattgtaacaaagaaaagacaacccagatgacctgtaattctgccacacagagataaaaaacactgaacatcttgataagtgatttctaaaactgttctaggcttatattttcctttgtgtctttaacacaaatgtgatatactgtatgtagtatatatacaatgtatatacagtcttgaatcaatagcttcatctctgcttttattactgctcctagcgtaaattatttagcacaaatgcagacataatctcagaaaattattattttttgagacagagtctcactctgtcactcaggctggagtgtagtggcatgatttcaactcaccacaacctctgcttcccaagttcaagtgatccacctcagcctcctgagtagctggggttacaggcatgcaccaccacacccggttaatttttgtattttttgtagagatggggtttcgccatgttgaccaggctgatcttgaactcctgacctcaggtgatccgcccaccttggcctcccaaagtgctgggattataggcatgagccaccgtgcctggcctgcacggtatgatttttaaatagtgagtacttctaaaacaataatcattatttcagtgatagctgagttagtcatggtctgattttgccataattttttttccagacccttttggtgcatagataggttggagttttgcttttataagtagcactgagataaacagtattgaacacatttgttatttatccaattatttctttaggatgaatacctgaaagtaggaactactgggttagagtatgaacatttcactttgatctgtattgccaacctctctagaggttatatcaatttgtttccatcaacaaggtgtgggatacctgttccaccaaagcctctgaatgttggtgaggctttggtagaacaggtatcagtcttttgactcatttagacaagcagtttgtagtgtcaacttaaaattttacgttacatgtttgcaaagggttagaagaaacttagttgtaggcagatagcagttcagtgttgaagaaattcaactttttgctatagaattgcattcttttaaaccctcactcaatcagacaccatgatgcatgcctgtagtcccagctgcttgggagctaaggcatgaagatctcttaagctcaggaatttgagaccagcctgggcaacatagtaagaccctgtctcaaaaaaataaatcattactgttgtaaagaacattggtaaaacagaaggaaaaaaggtcatctcacatcactgttactccctaacagcaaagcaggttggtaaatttgcctcaagtctgttttagcctgatgcatgttcttattccttagcaatagttgtcaagatatagcagaacttttttcatgttgttaaaaatgtgatagtctatgctaaatattatacataaggtgtatggtgataaggttgcatagttttcacttttaaagatgtgtaagattccgtcaagttttgtgtcacagtttatgtgctgttgttttagtaagtgaaagcaagtttattagagaagaaaagaaactggctactccacaggcagagcagcactgagagctgctggttgttgattttgagttgtttcccaagattttgcttttagaaataatgtaagtaaaaactttgtgcatagaatagcctcatatttaggatactttgctagctcagaaggtatgagcatttttatggctattgttgaatttgcaaatagttttcccaaagggttataccagtctgcacgaacaccagcacagttggtgaagtatcagtttcactatgaccttttctggcttatagcctttttttttgtggttgcagaaaaaccagtatacttctaccttaaaaaagcaaggcaactcctccggctatcacagcatctgtgtgccaagctataattctttttttttttttttttgaggtggagtttcgctcttgttgcccaggctggagtgcaatggcgcgatcttagctcactgcaacatccgcctcccaggttcaagtgattctcctttctcagcctcccgagtaactgggattacaggcatgcaccaccatgctcggctgattttgtatttttagtagagacggtgtttctccatgttggtcaggttggttgcgaactcctgacctcaggtgatccacctgcctcagcctcccaaagtgctgggattacaggtgtgagcaaccacgcccagcctatgtaattctttaataaatagctaaatgcctactatttatcagaagttgatgaagaaaagaataagactgtctgtactcttaaggagcttacagtctattggaagagagagacatgctcaaatttgtagaggtcatggatagaagttggtgtatcagttgagaaagagcccaaagataggtgtaggcagttctaatcttgggggtgggatgataccaggaaaagctaggaaagggacattaaagcttagtattggctgggcatgatggctctcacatgtaatcccagcagtttgggaggctgaggcaggaggattgcttgagcccaggagtttgagaccagcctgggcaacaaagtgagattctacctctacaaaaataaaaaaattcaccagatgtggtggtgtacgcctgtggtcccagctacacaggaggctgaggcaggaggattgcttgagccaaggaagttgaggttgcagtgagctgtgtttgtgccactgcaatccagcctgggtgacaggacgagacactgtctaaaaaaaaagcttagtatgagcgggtgtcacaaaagcacgttcatacagaggaggtgtcagtgggggtgggaggctggaaccacaaggcaattcagggacagggattggtcggtggagtgggggcggtgacggacagagattaggacgagggggtgcggaggtgaggggagcagagcctttgttctggtttcagttccacagaggagtgtggcagtgctggtcttgtgcctctagcacattcccatcagcaacatccgtcataccctgacgccccccccacccccacccattctccgcagggttgttttgataagtgtacgtgttcagtttcaatggaaccagcaagataatttacagttttctcccacccaagcttatactgaggttatgtggctgtgcatgtggatattggtacttctgagggttgataactggtcatgctattaagaattttgggggaagcaaagctgaagcttagatcagtaaagtacttaccataggctacccagccatctagtatctgtttagacagcattttcatgtctaatcttatgtacagtttaataatttaacagatggtagactaataggtcagtggaaatgtttatagggtacttcatagctgttaatttttaccacttggatttttttaatagctaggaatagtaattagggtgaaaaatgaaacctacgaatgactttgtgatttttctgcctcaaatgagaaggattaggaaagcaaaagtttcctcaaatcaatttttcccccaaaatatttttttgtattatttactttgttaatgtgtgtatgtgtcccccctcctcccagttctctttaaacactttttgtatgaaaattgtcacacggttgctccaaaatatttaaatagataagacaatgggtgtaaattttgctgccaaaaattccttgtatcttaaaaaagctgtattttctctcttaaatgtatgttaatgtatgtaatgcatagtatgagtatccagcattttaagcagatttaaaatggaaaaattcatgattcacattagagcttcaaacttataaaatttgggggatgcattatagcgtgagtattggcacccactcctgaagtggaatattggaagcctgaaatatatgacatgttgacagtaaagatccaggtaatattggccatgcggggtggctcacacctataatcccagcactttgggaggccaaagtgtgaggactgcttgagccagggaggttaagactgcagtgagccatgatcgtgccactgcactccagcctgagtgacagagcaagatcctgtcaaaaacaacaacaggccgggcgcggtggctcacacctgtaatcccagcactttgggaggccaaggcgggtggatcacaaggtcaggagatcgagaccatcctggctgacacagtgaaaccccgtctctactaaaaatacaaaaaaaattagccgggcgaggtggcaggcacctgtagtcccagctactcgggaggctgaggcaggagaatggcgtgaacccctggggggcgcagcctgcagtgagctgagatcgcgccactgcactccagcctgggtgacagcaagagtccgtctcaaaaaaaacaacaacacaagccaaaaaaaaaaaaacacttcaaaaagatccaagtaaaaggaatcaaacaaagtgtgggcagcatagtagctgtggattcaggggattgagcatctgagaggcagtagagcatgtttgttaaaaatctggactctggagacaaagcctgctgtgaaatcttggctccacatggtcagattgcgtattcagacctgagtttttttcatctctaaattgatggtaacaacctgcctctcagttattgtgaggatgaaatgagataaaacacaggcatttggaaaggtgctggcacataaggactcaataaatgcattattagttgtataggaatccatctctttataagcagaataagcagattctttctttacctgttgtgcagagcagtgaacactgatcatctgcttgtttaggggtaaggttgaattatttttcaggttgtgctttttccacaaaatattggtctaaaaagataatgcaggttttgcagatactctagcatggcagaaatcaaacttcaacattcctttggcacattttgtttttccttaatttttattgtgtcttatctgtgtattttgtatatgggggaaggagagagcactagcaagcatgagcgtgagagggagcctcctgttctatttattcattttctgcttctcttctctttagattctcttcccttttccctgttctttatgccaaaagcatggacatgctaaagaggtagaacctgtgatccatagattggctccagtgtttttctggaatttatttgactctgttataaatcccacattttatagtgggatgatgatgtgagtaaattcagagaaagaaaacccagtctaacagacccccctgagcaccaagcagcacctttgctgagtgtcattctttctggctctggtcagttgtgtctagctttatatcttgacattttccctccactctacatgccatggagatgtggtgttcctctgcattgctccatgtagaaagtacagtctttgctaagattcaggctcccaacttttattaatcacctgggggattctacacacagaatcttatttagttcatctaagaatttagatgtggatactaaaaagttcagtccttaatctggagccaggaattttgagtagggtaaatttacttgttccgattgatacctactcattggcccactggaaatccaatcctggaccgtttctgcaatgtcgtggctttcagaatcaagttcagaccccaagtatagtgcgtgaagccctttcgctcttgctccccccatttttctagcctcccgtctcatgttcttgccatatgcaaccttcgctccagccatatgaaacttctttgattcctcagatgtatttccccctggatggctctttgttttcatttatgctgctccctctcctgcttcagtgctcttctttcaggaccatactctagaattacctcttctgagagtattttcctggcccctgctcccaatatgatctagtagccactctcctgtacccctgaacaaacgtgactattcttccattgcaaggtgatggcagggactgtgtcttacttgtatctctttatctttagagtatagggcagtcctggaacatcttatgtatataatgagtgttgaatgaatgtatgtctgaattacagtttgtaacatttataaaagaattcatcatctctttgtagctggtgttttatagaagtgtaaaaagtccttaggacttgatgtttcttcattattattattattattattattattattattattattattactactacccccccaccccccctttttgagagacagggtcttgctgtgttacccaggctggagtgcagtgacatgatcataactcactgcagctcaaactcctgagctcgaaggattcttctaccttggcctcccaagtagcttgggagtacgccatcatgcccagctgatttttaaatttttttgtagagacagagcctcactaggaacagcccaggctgttctcaaactcctagcctcaagtgatcctcctgcttaggcctcccaaactgctgggattacaggcatgagccactgtgcccagctctgtttcttcattaaataaagttgggaacttggccactcctggagagtaagtggccactttacttttccccttttggagaaagcttgaagtccagcagaacagtaagccacttaacctggcagttgcaacacattaattaacaaccttttatttttcttttggaaaaaaattgcaaatctgtagagacattgagaaaatagtacaataaatatatgctctacacctgagttcaccagttggtagcattttgtcacatttgctttaactttttatatgcatacataagctcatacatgcatatgtgcatatgcacacatttttttcagaagcatttgaaagtaaagttgtagacatcatgatgcgaaacctctaaatacttcaatatacatctcctgagaataagcgcattatgcataatcacagcactatgattacacttaagcttaacatttagtaatatctgatatacattccatgtttaatttttctcacttgtctcaaaaatatctattttagcactctgatttttctattcagaatttagtcaaagttcatgtattgcgtttagttatgtctctaatctagaatagcccctgcttttttttggtccagatcagttattttgtagaatatcctatgttctttcagcctgaagaatctaaagtgtgtgtgtgtgtgtgtgtgtgtgtgtgtgtgtgtatttggagacctcatctctaaaaaaatataaatgttagctctgtgtgtgggggcattccgctgtggtcccagctcctcctgaggctgagttgggaggatcacttgagcccaggagttggaggcttcagtgagccatgttcatgccactgcactccaacctgggtgacagagtgagatcccaactcttaagggatattctagatttatcttcttgttttctcttcagtagattagcaagaatattatataggaagtaaatatcttacattgcattaggagcctggaactgtaggttgttctaatattggggttgctgagttgagacatttggtaaagggatgacctgctagatcttcctcttatgcagcaaaattacaaatgtcagttgtgatcaacatgtaatttgtggggtggtgcattgaatatgtgttttgactatcctcttcaacaaccctttcacctgagggttttagcatccattgatttccatgtcatgattatgacccaaatatgactgtaatcaacagacctgctaaacagagttccagattctttacggttctttttgtccttacagtatatctctcaaagaatgtatcggagtacttttccgttggttgtgttttcagtacaatgtattattagaattatttgtttgtgtttgtatttagttttagggtttgcccatttttcatatatatatatatatatatatatatatatgtatatattttttttttttttttcttgagatgaattctcactatgttgctctggctggacttaaactcctgggctcaagccagcctcctacttcagcctcccaagcagctgggaccataggtgtgtgccaccatgcccagctagataatttttttaatacgtaaatgtccaaaatataaaaggtgtactcaggcctcagtcctaccccttcatttttattagtttctggtttactcttcctatgtttttttttttgtaaaaatatgtgagtgcatatcaatttccctttattaagtagcataatatgtcttggaagtcaattcatgggttttgctcaccttatttttggggaaggtaaattttgttgacatataacattaaaatgtgtacatgtaagcaaaaagcttggtgaatgtttagaaaatgaatatatctgaataaccagcatccaggttaagaaataagatgaccagaagccaccttcaactctcctgcactccagggtagccattctcctgacttttatgttgtagattagctgtgcctgtttttgtattttatctacatggaatcataccacatgtgttcttttgtgtctggcttctttgtgtcacataaagtgtgagagattcattcacgtgggtgcatgcagttctagtttatttattcctgttgctgtatagtattccaaaatcggaataggctacaaatatttaatctcttctgagttctttctagttttggactataacaaatgttttctcattcttttttatggtctcatggtactcatccatgggagtgagtataaaaatgtattcaaccagtctcctttggatggtcatttaggcttttttccctagtgtttttctactacaaatattattgcacaagattttgaataaacttgtgcattatagtatggaacatgtttttaaaagctttatgaggaatgagagtaacagaacattttggggggaaagctaatctttttggcagtgctgctcaattggtggaaaggaatgactgagcttttcttaggaacaggttagtgcagtaaaactggttaacttacagtattttgggttcctctcagaaaggaggagggggctaatgcaaaataaagagaagggcttgaaatccatctccatgcctcctggagcacagccaagttcagaaaactctatattgtctcaacttattattattattttttaaattcagatatttattatgcatcctctgtgttcccaacacaccattctagccactgggggtacagcattaaaggaagtaggcaacagccttgccctaatggagctcacattcttatgggggacaagataaattttaaaatatgttgtatgttaagtagaaaaccaaagcagaggagggtgattggtgtttgggtgtgagtgtgtgtgtgttgtatgtttgcatatgttgggggtgagatacagattgtaaaaagtggtcaggaagggaatggtttcttttctggttctgaaccctcttttagcttaccaagccaaccacagcaaacattaaggatacacattaaggttcagtgagaaaggaggaggttttcctgttagaatcagaagcagagaggaagaaaggcaccattgtgtggccaagaggtggctgaagggcaggaaacccagtccttcgcccccggaagctgtccagttaagccatggcccaaggctgctaacactggcatctgaatggaaatttctaattgtgtagacctgaatggggcttatttttctcaactgaattatggttatatataagagatccctcctcctagatatgaggctggataataattacattgtctcatgaaagtgtaaaacaaattattagtaagtgtgaatttgtgttaaatgttgtcgcatttaccacactgcattgtaatttgttgaattttgtctatacattactcatctattcagcgttgccttatgcatacttggcctccagtgccctcgtacggtgcctgaaaagcacacagtgaaggaggtgctcagtagagactcgttgaaactggaggatttaaccactgcacaccaacttaaaattgttttttttaactgtgattcagccactgttgcgcaggaccatattattagaaagtactgctttcagaattttcaaagttagctgggtgcggtggctcacgtctgtaatcccaacactttgggaggccaaggcaggcagatcacctgaggtcaggagttcaagaccagtctggccaacatggtgaaaccccatctctaccaaaatacaaaaaattagctgggcatgatggcaggtgcctgtaatcccggctactcaggaggctgaggcagaagaatcgcttgaacctgggaaatggaggttgcagtgagccgagacgcgccactacactccagcttgggcgacagagggagactctatctccaaaaaacaaaaagaaaaaaacaaagtaaagctcatcaaaatatatgcagcaactcagttcacctctctggttttgatttctctaaccatatgaccttgggcaaattaccccctggaggacttgacttcctaatctaaaataaacactcaagatgatatctacttcacagagatgtgaattttgaatgagataatttagattgaaagcaacatgtgtatgcatatgtacttcctactttaggccagagccatggcctaagtttattaacaagactgctttttttgttgttgttaaccaaacagcatctcactgttgcccaggctggagtgcagtggcacgatcatggttcactgcagccttgatctgagtgagtggctgggactacaggcgcacactaccacactcggctagtatttttaaaatctatttttgtagagacgggattttgctgtattgcccagctggtcttgaactcctggcctcaagtgatcctcttgcctccgactcccaaagtgctgggattacagatgtgagccactgcgcccaaccggtaacaagacttttaatagagacacctgaaaggtcctacagtttgatttgtataaccaactacatgagcattgcacaggagaagggcaatttagcatctctaaaaagattaaggggattttgcttctagcaagcttgatatgaattagtaataggatgtgactgctgtttaccaacaacattcagcaaagattgattgattgattacctaaccatgtaatggacgtttaaaaagtctattcatagaaatatccaaaactgaatttcccaaagtaagttctgcagagactcacttgatgttctggtttgggaaatggcaggctaaataactaaacatctctcttctgggaatttctgggccttgagttattgtgcattgtgaatctccaaaaaggggcttgcttttacagatctttggtaacaggtggaacagggctgctggtggtttgtgtgtttctaggctcatcctattgcatctggacaactccgttagtgtggtcacaactctttgtcaagtgtagacaactgggccagtatgcagagagcgcagcctggatggggagtgaggttgtgatgatgaagttgtgatgatgaagatgtgaagttgtgtgaagttgtgatatgggaggggcacacatagaaggggcctgagtgggagagggtgtctggggaaggttgagagagaaccagtgggcaaaagtgactgggccagcctggccaacatgctgaaaccccgtctctatgaaaaatacaaaaattagccaggcatggtggcatgcacctgtagtagtcccagctacttgggaggctgaggtatgagaatcacttgaacccgggaggtggaggtgcagtgagccaagactgagactctgtctcaaaaaaaaaaaagaaaaaaagaaaaaacaagtgactgggaaacattttgtacccaaccaaagtaggttttctttgctgatggccatattttccctgttgactctgtgttcttggaggtcatagttccccagtagtgggaagcattcgatgatattggtgagtgttccttaaaatgccatccaatcccaagttgtggatttgtgattatttccttttgtttggcaatctttactccctcagtttttatttttttagcattgtgctagttcctttcgataattagaaaaaaaaatactatgtggtttacgttaatttattagttgaatgacgagactaacacgagacagttgttagtgaattaagtcaacatggaaacaaatccaagttttgatagtctgtaatagaccatcacagaaactggagaaggggggagactgacacggtactgaaagcttcctcaagaggtctgtgaactggggtttgaaggattaatgggatttgcacggcagaaagaatagaccccttgctgtagcagcagctcagggataaaggcaagagacgtaaaagacttttgagcagtaacagtgtggataaatctgtaattaagaaaggtcaagaaagatccatctggcagctttgtgcaggagatgaagatgtgagagctgtctccttaagagtaagcatttaagccatgtgggtgcttgaaatctttcagagagaggttgtggctagaacatggatgagtgaggtataaaagcttagtggttaagagcacagacacacctggttcaaattctagtgctctcagttgacctttgtgaagatacttggagaaactgaagcctagaagttgtttgtaaattggatagtattacttgcctcttaggataattatgaggattaaatgcagtaaggaattatgtaattaagtactcaataaatgttgcttatatttattatgtggccagagttccctagagcagtggttatagaagtgtggtccttagtccagcaccatttatcacctgcgagcttgttacaagtgcacattcatgggccccactcagaccagatgcatcagtctgggtagtgggacctaggaaacaggcttcttaaaagcactctgggggatgggtgggaaacattagagaatgactgccctagaggaatcctccagttgggatgcaaagctaagaaagggagagtgtttaaaggaggggctaagcaactgtgtcctttgcagtgcagaggaaaggaggtagtgagttcttggcggcaccttactataagctttacacaagattttcaataaatacaataaaagctttacacaaaattttcaataagacaactggtttagtaatatgttgggatgaaaggaagatttcagggcagtgggaacatactgcacagcccaaatgattaaaaacaacaacaacaacacaggactgaattagaaatgtgatattagatgaagtttaagtcttaggtttaacaagtatttgtggactgcccccctactgtgactggcagtgtcctatctgctggaaatagagaatgaggtgttactcctgctttcagagacttcacacagttatacttttttttaataattggaagctgtcttttttccttaaaatctttcctagctactagagaataaacacaatatctgatctattctccgacggtgccagaagttaagcatagggctgtctcccaatcaatgcaaggccgcatttgaaactgctccctcatttcggaaagcattctgaacactggtcctttttgcttattattttatggcttgggatataccttaagagatgatttgaaatctttcgaaagatttcaatgtccctgtttaatgttggccacgtggggtttttgacattatgctaacccaccccacctctgtcattcccagtataaagcaccaaaagcactagcttgaaatacagtgacttctaagcttcgtccattattccattcagtcattgtttgctgcgcattatgtacaggatactgctttaatagtgatgaaacctaatgtcagccaagtgttttgtcaaagagccggaatccacatcccaaggccagatgtattgagtgtggaggaggcactggggcctggtcccgaggttagccaagcggttagatgaatccacccccagacacccacaaagtttagatttgtaaatgttccacccctgtaacacatccccctttcacaatgacaaaggcaatttgagggaattagagtgactggttaagaaactatgttttacaatctcactgtttcttgaaaatagatggcatagcagtggagtttgcaagtagaatatagggattacattttgacgtgtttgtgagcttctagttttgtatcatagagagacttcaggaaaatgcaagtggagatcactttccaaagaagacaagattggcaggttaatctgaacactcatttgttaagagcatgttttaattgaccttggactgtgctctttccctattgctttggacttttgggctgggatgggtggatagtgaggactgcaaatagtctttcgttactcctttttctttccaaatctcccaagggtaagtgattggagcctcagtctaccactttgaaaaggttgccaagaccagaccgtggcttcagaccatggcttcagtgcttctagcagtcagagagtcagtggtttcttttctctatgaagaaccatgaactaattctgagaaggtgaacttaaagagagcagaaacctttaaaaaaaaaaagttttaactaattcataaaggtctttcttctgatgatcagagtgctagaatacagattgggtatttggagaagagatggaatatatttttttttaagttgatgctttttctagaactgctggatattgacagaaattcctctaagctctactagctacccaaaagatgttggtgtcctgaaaggtatggaaaatagagttatggtcatgtagggttttaaaagaactaaaagaggctttaaaagtccaaaaagaaaaaaaaatccatagctatgtggtgtgtttttttaaatgattgcttctgaatccacctctttttcccctttttgctttctgcagtgaacacctacctcttcatgatgcaagcccaaggcattctgatccgggacaacgtgagaacaatcggtgctcaggtttatgagcaggtgcttcggagtgcttatgccaagaggaacagcagtgtaaatgactcaggtatatttttagtaaagaggtggtctgattagaatgtctcctcccaagagaggtaaattcggttgcaataattattttcaatgggaaaagcgcattgtaaaagagggatttggctgagttttactttactgctaaaaaagctcttgccaaatgaatcctcgttcatttttgttaacaatatgactcagtctgtttgtgttgctataaaagagtacttgaggttggataatttacaaagaaaaaggatttatttggcttatggttctgcagactattcaagaagtgtgatgccagcgtctgcttctggtgagggcctcaggctgcttccactcttggtggaaggggaaggggaagcctgtgtgtatggtgagaggaagcaatgtggcaggtgagaggagggcagggccaggctcttcttaacaaccagctcttgtgggagctaatagaggagaacctaccgcaacagcagcaagccatttgtgagggatctgcccctgtgaaccaaacacctcctgtaggccccacctccatcattggggattacatttcagcatgaggtgtgcaggggacagacatttaaactatagcataatacattaagagtgactggatgactacttctttttttttttttttttgagacggagttttgctcctgtcatccaggctggcatgcaacgggtgatttcggctcactgcaacctccacttccccagttcaagtgatactcgtgcctcagcctcctgagtagctgggattacaggagcatgccaccatgcctggctaatttttgtatttttagtagagatggggtttcaccatgttggccatgttggtcttgaactcctgacctcaagtgatctgcctgcctcggcctcccaaagtgctgggactacaggcataagccactgtgccagggctctttcttttcaactctttcaaaaactgaatacaggaaggaagtaatacttccacatgattaagtgggactctcttgaggcctctctagtccagccagggatggtttttatttaaaaaatagattctgagatttcatcttactaaggattcatgattcgcctcatttctgtaactgaggactaatgtgctttctgggtttgtttgggtttttttgagatggagttttgctcttgtcacccaggctggagtgcagtggtgttaatctcggctcactgtaacctccacctcccgggttcaactgattctcctgcctcagcctcccgagtagctggggttacaggtgtgcgccaccatacctggctaacttttgtatttttagtagagacggggtttcgccatgttggccgggctggtctcaaactcctgacctcaggtgatccgcctgcctcggcctcccaaagtgttgggattacagacatgaaccactgtgcccgagcttttttttttattctcttgagatggcatctaagtttgtctcccaggctggagtgcaatggcatgatcttggctcactgcagccttgacctcccaggctcaagtgattctcctgcctcgtcctcccaaagtgctaggattaaaggtgtgagccaccgtggctcattttttgtattgtttgtagacatggctaatttttgtattttttgtagacacggctttcaccatgttgcccagtctggtcttgtactcctgagcttaagcgatccacctgccttggcctcccgaagtgctaagattataggcatgagccaccatacccagcctcctatggcttcttaatgatttcgtctaagcccaatattttaaaatacttacatttaaaaaaaaattctccctctaaatcagtcctctcttcttctctaataagttacaagatttttggaagttcactgtcgaatgtgaaattgctttgcaaatgttgcaaatgcgaattattctgtggcgcttagaaaatcaagagaaagcattgcctctcttaaaagaattgcctctccttaaaagaattgaccacatcctaatttatcagtttcctttgccgtccactttagcaacagaggactgtagttagcaaactgataaacttttgatactttcttgttggcaaagaacaagtgaatgacatttcagagctttttagacaaattgtggtcgcactgggtcaagttacctgagctctgaaccatacctgggagaggaaaccctgcagtttccgtcttgcatgtggtggtaggttttgcacaatccgcacacacattctcactcgactcatgtggctctgtcagttaaggcagaattttatgctgtttgcatttttcacacatagtacatataatcttggggaagatggcgcagcttgatcatgtgactctttccctaaaccctgccaaaatcctgcttctagttaggtgaagaaacgaggcagtactgactgcccttccagagcgctctcccctgtatagcactgagtaagggaacatttgtgtcctcatgacatttatccagtccagatgtcatacttctgcagtgttagatgaggctggaatatctgtctctctgggcatttggcagtactggcagttctctcagaagttagaggggcatgcagcaggaccccatttccacaccactgccggtctggcaacacaggattgcgctacttcctgagttgctgtctttgaaaactgagtacagaggtgagtttcacccttggagggtgtatccagtgacccgttattattgaacttggtgtacttttattctcaaattatcatacacccaaataccttttccttgcatctctctggttagaacaatctattttttgttaaacgtgtttatttctctaatagattggaagtctgtgccatcagggactctcttactgtttattagatacttgacttacatgatttcatgtagtccctcacaagaacccagaaggtagctactgtgtccccattgtagggataaaaggaacaaggcacatggaagtcatggaacttgatgcagcagcagggttagggtttgctgattctctgactccagggcctgtgccctgaatcgcagtaatggcttcattccttttgtcatctttgtatccttagtaccttatacactgcctcgcacataggaagcacttggtaagttatttttgtatgcatgaaggaatgaatttaacaagaaagcacgtcttaagtgttgtagcatgtttctaaggaggtcaccatcttgtggagctgctgtgtcactggcacatctttggcgagtaagtacaggttgagcatccccaatcagaaaataccaactccagactgctccagaatccacacatgatgaaaccttgagtgccaacacgacacttgaaaaaaatactcaatggagcattgcagatttcggatttttagattggggttgatcaactggtaagtataatgcagatattccaaaatcctaaaaaatcagaaatctgaaacacttctggtcctaagcatttcagataaggggatactcaacctgtactgaaaagaaaatagcatttcactgaaagtgtatttaatgaaaacccatcattcttcttcatttcaaagcagttgtctacctagcacagtcagagagggtattctgggcccagcactgctgagacagccaaatgactgacacctctggcccgaccacttctgcctggagcactgttggcttaatggtggtaacctggattatgcaccatcctctgctgaaataatgctgaggcacatacccacattcaggcatctgcattaggccaagcatagctcaaaagcccagggtgacatttaagtcatgctggttttctttaagtttaaaagcaacatggtgattagtgaatgaaaacagacttttggggatggggtctgtgaacctggaaataaacctgaagtggtgaccaggagaagcttcctgttgtcactgaaagccattggtttgtgagattgtgaatctgcagagtgagtaaagtcatgctggtgtgctttgtaatctattaatggagtgggtcatcttcacctctttctcggtggttttagatgtccagtctgtagtcttcgatgtggctaccctcccagtaggtagtcatcctttaatggactaactcttgaagaatgctaattctttatatttcacagatatttgtcccagtggcatctttctagtatatataaatttccatatttttttcaagcagagaggcaagtgtttggtcttttctcaaatgggaggggaaagtggtgattcttgctggggtccattggtcagcactttcgattccttctcaactggatttggtaacacaagggagaaggcaggtttttacctcctccaggtattagggtagcaataccaagcttagctatacattggaattcccaaggacgtttccaaagtactgatgtctgtgcctgactgctagcgattcttatttaattggcctgaggtatagcctgaatgttagaattttgtttgtttgtttttgttttgagacagtcttgctctgtcacccaggctggactgcagtggcaccatctcagctcactgcaacctccgcctcctagattcaagtgattctcctgcctcaacctcctgagtagctgggacaccaggtgggtgccaccacccccggctaatttttgtatttttagtagagatgaggtttcatcatgttgcccaggctggtctgaaactcctggcttcaagtgatctgctcacctcggcctcccaaagtgctgggattacaggcatgagccaccacacccggcctggtgttaggatttttgaaagcttcttagatgattccaatgtgcaaccaaggctgctgaaccactggtgtgaagcaatgctgaataagcagttgctgttggacagaaatgttggtctgcaagcccatgatatcagtagccatttgaacctgtaggtaggagtctgttgttttcccattttctatctatctatcttcttttttttttttgagacggagtctcgctctgttgcccaggccggagtgcagtggcacgatcttggcttgctgcaacctctgcctcccaggttcaagcgattctcctacctcagcctcctgagtagctgggattacaggtacccaccaccatgcctggctaatttttgtatttttagtagagatagggtttcactatgttggccaggctggtctcaaactcctgaactcaggtgatccacctgccttggcctctcaaagtgctgggattacagatgtgagccactgtgcctggcctgttttcccattttcttttttgagacaaagtctcgctctgttgcccgggctggagtgcagtggcgggatctcggctcactgcagcctccaccttttgagttcaagcaattctcctgcctcagcctcctgagtagccggagctacaggcgcatgccaccgtgcctggctaattttttgtatttttagtaagagacacagtttcaccatgttggtcaggctggtctcgaactcctgaccttgggtgatccatccgccttggcctcccaaaatgcagagatcaccgcgcccggcttgtttttccattttctaaatgtaaaagcagctgccttctttgcccttcaagaacatgtccaggtttgaaatagattagatttaaattaaaaagtaaaactgtggctgtagaaattcaacaggcttgtttttctctcagcattttcctcattcagtaggtacatgctttagaagagtaagaagttatatttggaactccaaggggataaggtataaccccacccgttgctggacagctagcaggggagaaaaacaagggctcctcacgataactgcacatagttttaccaggtcgtgagcaattaatttcctctgtctctttcattttaaaaggcctctattgctactgaaaagcagactttgtttgtttgtttgtttatgatggagttttgctgttgttgcccaggctggagtgcaaccgtgtgatctcagctcactgtaacctctgcctcctgggttcaagcgattctccttcctcagcctcctgagtagctgagattacaagtacctgccaccatgcccggctaatttttgtgttttttttttttttttttttagcagagatggggtttcaccatattggccaggctgatctcgaactcctgacctcaagtgagcaccccaccttggccttccaagtagactttattttaattaaagttttatttaaaaatttttaaacaagaaatcaggaaattaagccacccctcccaagatgtagagtaagtttctggaagatttttgcaatagagttgttgtgtatttgaggattcttaaaacagtgacatattattaatttagtaatcagaagaaaaataaatgctttttttttgtttcatgctaggtgctaccaggcttactgtatcattgtttgaaggaagtagaaaggaatttatctatcttcaaagaaactccaaatagtagaatcattagagttagtgatatcttgtctcttgcctcatgttttttaaattctagtttcctgattaggttctagctctagggcttgggtcagtcattgaccagaatgattattatcttcgtttttgttgatttgtttatgaaaatatacttagtgtaatacttttgggaatttcattgccttctagtgaatgtattgactgtgccaatacatgtttccagccagcgtctcttgccacacatgggcgtatcacaaacacaggcacattttctattacttgtgaggtcttttaatttttttctaaaggagaataatttcatctattagattcatccagagtaataattaggatgaggggttcttcacatagatttttgaagtagttactaccttcagaagaagattcaacccaggccaggtttgcatgtatgagctgagctcagagaatttctgtgtaaatattatctttaaggttctgtcttggttcatgtttttgtttttgtttttttttaagataggatctcattctgtcacccaggctggagtacagtggtgtgatcattgcccaccggaacctcgacctcccaggctcaggtgatcctcctgcctcagcctcccgagtagctgggaccacaggcgcgcaccaccaggcctggctaatttttaaaattatttgtagagacaggttctcagcatgtttcctgggctggtcttggcctcctgggctcaggcaatcctcttgcctcagtctcccaaagtgctgggattataggcatgagccaccccacccagcctggtttatgtctttatataaattagtctctactattctctataaatgcaggcttagtgtttttcaggaaagctactactgaaaaggacagaaagcattctgttccttcccttgttaagacacagttaaaattttcaagttgcctctcgttgaattttgccccagagtacttgcagagtaggcagcgcagagtaggcagccgtgtgcatatataaaaggattcaatgtgttagccatttgattcttggaaacctgctcatagtgctttttcaaaaatatcttagttgaagattctagaattctagggtacaaagtgaatttgaacaggatgttttaattttcatagaatcagcatggatccaaaaggatttaatattctgtgaaaaaaataaaaacaatacagtatactggaaggatctctcattcagagtttagttggagctctgtcatgcattagccagggctcctggtctgagttctgtgtatgttgttccagttattcatctgtagaaaatgaggttggaggaccctcctcctactctacaagtacagtcccctaggaaaaagacatctgccatcacactcttcatatccactaacgtgactctaaaggggcatacatatgtgagggtttttaaattataaacccttgagaatgagaacacaaaaggagaccacagcaaaaaaccttggtaggtagaaagcagaagaaccactgataaaagacttaacaaacccaagaaaactgactgctcaaagcagcaacaggagaaccagcaaccaccccaggatcccccagaagctcaggaactagcaatatgggaagtaggagcaaaggtggcaactaaaataaagggagattgaaagctgttaaaaagcagtcagatacccagacccatttccccatcctggcaagagctggagacttaataaccccagagatggcaaaacagaggctcctcaacctggggatacctggcatgaccacagtatttgaaaagatggggattacatatgccccagcctctttctcttctttcttagtttcaggatgtttatagtcaggactctaccattctggcaggagattcgagtggatttctctggagaatctggtcagaccaggagaaaagacccaaagatattgacactggagataccaataagagaaaaatgactgcaaacatgaaacaagaatatagtaagaaatgaacattcaggaaacaagagctcttcaaagttaaaaaatatgatagcagagatgatgattaaaggaaggttgagtaaagttgaggaaatctcttggaaagtagggcagataaatggcaagacggaaaactggatagaaaagatgagacagaggactgggaggtctcacatccaactcctgttctgtattctccagaaaggcagcacagagtacagaagggaggaatcatcaccgagagaatacctccccccaagcacatttggcatggaagaaggccagaagctgccacacctcctctgggaggatgaagttgagagaatacctaatgtatgtcttaggaggaaatgtcttggtgaaaggcgtagtgttgaattagaatcattgcatataaaactgagcaaacagaaaaacaagatgcataactttccacatttctcagcgacgactagtacttaacagcagcatcgtaatacaaagactgaagattgtcctaaccacagctatgatatgtgaccgatgggagactggggaatggaaggggatcgtgtggcaggggtggcagaaggaaggggataagtgggaggtcggtaggtaagactgaaaacagaaacatcacgaccagccgtagaggctgacagaggtgaatactgcatataaatgctgagatacttggccaaaagaagggcaagtggttcctttagaaaacagaaatgagaggagggcaactgctgtttttaaaattacatttaattacagttgactgtaaactgagtgctgcatataaacctataaaatcaataggaataggaacactggttaaaatctgccatttggctgacatttttattgatgggttcacatttttagctgcatcaaagcggtagtccagagtcctgtctccttctaccaagatgatagctaagagaaagacttacttggtaggcatctgataattgcacggttgatcacacataccagtctgatcgacttttttcctttacctccctagattatcctcttgacttgaaccacagtgaaaccttcctgcaaactacaacatttcttcctgaagacttcacctactttgcaaaccatacctgccctgaaagactcccttccatgagtgagtacagctctggcctgtcttcctctgcttttaaaatggataaaggggagggcactcttgatctctctgtctgcctgcagagagaatataaatacctccctgccattggaaacagggtttgtgaaagttgtgctcctggctcctcttcaaagcctgctgcaaggttgcctgtgttcttgggtgccattttctacctttcctactttttcactcttccctttgcccttgcctgtcctttgtaacttgggttctgtttgaacttcctagagaaagtatgaatacagtcattcatagcttaacaacgagggtactttctgagaagtacatcattaggtgattttattgttgggagaacctcctagagtaaaattccacaaatctagatggtgtagcctgcgacacccctaggctgtatggtatggcctattgctcctgggctgcaaacctgtgcagcatggtactatacagtaattgtagctcaatggtaagtatttgtgtatctaaacatagaaaaggtacagtaaaaaatgagatataaaagataaaaaatggtacagctgtgtagggcacttaccatgaacggagcctgcaggaatggaagttgctctggtgagtcagtgagtgagtgaacgtggagtgaatgtgaacgtgaaggcctgagacatgactctgcactactgtagactttatgaacactgaacactttggctgcaccaaatttattcagaaaatatttgtctgtctttaatggtagatgaaccttactattatacctttctactttctaaacttgtgaacttgtaaaaagttttaaaaaaaactgcagccttgaactcctgggctcaagcaaccctcttgcctcagcctcctgaggagctaggactacaagtgcctgttgtcaatgcctggctaattttaaaattattattattacttttttaagaaatggggtgttactatgttgcccaggctggtcttgaactcctggcctcaaacaaccctcccacctaggcctgggcaacacgctgcagtgtgccatgatcgtgccactacactccagcctgggcaacaaagcaagaccctgtttcaaaagggtaaaataatgatttaaaaatatagtataataaatatataaaccagtaacatagtttattatcattatctagtataatgtactctacataattgtatgtgctatacttttttatttttgagagggagttttgctcttgttgcccaggctggagtgcagtggtgccgtctccgctcactgcaacctctgcctcccaggttcaagtgattctcctgcctcagcctcccgagtagctgggattataggcatctgccaccacgcctggctaatttttgtatttttagtagagatgggaattcaccatgttggccaggctggtcttgaactcctgacctcaggtgatccgcccacctcagcctctcaaagtgctaggattacaggtgtgagccactgctcccagccttgtgatacacttttatatgactggcaatgcagtagatttgtttataccagcatcaccagaaacacttgagtaacacaacaatgctatggcagctatgtcatcactaggcagtaggaatttttcaactccattgtgatcttatgcaaccaccgtatatgccatccgtcactggtgaaaatgtcaaagcacatcactgtataggcagtcagctttgtctttttagtataaacctctcactgattgtagtgcttgatcttagaggtgggggtctcactatgttgcccaggctggtctccaacttcagggagcaatcgtcctgcctcagcctcctgagaagctgggactacaggcatgagccaccatgccttgcttggaagttattttcttaacaaagtgctagttaaaacaattcttagatctttttgttcttttttttgaatctcgtgtaagctaaaacaaggacagtaaactcttatacctttcctatacttttaggcttcttaatatggttccccacttctttttttaaaattgtttttttttaagaagtgagatcaagaaaaggaaaatcttacatttgcaaagttgacttttatgcacaaatatagtgaaaatagggaaaatgttagaaatagtcgtgcatggtatttgaacatattctcatccatatatgaataattaattataagtatgtaagttgtgttggaagccttactgtttcatttgcatgtctcaccacacatatataggttttccctttaaaacctgcatttgtctgcatctagatgtaagcttagtttgggaaggctgagatttgtgtatcagaaataggcgttgacaggcctaaaactaatgttattagttcattgtttcagtagcatttattgattgttactgtaccacttcctgacttaagtcagagatgaccagcattctgagttaggacataatcactcagggtcctgacccactggtgaatggattgagagaggtagtgtggctgcacttgcatcaggagcaaacctgacatgactctaagctcagctgcttttctccttcttctcagaaaagctcagctgcagccaggtgcaggggctcatagctataatcccagcactttgggaggccaaggtgggagaatcactggagctcaggagttcaagaccaacctgggcaacatagtgagaccctgtctctatttattaaaacatattaataaacaaaacaaaaaaaaaagaaggctgggcacagtggcccacgactgtaatcctaacattttgggtggcccaggtgggtggatcccttgaggtcaggagttcgagaccagcctggccaacaaggtgaaacctcatctctactaaaaatacaaaattagctgggtgtggtggcatatgcctgtaaccgcagctactcaggaggctgaggcaggagaattgcttgaacccagaggcagaggttgcagtgagctgagatcacaccactgcactccagcctgggcaacagagcgagactgtctcaaaaaaaaaaaaaaaaaaaaaaaagctcagctactgttttacttaaagttttcatttctacctggcccctgacagaagcagaactctaaagtcttaattccttgatttgcctcttcaccttgaaaatagtgaggaactgaaatacggtgagatggaaagcagaggaagggacttccatccttgctaaaaacaaattcagctgaaaaagcattgcgctctccagagactaaaaccccaggcatagggaaacctatcattttctgacctcttaatcccttttccccgtctctgttcagagggcccaatagacataaacatgagtgaaattggaatggattacattcatgaactcttctccaaagacccaaccatcaagctcggaggtcactggaagccttctgattgcatgcctcggtggaaggtagggtgtgaagtcacagccaaaatgctgagaagcccacctggggtttgcctttggtccgaatcaccatgggattagctaaccatgacattttgtcattttcatcctaccattccatgcaaatgtagaaacattttagaggaatgggtttccacaaggactctttttgtagatacagaaatttgcattattctgatgaccgagcaagaccctttggtcttcccaccaggaatattaacaaagcaaggggatgagggcgttggtggtctctaatgacccatttgcagaagtcatctacagagtcagtgcttcattcctgttctccattggttactacaagattagtggattaaaaagcaaagttacctggcttgacattgagatttagtttttttctgcctgaccatagtcagaagacatcagtagttttcgttaagctgtgaccccagctgaagtccattctttcaacaagtatctattaaaatgcgtattctgtgccagcctcgttaagtgctgctgatgcagcagatctggaacacatcagtatccagcccatcgctgggaaataaaaacagttgaataaccagcatttgtacattgcacattgtaaggggaaatactgttttgtgaagcttgttttaattgtaagtttatagatgtatttttgtcacagtgtagaatgtgtgttttcctatgagttatggcctagaataaattataggcctactatgtactataagatatggtatatgtaagaatcacattcatctaggtccaagggccaacttgccaacatagatctttgtttagagaaagctgaggacaagatagccagcctcccagaactcccatgggttggtcagcaattcatcaggggtgtcctgctaaggagtgaaagctgagagtcctaactgtgcttcttttgctgtaatccactccaggtggcgatccttatccccttccggaaccgccacgagcacctcccagtcctgttcagacacctgcttcccatgctccagcgccagcgcctgcagtttgcattttatgtggttgaacaagtgagtagtcctttcttttcctttcttttttctcttctgagacagcagtttaggttgctgcaagctaatccactgttggtgtgaagagccaataaaactgaaatcttaggatcgagttgcctgaggtttgaagggggagcagagagcaattctgtgctcctggtttgagatgtctgttgcccagtactgggcacacttgaatccaggagagagctttgttggctcatgaacaaaggcctcttgtattatggttttgttggtgcctgcaggctccagacccaggaagttccccttaagataaagagctgcagcaaggtacagcacagaggatgtggccttggagtcaagagacctcagtgcttgtcatgtctgctgttaatcaaccaagtggcctgggacatttgcaaacttctctaagcctgagggtttggttttgttttaatcttaaaaatattggtagggaaccagatatagaggtcacaaactgaagaagaccgcatggcaaattcagtctgtaaatctttttttttttggtcctgcatatattttatttgcctttagatggaacatgactgtcctactgtggttttctcttgccgggcctactttatatgtttacattactgacttggcttctgtaggcattttgaagtatgtgatccttgaactagaggtgctatatccatagataaacaaaaggttgacagatttccctgaatacactgatcgtcagtctgagggtcttttgcatgctcacctctctctatgggcacacttttgagtctcacagtctgagttgctgttaagtggtcaccctggagcttgccttatactggagtgagaaaaaagctgagcaccactgttcagcaaggctgggcatctgggaaatgctaacggtctatctgccggtcctaagttgggtattttgatagtggcaagggggagtcaatgtagctgtaacactaattaggctgttaactgatttgaactggtttcttcatgagccactgaattctttgtccataggcttgagtccctggcatgctcagtgactgttgtcttagttagatcttaaaaataaaacaagacaaaactaaaaaccactctttgtactagatttggtttatgaacagttagagattggttgatgtgctgaagagcaagtggtaaggagtagaaatggtagtgttgtctcttccctttgtggagcggggtactcttctaaatgctggtacacggttgcatttctgccttcagtagccttgggagagagaagcttgcgtttgctatcacttacatttttaaagaaattggggccagaggtccagtgactttttctttttcttttttttggagatggagtcttgctctgtcgcccaaactggagtacaatggtgcgatcttggctcactgcagcctccgcctcccgggttcaagctattctcctacctcagcctcccaagtagctgggattacaggcatgcgccactacgcctagctaatgtttttgtattttcagtagggatggggtttcaccatgttggccaggctggtctcgaactcctgatccgcccaccttggttttccaaagtgctgggattacaggcgtgagccactgtgcccatgccagaggtccagtgacttctgagccacactgtgagttgatttgtggtgttggacctggttacactagcccagtgatcttttccagttggttctaataaactcgtctttaggcacaggaaagacagcaaagattttccttcaagattcttttaaagataaagttctgtttcttttaggttggtacccaaccctttaatcgagccatgcttttcaacgttggctttcaagaagcaatgaaagacttggattgggactgtttgatttttcatgatgtagatcacataccggaaagtgatcgcaactattatggatgtggacagatgccgaggcattttgcaaccaaattggataagtatatgtatctgtgagtatcatttcttcttaattaaagaggttaaatctgaaaggatggtgagcgatgtgaaaaggaaatctaattagctgcaacctagatgcccatcaactgatggatggataaacaaaatgtgtgtatccatacaattggagcactgtttggcaggagaaagcaatgaaatactgatacgtgccaaaacacggatgaacttcgaaaacgttacgttaaagaagccagacacaaaggttgtgtatcatatgattccaggtgtctgaaatgtccagaataagcaaatctatagtgacagaaagtagataaatggttataaggggctaaggaggataggaggagcagggggtgattgctaatgggtgcaaggctttgcgggggacagtgatgaaacatgttaatatagattgtggtcatggttgcacaattcagtgaataaactaaaaccattgaatgatatactctaaatgggccaattgtgtatgggtatgtcaattatatctcactaaagctattaaaaatcagtttgcaaaaattaattttgctaatttgatacattcatatggttcaggtcaggagcacagagagcactgtttttagtcctcaaatgagaaccttctagggaaaacagttaccctgtaacacacagatgattgatgtcccacatctcctcctaggcttccttataccgagttctttggcggagtgagtggcttaacagtggaacaatttcggaaaatcaatggctttcctaatgctttctggggttggggtggagaagatgacgacctctggaacaggtacctctgccgttctttcggtgtcttctagaaatgctaccttagactgcagaccaatactatccgataggaatataatgcaagccatgtgtgtaatttaacatgttctagtagctacagtttaaaaggttaaggaaaaaaatgaaattgaccagctgtgatggctcacacctgtaatcccagcactttggaaggccgaggtgggaggatcacttgagcccgggagttcgaggccacagagagctgtgccactgcactctagcttgggtgacagagtgagacctgtcttaaaaaatacacacacacacacacacacaccacacacatccaagtttttagaaaatatctttaatcttaatttaaaaatatcttaatatcttaaaaaacaaactgtatatcccaacaaagcagctattttcatttttctcctttgacatgcgaaaatcaacaaattataatttagcaattttttcttctaataaataatacgttcattataaaatacaaatgagtataaaaataaattacccacaacaataagtaacatgttaccatttcattgagtttattttgtgtttaaaaagtggcaagtgaacagtaatttaaaatctctgtgtgtcagtttttaaaatcacaaatctcaggattgtgaggattaaatgatgtaatgtgtatagagctctggcatatctgatatgtgataagctctcaataggtgttactgtttttattatatcaacattaaatactctgtaaacaggatcttaagtggctccatttaattcggttatatagatgtactgtaatttatgtaactatttcctggtgtatatttagaatcttttccattttccactatttagagtgtgatatagtagataattcttttgcctgttattcctatttaggaaaaattcctataagcgaatgtagtcattttaaggctctttttttttttaagctctgtcctttaatggatgcaaatagggtttttaaggcatattataactaagtgcccctcctgctaaaggttctaacaaaacttttcacttcaccagtgttctctgtactaaatgcccatttcattggaaccactccaaactgaagggtggaatattagtgatatgtctacatagatttagctgcgccatcacataaggcttgtactgtacaagcttgggtgaacaatcctgtgtgtgagtggaataaagtaatatttttatggagtaagtaaacagtaacctcataaggaacaaatgcaaaatactacctggtatctgtttcctttgtagcttggcttttgaaaagtatgtgtttgttgttaattacaaggactattttgctaataaaaattcaaatgataggctgagcactgtggctcacacctgtaatcccacctcttcacaaggcctaggcttgaggatcacttgagcccaggagttcaagaccagcctgggcaacagtgagaccttgtctctacaaaaaataaaaaaaattagcctgttgtggtggcacacgcctgtagtcccagctactcaggaggctgagatgggaggactaattgagcctgggagattgaggctgcactgaaccatgatcacctcactgtactccagcctgggcaacacagtggaccctgtctcttaaaaaaaaaaaaattagatgatacaagtgtctaagtattaatccccattttgattctattttattccctggaagtaaccatttctttccgtacttttcttttcttttttgagacagattttctttctgttacccaagctggtgcaattttgctcactgcaacctttgcctcccgggttcaagtgattctcctgtctcagcctcctgagtagctgggattacagacctgcaccaccacgcctggctaatttttttttttttttttaagtagagatggggtttcaccattttggccaggctggtctcgaactcctgacctcaaatgatctgcccacctcggcctcccaaagtgctgggattacaggcacgagccacctagcccagcctattttttccgttcacataaaaactttaattcagttaaaattgagttttaactcagtttttaagaaatgacacaatgagtcagttaagcgggtgagagcttttgctgtgtgtgatttccagggtaagcttgtaacatgtcttgtaggctttggtcactcctgggctattaccgttgtatctaaaagcctgttctcttggtcttggacagagtacagaatgcaggctattctgtgagccggccagagggtgacacaggaaagtacaagtccattcctcatcaccatcgaggagaagtccagtttcttggaaggttggtggaatttatctctgtctcttagaagtatcccctatactttcatgtccggatatcttagagcatattacagccccttctcctactccccaccccgaggccctgttctgacagctgtttgacagctgttgcatgtattctaactctgaggcagaacagtgtggggatcagaccgttggtgaacattttcaatagtaagattcttcgaaggaaatcacttgtcctatgtcttcagccttgtggtctccacagtagcctttggggaatttgggaagaaacagcttgggtgaaggtccctgaggtgacagagcagtggcgccctttccgcaggctcccgttccgaatggtgtcctgagcttctgtctgggtggctgcagttgctgtgttaccttttctttctttgtgtgtgtgtgtgtgtgtgtgtgtgtgtgtgtgtgtgtcttttctaaattgtggggaagactgtgctctagacaaccaattctaattgctgaaattctgttttcatgggagtaaaatggcactgaatacagagtatgaactttctcatctgttgtatttttaatgctttacctcccacttccccactctctgaccttgggcaagttacctcacattattaagccttggcttcctcatttgctagcaggggctggcgtgagcattaaatgaaataattaagtgaagcacctggcatgaaacacaggaggtgtttctgaccacagcactcagcctggcatagcagaattggccgtgcgcccaccttgtgctgcagaagtgctgccatgggttgcgtcctctgctgtgggacgccctgctccatcctctggctgcagaggcatggatcctcactcagagccacctcttctctgttccctccctaaacaggtatgctctgctgaggaagtcaaaagaacggcaagggctggatggcctcaacaacctgaactactttgcaaacatcacatacgacgccttgtataaaaacataactgtcaacctgacacccgagctggctcaggtgaacgagtactgagaggagagaatgtacgtttgctttacccaccgccaccaagaaagcagtccgatgagatttttttttggaggggggagggtctacacagcaagagaacagaaatactgtgtctcatgaaggatcacagagttcagggggaaaatgtgacagcacacgcacaaacgccttcactggatcagccgctggaactgagggagtgagcttggggacttccttcgtcagcactggctttctgttttcacaagacagacgtctgtcccgctgctctctccccatctcctaccccacatcctgtcttagccgcagtctccagaacccatgatgaactgtgatctgccgtggtcctgccgtggtcctgccgtggagcctgtccctacacatgaccttggagcctcttggccttcagagcagaggcaaacccaccacagggcagctgcgttttaggaagagcaaatgaaactccacaccattcttctagatctctggtgttctctttggtttcattttttttaaaaattaccttctttgggtggggattgagggtggaggggagggtgtttgggaaagataaatagacataaatatataacaatcacttcttgaagaagtataattgtaaataagccatgtaaaatgcctttttaaaatttaattttctagctggctccaattcaaattgaggatttatgtattaggccacttacttggttggcaagtgcaggaactcagttaaaatgcagttgaagaatgtcatctcccgaattgctgtcactttggcgagggagtggatatagggcatgtcacaaaagaacaaaataacccgacctttattgctgggagctggcttctgtccctttcttccccccccccacgagtcttgcccttgacttctgctctggattcactcttccctgtcggccgcgcatgtgctcatcccactctccgctaagcgggaggctgctgttagagcaggctgcttcctgcctaaagcaggcccttcggggctcgctgcacacacatctctggctctccaggcttcgtgttctgtcttttcatcagcatggcggggcggggggcggggggcgggggtgtgtatgggaatccctccccctcttactttttctcttgtggaacttggccacagtttctgaacaatgtgcctacattaccagctggcttcagtgattcctctgtgtccctttttggtttctggaaagattctttgtcaacattagtaactgatacatagaaccaaggagcactcaaatagggagccaggagccagggagctggtgacacttgtgtgctgtggggcagctgggatccaggtaagaccggattgaagctttgaaattagactaacaaagctccagacagcaagagcccaggtgcactgctcacacccccacctgcattttgaagtcatattattttttgttttgttttttaagacggtctggctctgtcgcctaagctggagtgtggtggcacgatcacagctcactgcagcctccatctcctaggctcaagccattttcccacctcagcctcccgagtagctgggactacaggtgcacaccaccacacctggctaattttttgtatttttagtagagacgggggtttcttccatgttgcccaggctggtctcgaactcctggactcaagcaatccgcccaccttgacttcccaaagtgctgggattatgggcgggtgtgagccattgcgcccagccttgaagtcatgttctaaattgtatttgaatttgtgcctctttgtttttccccaaaccaaagccctcaaattgtagtctctgtcggcttctgcagaattctggaaaatgccagttttcctcccccgcccttgttttccataaaacatatttatatattgtgatgaggagtactttctgaagagtacttcgtatttttttttaattgccttgtttgccttcaacttccttgattttcatagtttacatgggtgtgtgtaggggtgtgtgtgtgtatgtgtgtgggttagggcttttttcgttgcatgtgatggttctgtggacatatgatccccacaaactgtgggagtgattggccaggccttgttttttttgtttgtttgtttgtgtttttgttcttttgaagaatagagtggtatttagaaaataaattgcattgcaaagctcttatcggctcatatgagagagcaggttcctgcccttgaaaatgccggtaagctatagcatatgttttttaagacttaagcatttcatgctttaaaataccttcacaagtgaacattacacacagaagttcatttggttttcctttgttttatggtgcatatagcaataaagacccccctccaccctgcaacccccatcccccaccgggcctttgtccctgccttggcttttctccccttctcattctcctctcccctttcctcactgaaggctgtgagttgctttcaatgtgacaacactatgatgtcatttggaaggatttgccaggacagactgattctgagtcctgggtgccgtatgtgtatgcggcagtgttgtcaggcgatcttgtttgaagctctatgttgccataattaccatcaagtacacactgttggcaaaaggctaacacctgactttagaaaatgctgatttgagaacaaaaggaaaggtcttttttcactgcttaaagtggggtcactttgatacctttgcggtcatgtctgtgtctgatgagtgtagaatctctggatgtgcactgtcagtcatgtgtccaccaggcctcgaatatcatatgggaaatgtcatagttaaaaacgtacagccaggcccgtgtgctgttaatagtgtgaaattgtcatgttaaaaaaaaaaacaaaacaggaaccaaatgtgaccttgtgcatatattggtagctgaaaatcttcaaggctactgatgggtggccccttaatcttgtctttgattgctgtgtgcagggaaaggtgtccccgtttgttcatgctgttttggggggtgggggggtatttgcaagaatactcattttgacataataggtcctcttgtcagagatcctctaccacagacattaatagctgagcaggagccacatggattgattgtatccactcaccattgacgatggcattgagcgtagctagcttatttccatcactacgtgtttttgagcttgctcttacgttttaagaggtgccaggggtacatttttgcactgaaatctaaagatgttttaaaaaacacttttcacaaaaatagtcctttgtcattacattatttactcatgtgtttgtacatttttgtatgttaatttatgaatgattttttcagtaaaaaatacatattcaagaaccaaaccttggtggtcatttctctttgtgtaggacagtttgggtccttgggggtctttcctttttcctttcctttcctacaggagttcaacttaaggcagctcagctgagctctgggtcttgctggggtaaatactgcctgacccgtgctgcaggtgaacgggctgagtaaaaagctacgcagtgtaacagaagcagtcctccactgtgctgcccaggcatgcccacgcttgggttttctttcaagaatcacccaggtggtaccaagaaagttgcataagacacttgagtgaggggacttgggggtgaagggggtggtgagggttgatggagtttgattccagaaggttctctgggatcagtgtagggtttatatgccagattctgctcagagattgtcatcatggcttctatgtgttgaatgtttgccactcacagtattaatagtgtcagatgccggggacataataatagagaaaataagacaggatcagtggactcattaaacttacggtccactggggggtatgattaaaattgtatcctcaatacctggtccaaaaggggaagctgcaggtgacgagtgcatggtagggtgggcattccagttgggaatgtagggaaggtggaagcaagtgagctagggggagacaaggagcgtgtggcacacagctgcagggcagggaggaagccagcgtggctggagtagagggggcaggggggcgcacagggggaggagtttgcatttcatccttagagcagtggattcaagagttttcagcaggcagggctgcgtgatgcgattcggattccatagcaactttgagagatggctctggttgcagggagaacgagcgatggtacagaagcagaagagaagcaggggcgagtgagatgggtgcagggacgacggaggaggggagactgggagatactgaggtcgtgctcccaggacctgccaggggtgatggggatggaggactccacctaagctgctggcttcccacttgcacaggtaacagggccattccctgagatgggggcactagagtcagaccagattggcgggatagatacgagatcagttgtgactgctgagttcagggagttttgagacaacctggcagagacagcagggtgggggctacaggcagactggggggtctttgggtggaggaggttagtaaggacccagcagcgggtgagattgctgggggattgagaacaggaagcatagagtaagagaaggcagcagccttggcccagcctctgagaacctggttgagaaaaggaggatgagtgagcaggaggaggggtgggaggacaagcaggccaagagggagagtggtcagccgtgctgaaggcagcagagaagcgatacaagaggaagagggagaagcagtgagttggcagtggccaggtgttggaaatgtggcaggagccgttttgctgacctgatggggtggaaggaggagatagcagcagagtgggtgtctcttggatttcctgggaaggggtggaaagaggaggtcagggccacaggaagcgcgggaagctgggggtgggaggtgaggtggggttgggttttggttttcccacaagagaagcttgagtgtgtttcttctgaaccacagggaatgtctgagagagcacagctgaatacgtacaagagaccaggtgatctggtgggaatgtccctgaactactggcaggagatgagattcaaaccagaaaaaccaaacagaaggaacgaggagctctgtataggccatcccattggcagacacacaccccgtgaagactgttgttgctgtggaggtcagagatcccttccagccagctgctggaattgggattcagcagaactgattcctggcactaccacgtcctccatactctcaacattttttttttttagttttcagggaagtccagtaataaaaatagttcctatttattgagtacttgctatgtgccagggcctatgctaagtgcattgcacaccgtgagtcctcaacccttgagaggcgggcactgccccttgttctggagcacggcttctccacattgctcttgacaaatgggggagctgtcctgctcattgtcgggtgttcagcagcacccctggcctcctccctctaggtacaaacccaaatggaacagctactctagacaaactgaagccacagcttgcctgaggtcacaaagctagcagctgagccggctggggacatttttgccccagggaagacgctcttaacccctaggctgcttctgctgacccaactcttttgcatatgtgctctaaatagcttttgttcacagagttgaaaagtctattctaaaagtaacatgtgaatacgtgcttgctggaaaataagtgttaaaccactcctttaatattagcagtttgactgatgtctacattttttagtttttttgagacggagtctctgtcacccaggctggagtacagtggcacgattgtagctcaccacagcctcaacctcctgggctcaagtgatcctcccgcctcagcctcctaagtagctgggactacaagcccacaccaccacgctcagctaatttttataatttttgtatttcttgtagagatggggtttcaccatgttgtccagattggtctcgaactcctgggctccagccgtccttttgccttggcctcccaaagtgctgggattccaggtgtgagccaccatgtccagccattggctgatgtccagatctatacctgtatacctatatgcatgcttaggaaaacaaaggcatagtttaaaaaccataagttgtcctgtaattacttttgttttgttttgttttttcttaatgtttctggagacctcttttccgtgaatgaagagctccctcaaataaagcccagatgttacctccttggagaagatttgatgagcacccagtctgaaatgccacctccctgtccctgtccccccttaccctgttttattgattcacaatattctcactctgaatcgtactatatttttattgttctttgttcattggctgtcaaccccactaaaatataatccccatgaaggcagagactgttttgttttctgctctatccccagagctaagaactggtcttagcacatagtagttgctcaataaatatttgttgcatgaatgactgaacctatcttattatttgaattgtgacacatggtaatctcttgtgtggatgtatgtaatttagccattcccctcctaatggacatggaggtagtttccagttttccactatcacattatatgcaccacagtgaacacagatgcacatcaatccatgtgcacatatatgtgtaggccaacttgagagagtccaagaaatgaaattgttggagcaagggatacacacccacaccacacacacacacacacacacacatatatatgcacacatgcacacacaaatacatacatatatttatttgtttatgatataaggtctcactccgtcaccccaggctggagtgcagtggtgcgatcatgggtcactgcagcctcaacctcctgggctcaagctatcttcccaactcagcttcctgagtagctgagaccacaggcacacacaccacacctggctaattagtgtattttttgtagagacagggtcttactatgttacccacactggtctcaaattcctgggatcaagtgatccacccgccttgtcctcccaaagtgttgggattacaggcgtcagccatcacgccccacctgcacattttaaatgttgaaggagcctaccaagttgtcctacaaaaaggcagtatgaattaatccttctaccatcagtgaatgatcatgctatttatatctttaacccctggaattaaaggggattttgtgtatgatatggtcaggaggggcggtctataatttattttttccaaatggattgctaattgtctcaacagtatttattgaacaatcaataatttccccatgtcttacacattaaattctgtagcaagattcttccatttcattgagctatttgtcttattatgccttacagttttaattatgatagccctgtagtatgtttttataagacaagtttatctctactttctatatcctaccccaaattttgtaaacatttatagaagtgtaatatacatacagaaaagtccataaatccaaagcaaacagctcttttgtcagggtgaacatacttacacaaccccattctcatcaaaattttcagccaggcataggcaggagggtcacttgaggccaggagttcaagaccagcctgggcaacatagtgaaaccctgtctctacaaaaatttaagaaaaaattagccaggtgcagtggtgtgtgcctgtagtcccagctaccgacgaggctgaggctggaggatcacttgagcccaggagagtgaggctacagtgagccatgattgcaccattgcactccagcctgggtgacacagaatgagactctgattcaaaaaaattgtttttcttggctatgtttatgtattttctcaatccggtgagatttattttgtcaagttatatttaaaaatctatttaagggccaggcatggtggctcatgcctgtaatcccagtactttggaggccaaggcaggaggatcacttgaagccaggagtttgagaccagcctgggcaacaaagagaccctgtctctatattttaaaaaattgctttttaaaatctaggatcatgactgacattgcactaaattaatgatctgggaagacagcatctttagcatctttacagtattaagctttacctctagacttaccaaattcttttgctgaggtcaggcgctgtggctcacgcctgtaatcccagcactttgggcggatcacctgaggtcaggagtttgagaccagcctggccaacatggagaaaccccgtctctactaaaaatacacaaaaaaatagccaggcatggcggcaggcgcctgcaatcccagctacttgggaggctgaggcaggagaatcacttgaacccgggaggtggaggttgcagtgagctgagatagtgccattgcactccagcctgggcaacgagagcgagactctgtctaaaaaaaaaaaaatgctagtttcctcctaacctggtaccctcgatgccacagtaccttgcaggtgggctgttcttaataaatacagtcactgagtaacaattcagatttaccatcacatgcaaactagctgtaagggcaaacggttaaggaggatttatgccgcttgtgaaatgcaacctgctagatgctggcagaaaactttccaggcaggctacatgccatgagactccttgaggaagcacagccctgagtacttttctcactgctccaagacacaccttttctctgccaccacgcccgccccactcagcaccctgctacgactagatgtgggactgacaaatgccactgtttgacttatttctaggacaatggtgggtggcagtcatgtaggagagaggtctctgctgtgtagggaggctcggaggtaaggaataggtgggagtagggtatacatcttccactgtgaattctaggaagagcagggcccaggagagatgatctgctggttgcacttctacagccaacaactccatggcctggggaagtcacttcacttccctgcaacttcatttccttgcagtcagatggagagacagcactttgggaggctgaagcaggtggatcatttgaggtcaggagttcgagaccagcctgaccaacatggggaaaccccttctctactaaaaatacaaacattagctgtacgtggtggcacatgcctgtaatctcagctcactcaggaggctgaggcaggagaatcgcttgaacccttgaggcagaggttgcagtgagccgagatcgcaccactgcactccagcctgggtgacagagcaagaccctgtctcaaaaaaaaaaaaaaaaaaaaaagccaagaggacagggctcagagagcttccagatagctgaacacacggaggtttgtaagaaggtgaacaagaactcatccacgtgctgggagggtggcatggggacaggctcaggacccttccagacctcactgtgtgtgtctcatctggctgtttaactgcgtcctttaaaagaacctttgtcataaaccagtagacataaaagtaagtttgcctgagttctgtgagctgctttagcaaataaattaaacccaaagagcgggtttggagctgatcggtcagaagttctggaagcctggacttgtgactggtgggaaggaggggacagtcttggggactgagccctcaacctgtgtgacccgaggctatcttcaggtagacagcatcggagtggaattgggggatgccccgctggtgtccactgcttggtgcttggggaaaaacagacacacatttggtcatggagatgttctgtggccaggtgcactggctcacacctataatcccagcactttgggaggctgaggtgggcagatcacctgagatcaggagttcgagaccagcctggccaacatggtgaaaacccatattgactgaaaatacaaaaattagccaggcgtggtggtgggtgcctgtaatcccagctactctggcggctgaggtgggagaatcacttgaacccggaggcggaggttgcagtgagctgagattgcgccactgcactccagcctgggtgatagagtgagactatgtctcaaaaaaaaagtctttagtgttgattgctgtagtgtgagagcagaggaaaaacagttgttttttccaccgtcacaggggccgtatgcagtctctgtcactcagctattcaacttctcaattctgccctcatagctcaagcagccccagacaatatgtaaacaaacaggcttggctgcattccaataaaactttatttacaaaaacaggtgggtggccgtaatttgccaacccccgagtttggctgaaaatcaatagaaatgtgaacggtgacggaggattacgaacagggaggcaaaccaggggaaaaataacaatgtgtcctggctagttcatcgctatgtaacacataatagcaataacatggaaggaaatcaaaccccctgaggacacaagagtggctaaacaagccaggctctgtcaacacagaggaaaaggaagtgccacaaagtgacagattacacaggaacaagaaatggcagggctgtgagtgaagactgcaagtgaagaaaggacacaccacaagaaggacgcgctcattacaacagaaccctgggctgggcggcacggtggctcacgcctgtaatcccagcactttgagattccgaggtgggaggatcgcttgaagccaggagttcaagaccaacttgggcaacatggcaaggccctgtctctacaaatatatatatatataattagctgggcatgatggtgttacgtttgtacttccaactattcgggaggctgaggtgggaggatccaccactgcactctagcctaggcaacagagtgacaccctgtctcaaaaacaaataaattttacattccttggtcctcggacatggctaaagagatctagggcaatagagacactacatttttgtgtctgtcaatccgcctgatgacagaaatagaatagagtctgggtgcagagggtcatgcacgtaatcccagcactttgggagactgaggcagaggatcacctgaggttgggaggtcgagaccagcctggccaacatggtgaaatcccgtctttactaaaaacacaaaaattagctaggtgtggtggcgggcacctctaaccccagctactcaggaggctgaggcaggagaatcgcttgaacccgagaggtggaggttgcagtgagctgagatcgcgacactgcactccatcctgagcaacagagtgagactccatctcaaaaaaagaaaaaaagaaaaaagaaaagaaacagaatagaagtaaaacagtttagtactgaaatgaactgttgagaatcttagctgccccgtccctctctaacatcatatatactgtgaagtgctgttttcgtcttgttttgttttgtttgtcttttctttgtctttcttcccaactgggacaggggacaaaggacgctgttttgctccctgttccatctccagcacctagtccagaattcggcatactgcaggacagaaggcaaggggcagatgctcaaatatttgctgagtaaatgacaatgaaccttctcaatctgaagattccagatgtaggaagagccagacacccccaggctgaacccactcagaagctgggtgctcttggtaaagtcacatttctcttatactgttttctcatttggagaagggaggtggtaaaactttccgcatgaagttattgtgaagaggaaatgcagcaacatatgtgagttaccaagaacaatgcttcacacacgacaggtggtcggtcaatggaagctttcatcatggcagcttcactgcaaagcaccgtctataaatctaaagtactcttgctatttttgtt

SEQ ID NO: 745 - DNA, 3095 bp, Homo sapiens
gcggccgcctggctgcagcatgcgcgcccgccgggggctgctgcggctgccgcgccgctcgctgctcgccgcgctcttcttcttttctctctcgtcctcgctgctgtacttcgtctatgtggcgcccggcatagtgaacacctacctcttcatgatgcaagcccaaggcattctgatccgggacaacgtgagaacaatcggtgctcaggtttatgagcaggtgcttcggagtgcttatgccaagaggaacagcagtgtaaatgactcagattatcctcttgacttgaaccacagtgaaaccttcctgcaaactacaacatttcttcctgaagacttcacctactttgcaaaccatacctgccctgaaagactcccttccatgaagggcccaatagacataaacatgagtgaaattggaatggattacattcatgaactcttctccaaagacccaaccatcaagctcggaggtcactggaagccttctgattgcatgcctcggtggaaggtggcgatccttatccccttccggaaccgccacgagcacctcccagtcctgttcagacacctgcttcccatgctccagcgccagcgcctgcagtttgcattttatgtggttgaacaagttggtacccaaccctttaatcgagccatgcttttcaacgttggctttcaagaagcaatgaaagacttggattgggactgtttgatttttcatgatgtagatcacataccggaaagtgatcgcaactattatggatgtggacagatgccgaggcattttgcaaccaaattggataagtatatgtatctgcttccttataccgagttctttggcggagtgagtggcttaacagtggaacaatttcggaaaatcaatggctttcctaatgctttctggggttggggtggagaagatgacgacctctggaacagagtacagaatgcaggctattctgtgagccggccagagggtgacacaggaaagtacaagtccattcctcatcaccatcgaggagaagtccagtttcttggaaggtatgctctgctgaggaagtcaaaagaacggcaagggctggatggcctcaacaacctgaactactttgcaaacatcacatacgacgccttgtataaaaacataactgtcaacctgacacccgagctggctcaggtgaacgagtactgagaggagagaatgtacgtttgctttacccaccgccaccaagaaagcagtccgatgagatttttttttggaggggggagggtctacacagcaagagaacagaaatactgtgtctcatgaaggatcacagagttcagggggaaaatgtgacagcacacgcacaaacgccttcactggatcagccgctggaactgagggagtgagcttggggacttccttcgtcagcactggctttctgttttcacaagacagacgtctgtcccgctgctctctccccatctcctaccccacatcctgtcttagccgcagtctccagaacccatgatgaactgtgatctgccgtggtcctgccgtggtcctgccgtggagcctgtccctacacatgaccttggagcctcttggccttcagagcagaggcaaacccaccacagggcagctgcgttttaggaagagcaaatgaaactccacaccattcttctagatctctggtgttctctttggtttcattttttttaaaaattaccttctttgggtggggattgagggtggaggggagggtgtttgggaaagataaatagacataaatatataacaatcacttcttgaagaagtataattgtaaataagccatgtaaaatgcctttttaaaatttaattttctagctggctccaattcaaattgaggatttatgtattaggccacttacttggttggcaagtgcaggaactcagttaaaatgcagttgaagaatgtcatctcccgaattgctgtcactttggcgagggagtggatatagggcatgtcacaaaagaacaaaataacccgacctttattgctgggagctggcttctgtccctttcttccccccccccacgagtcttgcccttgacttctgctctggattcactcttccctgtcggccgcgcatgtgctcatcccactctccgctaagcgggaggctgctgttagagcaggctgcttcctgcctaaagcaggcccttcggggctcgctgcacacacatctctggctctccaggcttcgtgttctgtcttttcatcagcatggcggggcggggggcggggggcgggggtgtgtatgggaatccctccccctcttactttttctcttgtggaacttggccacagtttctgaacaatgtgcctacattaccagctggcttcagtgattcctctgtgtccctttttggtttctggaaagattctttgtcaacattagtaactgatacatagaaccaaggagcactcaaatagggagccaggagccagggagctggtgacacttgtgtgctgtggggcagctgggatccaggtaagaccggattgaagctttgaaattagactaacaaagctccagacagcaagagcccaggtgcactgctcacacccccacctgcattttgaagtcatattattttttgttttgttttttaagacggtctggctctgtcgcctaagctggagtgtggtggcacgatcacagctcactgcagcctccatctcctaggctcaagccattttcccacctcagcctcccgagtagctgggactacaggtgcacaccaccacacctggctaattttttgtatttttagtagagacgggggtttcttccatgttgcccaggctggtctcgaactcctggactcaagcaatccgcccaccttgacttcccaaagtgctgggattatgggcgggtgtgagccattgcgcccagccttgaagtcatgttctaaattgtatttgaatttgtgcctctttgtttttccccaaaccaaagccctcaaattgtagtctctgtcggcttctgcagaattctggaaaatgccagttttcctcccccgcccttgttttccataaaacatatttatatattgtgatgaggagtacttt

SEQ ID NO: 746 - protein, 386 aa, Homo sapiens
MRARRGLLRLPRRSLLAALFFFSLSSSLLYFVYVAPGIVNTYLFMMQAQGILIRDNVRTIGAQVYEQVLRSAYAKRNSSVNDSDYPLDLNHSETFLQTTTFLPEDFTYFANHTCPERLPSMKGPIDINMSEIGMDYIHELFSKDPTIKLGGHWKPSDCMPRWKVAILIPFRNRHEHLPVLFRHLLPMLQRQRLQFAFYVVEQVGTQPFNRAMLFNVGFQEAMKDLDWDCLIFHDVDHIPESDRNYYGCGQMPRHFATKLDKYMYLLPYTEFFGGVSGLTVEQFRKINGFPNAFWGWGGEDDDLWNRVQNAGYSVSRPEGDTGKYKSIPHHHRGEVQFLGRYALLRKSKERQGLDQNLNYFANITYDALYKNITVNLTPELAQVNEY

SEQ ID NO: 747 - DNA, 84410 bp, Mus musculus
  misc_feature (1)...(84410): n = A,T,C or G
catagcatatctgaacaagcaaacattgcctgtctccagctacctatgatctgtacaacccaggatgtatatttctgtgataatccagactaatatctaacctatgcgtttgattgactactgacttccattatttaatcatcctaaacagtttgtaacagcagctgactaaaccttgtatttttgttgttttttttttcttttttttttctttttttttttttcgagacagggtttctctgtatagctctggctgtcctggaactcactctgtagaccaggctggcctcgaactcagaaatctgcctgcctctgcctcccgagtgctgggattaaaggcttgcgccaccatgcccggctaaaccttgtattttttaaagatttatttatttatttatttatttatatgagtacactgtagctatcttcagagggcattggatcccattacagatggttgtgagccaccatgtggttgataggaattgaactcaggacttctggcaaagcagtcagtgctcttaacctctgagccatctctccagccctaaaccttgttttgttgttgttgtttgtttttgttttttgttttaaaagataggtttctctgtgtatccctagctggcctcgaactcagaaatgcgcctgcctctgcctcccaagtgctgggattaaaggtgtgtgccactacacaggtatggtgcggagttgaaacatacatatattaagttgttacaaaattaaacttaaattttgtatcattatacaaagatctatgtcaatgaaaatcttaaacctgtatcaatatacaaatttctgtaccaatgtaacaaaatataacctcaattttgcatcaaaatataaagattatggttacaaaatgtttttaagagtagatttaataacccatccctatttgtctaatttcttataatactactatatcccccttttttcttttcaaccaacccccttccctctacctaagaaaggatagagaagaagaaaggaaagatataaatccctgagtctaagctctcgattttgtttcctccatgtccaagaccacaatgatttgtaaatcatcccctaaaatgataacatatctattattcataaaataaccaaaaccatccatcccaacttaagggattgagatggcaggcctcttataattgttcctcgctgaattgggcaaagaattcattttgtgggcccaaaaggaaattggaaagctagctggtatcatttgttgtccagtctcggtactgagaaagttcagggtttaacttgcgtcctgactggaaccgtttgaaaggctgagtgaaccactgtcatttggatcagcagtcctttctgagactgtcctagaagcaagtctctggaaacagcatcagtttgagcaggattaatcagggagctggaacaacaggtctcagaatcttagcatccccgagggtgaattctaattctataaggactgtccatttggtctttctgtgaacataaagtgtttagaggtaatatatgtttctatattaacataatgtatggaatgtgcactgtgcacagatccgttaaagatgaattttgcagccgggcagtggtggtgcacacctttaatcccagcacttgggaggcagaggcaggcagatctctgagttcaaagccagcctggtctacaaagtgagttccaggacagccagggctacacagagaaacccctgtctcgaaaaaacaaacaaaagacaaagaaaaaaaaaaaaaaaactactgccgagctggaacccttgagattgctcccctggacttgcacggttgaaggaacaagccaaccaacgcccaagtgttgccctttgaccacacatggacactcaagaacacacatgcacacaaaacaacaaaaaaactacagaaagagacttccctggtcatttccagcaaatctcagagactctgcatagggccaagctggtgctctgtgaattgaataacggtgagagagagttagttctgactacccgtcttgtctgtcaatcaggatgtcctggcctctgggatctccagccctaatctgcaaccctagccttcttgctaacaggcgcagtttgggagggtctgagacccagcacctgccacagcaagttcagcagaacccctgacaccccaaatctaatcgcgcagttaatacaagtgccaggctgtcaccttcatcggaacaggaaggacttgggctacagcctgacgcggccatccgagtggctcttcctttgagtagacgtaaggagacagagaaggagcttggaacggacagagaccacccaggaaaggagcactgagggaagaggagatagcctggggaggctggcagctgagaaatatgaagcttaaatcttagagaagaacgaagatggagccttggaaaaattcttcagatcttaagttccctctgcgggccccaggcacctctcagtcttgcagccccagggtggacgctgtttatcatcccttaaggactttacataagcctttagctctcttaatgctaatgccttaaagacagaagcacgttctctgacccggaattcattcaacctctcctaaaatctgtcagctgttggcccaggcagagtccctgccctcaggggctcctttcctgatagagagacagttactcctgacaagctctgagtagcgtgagggtgatgtcacagtgaccagaggagggggcaccccagcaggtggtcacgagcggcctctcagaaggcaatattacttcttatgttccgtgattgagtcttgcaatgtagctcaggctggcctcgaacgcgagacactcctgggtagtgaaatgaaacctagcgcgtgcagccgatgtgctgccccgtccagcagcttcctagcgaatgcacgatctgcagtagccatgcactccgtaggcgcttcgcagcgcgtactccctgcctccagcgcggtacgcgagttcgcggggcgcagcggggacgcgcacatccaccctgccttccgcgtccagctgcgtccagctgcgaccccgccccccggcgccgcggttggctgaggcccgaaggcctgcgattggccgggcgcggcgcgggcgcgggctccgattggctgtgacgcggggccccgccgacgccccgccccgnnnnnnnnnnnnnnnnnnnnnnnnnnnnnnnnnnnnnnnnnnnnnnnnnnnnnnnnnnnnnnnnnnnnnnnnnnnnnnnnnnnnnnnnnnnnnnnnnnnnnnnnnnnnnnnnnnnnnnnnnnnnnnnnnnnnnnnnnnnnnnnnnnnnnnnnnnnnnnnnnnnnnnnnnnnnnnnnnnnnnnnnnnnnnnnnnnnnnnnnnnnnnnnnnnnnnnnnnnnnnnnctgatgggtgctcggcgccgggcccgccccgaccgaaccccaggcggtccgaacacctggaccctaacccatctgagccctctggatccgaaccttagcccattcgaagtccccggattcgaaccctaacccatcctgagtccacggattagaaccccaacctattcgaacctcacttcgacccaacccgtccgaacccccacgaatccaaaccccagcccatccgaaatgccgagatctgaactctacccagatccgaactccagcagcccatttggacgcccttggatccgaaccgcactccatccgaaccctagccccatcctaaccctgcccccaatctaatcccagcttccacccaaagcggaactccagggcttccaactttgcaaagagcacccctagatcttgggaccctaactaaaccccttcctactccgagccgtgaggctttggggttgcagagatttaggaacagccccaatgcacctgcgcatccagagtcctagccccagggcaccttgggcagtttaggaaccccaccctggcctgccttgtcttcctaaatcccagtccaaggcttccggttctcaggcagcgcgaagccttagacatctcagtcgcaggcactgcccttagccacctaaactcacacgcagtcctaggacccccacgttacgagtctacactctgtgcgttttttccaagaccgtgggttgcaaactaaccccccttctgggactaacagttctctagcctctagggccccgatttggatttcagctgcaaaatatcccaggcgctcttcccataagctccatcatggtccctgcttcagtagctgcagtgaacttatcccctccccctcccattgggaccggcagccctcacctcttactggtagattctcggcagcgattcagaccctattgagtctggctctgtcctctcccacacccacacactagctgcccattaggactttgtgggatacacttatcaccacccggagcccctttccctggctccaccccttcccccaaagccaggtcccctctctggtttctttgcttcttgacatgctcttatcctaactggcactggctccaacccgctctcagggagcctcagcaatctcactgcctggctgggtatccccaggggttgcggaaatgcctgtgcatccagggtcagatgacagccagccttgaggcccctcagccagggtagagtctccaggagttggctttgttattcaacattctatccgctcccttggctgggcagctacagggcacacagccctggcctgggtggggctgaggccactacccccttggctccctgccctggctggcatgcgattgatgctttttcagcgctaagtggcacgtgacataggaccatttgctttttctctttgggtcctaggtcagtgaggattggcctcgccttaggtttccagtctgtatgtttggttttccacttgtcttgggtgtttggtctgttcggctgggtccttgacccacacacccgaacacccagcctcaggacccgagttctccttgagggaggctggtggcgttagctggatggcctgggtggtgcctcttctcctgatcactcgctgtaatgatacacactgtgtggctctaggccttgtgtacagtaggcggcccctgtgattcacctggccagccgcccttctctgaacttgaagcgagcttggtcttgctggtcctcaggcatatagcctgggagttggaaatggagaagaagggattcatagtgtgtggctgtgctgtcctcacagcccccttcctactggccccaatctttcctcttgctttcccctggggtccacctcttgcccctcctttatgatcaggtatcagttcctgaagagcagccacacagcttcagacagcctcctggggcctttcctaacccagagagggaaagactggtcaaactggttcctccaagtttctctcagtaggtctccttgtctctgtcccctgagccgtgtggtcttagagaggtgccctggcctctcctgacctgacccggtaaaagaggaagcaggcctgatgtatattgagcacctaatggaatatttcttctagtccctgttgtcagccctgaaggcaggcaagacttgaactggcattttggttcaggagacaggtaactagtcccccaataatagggttgtaaaagccgtgtagcaaaagcaacagggaaaacatgaggcaggggcttggcattgtagagagcctgtatcgggctttactgaaaggacagcatttgaacacggagctaaagggagaaaggcaggagggaagggaccttgagaatgtgtgtgagggccggagaacaagtggaaaggccccgaggtgggagtgtggctggcacagtcctccgctgagcacgaggaacctgtgggctggagcggagagaattccctgcgtcccaggaccgagttcttgagattcctggggctgataatggtttgtcatttgacagctgatagcagtatgttaacaaagatgccatttactaagtgagcactggcttacacaggcgtttccccaaatgctcccatgtcttaaacaccgggcctatttagggctatgccaccgctgctgccacagaaaggctggcgagggtaggctgtgcatctttgacatctggtgatcagggaatctctggcactctgggaccaccctgtccatgtctgtggaggcttagcacaggatggtagccctttctgctcccatgggggctatccacagcaccaggaccaagatgatgagggtatatttcttgtttgcctgctttcgccctggctgtagaaattagccaggtctaggacagcagttcagcctgtttgtggccgacacagggcctggtgtgtgtgttctgtgcagtgtaagagtcactgaaggttttcctcagtgcccccctctgtctgcctttctcagcaataagccagaagccaggcttgagaggagcctcgtgatggcaaggtggcactcggaggggccagctacaacctgccacttcatgggtgtcccagttgtaaggtacagaaccagaagggtttggatccaactgtcccatcagcttggacggctgtgagtgctctctgccctggaggtgtttaggactacagtggcctgacctgtagacctgaagttggaccctgcgtcactccaaaatgagcctggttgaagccttggcacacagagccttggagccactgtggcatctgtccctggccaggcctgctcccactgcattggcctgagctctgtctgtctctaccttagtctgactttctccctaagtctcatctttttatctccctggtttctgtttcctccttctgttttcatccccctccgtctcgtcctattctctctgtccccctcatgtgttctctggtgcacagggtctgagggccagaggccagcacaggtgtagggtatttgcatcaggaagaggcttgcccaatgaggtaggtgagtctccctcccttgccaggctccatgcccatctcacattggcatctaggccaacaagtgggcacccaaacctgctacaccttggcccagatcagcagcacctcttgctccaggtcaggaacaggctttcagttggaacaggacaccagagtcctgagtaagcggcctcctctacctccttgttttttgtttttgtttttcgaaacagggattctctggctgtcctggaactcactctgtagaccaggctggcctcgaactcagaaatctgcctgcctctgcctcccaagtgctgggattaaaggtgtgcgtcaccatgtccggctttagcctggaggtttataaagtagctctgtttaggtcccgtgactatgtgggcttgccagcttggtggcctgggtcctgtgttttcggggctaacaagaactagggatgtgtgtggttttaagtttaggtcacattttttaagaaatcagaacaaacccaaccatgtgcagcccagcctcgtccccacatggcgggcatcagctgatgtcaccattgtcattgtcattgctttagtctaagccttggctgtgcctctgcctacccgtctgtccatccatccatccgtctgtccatccatctgtccctcaatccctacggttaaccaagcaggttggcagggagagttccctgtcccctgtctcctcctgtgtccccttcccccacccctggggcttcctgcttctgagtcctgggccctacccacaagcaggaaccggaagaggtaggcaggctgtggctcaaaacgggactcagaaacaacccagctgagacggggaagatcagaagcctcaggcccaggtctgctcccgtgacctctgggggccttgcctctccttggccttggtgtcctcttctgtaggggcgaatgacccctgagtccccctctcccatggtcagccttttcttgggtcagctgctttagctggtctggctccagcggtcaggagcagcagctgctgtagggacaagggtggaatctaagctctgcttcctacgtggtgctgaacctaggacacagttccggttttgtgactggatgtgttcatcccacaagcactgactcaataccagctgagtgccagggcctggtgaaggaacttgacctagcccgagttcatattcaggtggggctgtagccctggggagcgggggagcgtgtgtcagaatcacagagcaggagaaatggtagaacgttcgttcttgggggcaaggcggtgggcagcaggcctggcttgggccttcattaaccccatacatgagccttcaccaggacaacagtgtggtagagaaaagggggcaagcatgggcagccggaacaggacagggggagggttgagaggaggccgcaacatccttcagctcggcatgctgagctgccttgggctgcctcccttttcttcgattttcctcgtagcctctgcttctgggtaggttcttggtgcctggtaacagtaactgctggtgtatgttaagcaccagtgataataacattgtcaaatgcctgggaaacaggcagaggcttgctactcatgtgtggtttattccttataaaaaaatatgtatatgttaaaaatgagttgacagagccaggcagtggtagcacacgcctttaatcccagcacttgggaggcagaggcaggtggatttatgagttcaaggccagcctggtctacaaagtgagttccaggacagccagggctacagaggaaaaaaaaaaagaaaaaaaaaaaaagaaaagaaaagaaaagaaaaaacaaaaccaaacaaaaaatataacttgcgggaagaaaacgccttgatgtgctgtatcaaggggagggcagcctcggtggtctcgaggcttggcttctgttcagttttcttccattgagtgtatttgtgccacagcatgatgttggctgaggacagcttgtgggagttgggtctcccctttcattgtgtaggtcccagggattgaactgagggcatcgggttcggcagtacatgcctttacccaccaaaccatcttgccagctcctttatgtctttgtgtggtggggccttaagcagcctcgtgcacagctcccgaccctttcgtccctcgatgttttactcgcttttttaaaatgtttatacatacttgctttttatttggtgagtgagtgtgtgtgtgtgtgtgtgtgtgtgtgtgtgtgtgtgagacagaggtcagaggctaactttcaggagtccgttctctcctggcgtgtggcacccaggggctgatctcaggtgatctgtgcttagtggcaagctctgtttccggccgagaaagctctccagcctttcttctttattgatgtcatcaccacatttgctctctgtacctccatagaacgtgggcaacaatagaggccatggggcaattctgcctcatcctcgggccgtggacactgggatgatgtccagagttttgacacctccgccagagccacaaggactgatctgattgtccaagcttccttgtctataaactgattgcataaaatggaattctcatagccgagtcctcagatcctgtgtctccttggtcacctgcagccttctggagaccacactcctgcctggctgcaggcgtccagatgccaaccctggaagacctaatgttctcaatgccctatttctctttgaccctgaggctgatggcctgtgtcctgctacatggaggctgggcaggctctggatatccctgggttaaaggatcaaaggcctcttgcttcagatgaccacctacctgggaacagatggtaccaggaaaccagttcaagtacaagggtgtcattaagttcccacagaagtcctcagaaagcctgagagaccagcattgggacctgtctgtcacttgcaggcccagcctcacaggcacacaacatttgctcagtgtcctgcttctgcaaaagcccttcttctgggccagcagtgctgcctgtgaaatgggtggtggtgggtgcttggcacagtccgccgccgctgccattgaggctcccacagcccgtgcctcacgcagccctcctcccctccccacaggcaagcgcttccaggagtggtgttccgtgatcctctgtttcagtctcatcgcccacaacttggtccacctcctgctgctggcccgctgggagcacacacccctcgtgatcctgggtgtcggtgagtacagggcccctctcgaggtcgtgtgcctttgtgcagtcgagcacatgagtgctcggggtggtctcgcgtcagcacctgctcatcttggagcattcagttgagtggcatggtgacatcacccccagttcctgttggttccattcttctttttggcgtactgaaaatcagctacctcccccagctgttctccagcctccccccacccactgccctgtccagtgctgacctggcagccattccatctgacagcccccaacttcaacattccctccttgttgctgttcggccacactgaccacactctcggcgcatgcacaccccttcctttggggacctctgtacgaaccgttcactgtacctgtagcccttctcaggactccatgcttttgatccccaagatctactgacagccacctgcttaagtaggtcctccgtgatgggccctcagagacagccctgtggagtttggtgggtacaagcctttaatctcagtacttgggaggcagaagaagatctgtgatctctgggccagccagggccacatggtgaccaagccctgccacacacactgtcgctggagcccactgagtctccaacaactcagaagtcagatttttttcccctgttccatccactgctgtatctctagccttgggcatgagccctgatacatggcaggtgctaggaattcagtgagttggatggtatatatggagtggggggggtcctgtgtgctaggaagtcctggtgttcccctgggccaggctgagactcatcttgatgaggaactaggggctgagagaagggacctgcaggacactttaacctgaagcacatgtggtcggaatgtctggctgcaacccgagctccagatggctcagtttccctcctttccagccaattgtcctctggctcaggtgccccagggctggccaaggggttgtggtacccttggtcctacctgacccttcctgtggctttgcttctcaatcccgttaaaagcatcctgtctgcctaagccaatagtgtacagccctgctaatcaagctgtctcacaatccaggggagagtttagcccgctttgtgatggagagcccaggcctcatctgcaggagtcccataacccccaaccccacccccgacccctcgtaggagcacctagcccagaattgggaggctcctgcagccttggctgggctggctgcagcacatgtcctgaacactgaggcagtgtggtttcctggagctgtcggaaaaccgggaggatccagccgcactgagagggctggagattgggatgaagagggaaggtgacctggcctgcaagaccactggccaaggctaccttagcccctgcccatgctgacagtggatattctataaggatctgctgggtcatgccctgagttggctatttccctggcaacaatattgtccagcattgttctcttcccaccggccctgggctctctaggcacatcctccctggccaagggtggggagacaccctgtagtaggtccagctgggtgccatactggctggtcacctccttcccacgctgcctgagacctgtgtttctgcagctcccagccccatcctagaagccaaggtggcctgctctcccaggcacccagcttctgggctgataagggcaggtaatcccctgatagcagtgtttacacaaccctcaattgatttaaatagccgccctgatttgtctgttaacacgcaggtagccgccaagggcactgtgccagcttgtttctatctcttcaacagttcccgatgcccaggtagccccggaaaccagagcttaaactgaaaggattctagtctgtaaaagccgggcttgtgtgacacaatgcctgagagctgatcaagataaaactgtggttgttaacagcctggaggggaggagatgccagaggaggcttatctgaggcaggaggacaggtgcaaaggcactgaggctgccgtgagccgtgcatcaaagaggcctggtgacctttcactgaagtggatgggcgagagggacaggaccttgggggtcatggtctggacagtgggattatcttgagtgttgtagggagtcactggtgaatttctcatgggagatgctgggtgctggttttctggtgctaggactgagggagcaggtggtgatgggtttttggaactcagaggagctcggcagttgagctgcatgaacagtcaggctgctgtgggggtgagcggtgggtgaggtgaggggttgagtccgtattcggcccaagagctggtggcagaggagaaacagaagtagccaggggaagacctcagctggacagcaggaatgagcacaaggtacagcccagggagtggagaaagctgagagggccgctgcctcagagagggcaccacccgagtcggcagcgcagcaggcagcctgatggtgcagcaaagggacctggccctgaaggtcactgatggccgtgacaaagacagcgtgtggtgacaaactgatcattctcttggggaggggatgctgtgggtccttgaaggggcagcttggagactgaggagggcagggatcagcaccgagtcccagaggccacactgcctgaggcgtctggattaaccgagcctgaccgatgtgcttgctcagggtctgtctacctagtctgccggcctctcagctccacgcagccttcacaatgctgctgtcactggatagagcagcatccttgtgcccttcccagtgcctgtggggaaggatggtgaccatgccaaagctgctcccagggtgacccagccaccagccaccaccagggctggaacaaagagacgtctgtatctgtaccctgcccccattaaaggagcctcatgggcaactgagtgccctagaaaacagctaccaggctgcaggaatcgagagccttttcctcaggtggtgggagaagacactcttgttcgggttattcctgacaccagcgccaagcatgcctctgtgaataccaggtgccagccatcctacagatggcaagactgaggctcgcagagggatgccgggctcaggctacaggcagctgccactggggagcttgtaccagagcccagagcgctggctgcacccttgtgcttctttcgctagtttctgctagttaagggacaggcatcctgcatgactctcatttcccagacctggacatgaggctgagtgtggtcctctcgactccacctgcacaggtgaccttggacagtcctttgctgccagcctgagcaggtctgagatctctgagcagggcaggtgtgatggggctgtcactggacatgaagggagattgcaccgttcgtgtagatggttctctatgatgaccccgatctcctgatcttcaccttcagagtgctgggtttactcggcagctgtttctgcagggttggaatcaaacccagggaacccagggctttgtgtgtgagatataattctcttctggcagttgcttttaggccatttccggataaggaatggtggaaagaagcaggcattgaagctctgtgcttgtgccagttagcacccaggggggctgctctatgctatgctctgccatcgatcacttgcctttagtctcatagccagtgtccccttcctatcccagagtcccatctaggctagcacaatctggttacttgtcatggccctatttgaggatcattggtctgtggcagtttctcagccacagcccaggctgccttcaagttctctctgtagcccagactcccgatgctcagcctcctgagtgctgggggcagaactcaggcccatacacatactgggaaggcggtctccctctgacgcctcacttgcaatcttggctgacttgggaacactggttagaattattaggatgcctcagagtctagagtggtgatgctctcctggcctgattggtatcagcagaacagctcagtgtagctcgccactgtgaggtcactttgccctggaccaggagcaccttctgggttttttcccatgttaccacgcacccctcccggcctcttttgagacagcctcagcccaaacttaagtcagtagtgaggcccatacagcgcactttcctgacgcccttggcagtgctgggtactggaaagaggctcccaaaggccaccctggcttgacttggtaatgctgttctactgtgttctgatcacagaggattaactgcccaggacagttaaggggaaggagcttaaccacactaaccttggtccacaaggactaacagagtcgatgcactcaagtccagtgtgctctggtttaaaagaaaaagtgtcaaccaaaaaaagaaggaaggaaggaaggaaggaaaaaaaaaagggaaaagaaacctctatggtgtcaaacagaagtcaggcatagtggtaagtgtctttaatctcagaactcgggaggcagagttttgagtttgaagccagcttggtctacttagcaatttccaggctagccaaggttacatgatgaaaccctgccaataaagtaagtaagtgttgggactgggtgggtagctcagcggataaagcgctcactctacaagggtgagtattagagttcgcatcccgtatagaaaaaatccaagtgtgtatagcagcctacctataatcccagccgttaggtggagatgggatccccagggcaagctggcttgctagactagccaaagctgcaagctctgtgttcagccagagggcagcaagtagagagcctagaagaaccttagtgccaccgtctgttagggtatgtttgcacacctgtcacccttgtacttgacaggctgagaccggaggatcagaaaagttcaaggccaaccagggctgcatgagtctctgtctcaaaaaaacacaatgtctctgctgtcctcagaccaggggatgggggaatctgtgagcacatgggcttctccatgaacgagcaatgcacccagggctccgtaaaggtccagtgggggctgcgtgcattgtaccagatgatggcacagtagtcaccagcaaaaagggaaatggccaatgcatgtgacacatgagtgactccagatgtgctagcccagtgaagcaagccaaacccaaaatacttgcaaacaaggtattacaacaataccatcgcatcatccctcaccccctgtgctgactgacacgttgcctgtggtcaccctgtgatgttggcagggttgagtcataacaacagagactatgtggccacagagctggctgcctccgtgtctagctttgttatagaaggtttgctggccccttaagctccacatgaagaggaagccgcgtggtgaccttggctggtcagagaggtacagccttgagccacataagcctgcacaccagggtgtgcaggttaggtacagttctaatcaaactccagccatacctggggaaggaagagatcatctcatccacggcctgggccggacattcaggacaagaagcctggacttggagcccctgccgtgctctaccacaggaccagtattccccataactgtcaggatggcggtgtttaaatctgtcattggtcagtgatactgggacaggcctctggaaggatgctgagcccaaatttggcaagaggcagagcagtgtagttagctagagacaggttccccaacccttgcttgcttagaggcagtatgtctacaccattcatagtagacagtgggtcctgcagtaatgccccagacctgctggggtgcccggtagcagcaagtcctcttcggggcacgttgtcttcactgagcaacaggactgcccggtgctaggcagtggagcccttctatcatcttccaccgcttctctggccccactgcctatgcttggatgggtgaatagagagatgagcaggtaggtgggtggagggatgaatggatagtgcatagacacattaggtaggaggtggatggatgcatgggtaggtaaatttgtggataagtagccaggtggctggacaggtaccactggcttctaaaaacctacccttagcagctgcctttaaacagattggacactgggattccattcccaaggtagcctgcatccttcctcctgtcacctgggttacagtctcactctcttgggaggtgtccagaggttctcacccacaggcctcatggcacccccaaggccttggtcccccgtcaatgagagtccaaaagcaccattgcaactcagaacctgggccaggcaaccagtttacagtcagaaactgagggatggaggacactggcacaggcctgtacagctcctcattcccagctaccctaatgggtcagctctgagggcctactgtgtgccagttgctaccccacgcagcattgagcccattgatgtcgcaaaaccaaggtccagtcctaaaccagagcccacggtgccccaggtaactcaggtcttaggaagggcacggagccaggaccctaagcctcggaggaaagcaagttgttgaactgcatcctggagaggaagaatgttccgggcagagaggaacagtgagggcagaggctcaaaggacaagaaggtgcagggggtgaaggaagggcagggacactgctaggctctctgcctcagtttccccatgtgtacgtggctcctcctattcctgatttgaatctcaaggccttaggagccagctatgccactgccatgtgtttgacttgggctccatccctctgtcccattctgtgggtcacctctgtcgagtaagctaaatgctactaacaggtaagaaagtgacagagaggccacagacagagagcgtgtcctgctgagacttgataaacagtcaccactgcgatcttttacatcttcaccactcctgttccacaagagaaagtgggacacagagatgttaagtaacacacacgatctcacacagctcatggggaggggagggctaccccaagctagttctgagcaggttgaaagtaaacaaagagcccggctgtggtggcgcacacctttaatcccagccttgggaggcagaggcaggcggatttctgggttcgaggccagcctggtctacaaagtaagttccaggacagccagggctatacagagaaaccctgtcttgaaaaacaaaacaaaacaaaacaaaacaaaaaaactaaacaaagggaaagctcaaaactgagtccatgatacaagccaggtgggataggtgggatggagacaaaattgcaagtaaggaattgcttatgtttgctgtagcccaggctagcctctaactctggatcctcccacctcagcctcccaggtgctgggattctaggcagctcagctgaggcctaggaaggcagtgatgcccccacctcagggagtgagtctgctctgtgcagaccagaaccagggatgttgcgtgagactctgtgcactgggcaggggcccggatgctccgatctcataatgaataaacagtcaagattgtggagcggggaatggtccccaacaggaggggcgaggacgtctctgagtgcccctgccctggcttacattcttgttgcccacagttgcaggggctctcgtcgctgacttcctgtccggcctggtacattggggtgctgatacatggggttctgtggacctgcccattgtcgggaaggtgcgtatgccgggctgtgtgactgtcccggggtcagtcccctaagactggactgaggatccccgaggttggtaacagcacaggagggtgggtcggagagcctcctggagtcttccctcaagtcagggccaatcccgtgctcgcatgtaagctgtcggtgaggctttcgggcttaggcagaagattgaattcaaaccagttccatcaggcaaggattccgagtcagtcagtgctaagttaaagccagggcagccaccttttcagaatgggcattccatctctagtctctgccttccctgctgagttcaggcctccactcctgtctgcctagagaattctttcccctagtggctgccaaactcctagcacctcatcccattagtccagttggtatggcaccgcccatctgcagccaagccctgccagggagatggatgggctctggttagccggtcctaggtctgtgctcactcaggccaggctccacttagcagcatgaattgagagcctggagattgttcccagaatcaggagcttaagggccaggtagacagggtcccctttgattttgtggagattgtctccaagtccctcccagtatggttggggaaactgaggctcaaaaggattgaggaagatccacatcagtgtattgaagccattgtggactgcagcctaccagaccgccccaggcagggtctgtgtctgtggcaaggtagagggtggggagctacaggagagagtctggattcagctgaccaggaggctacctctgtaccctgcccacctaggccttcatccggccattccgggagcaccacattgaccccacagccatcacaaggcatgacttcatcgagaccaatggggacaactgcctggtcacgctgctgccactgctaaacatggcctacaagttccggacccagagcccaggtgagacctgcagttggggctcctcagagtcagagtccccggagaggctcccagggtgtgtgggcgtcttgtgacatttaaagaaagtattctccattcgtagggcgcatgtaaaagttgggcatgtagcctaagacggcattctctggtaacgtgacccccagggtcctccttcacagagctgctcatttgactcgctccttgtgagtcacaggcagcccaggcctcgttctgttgtattatttaaagaaaaggcacactatgagcatgtggatgggacctattagccaagagctggcccgctgtgtctgtaccctgggttcaatcccagcactgggaaaaaaggcaaaatatagactgtgagctgaggccagcaatgcccggttttgagtcccaaagctatctggcccactgttgggcatcaggggaggcaaagccagaacttctgctagttggcaacacttccctttgggagaaacagagggtctgtccatggccggggatggggtactgctgggcccaccccccttactgacagtctcccagcagccccttctccatatacccacttccttcctctccctatcccatgagcaggaagccagcaagtacaggcctcccggaggcccatggctttgctttcttccaaggtgaactctgtggagctgctataccctagaaacccacagagccccacagagcctgaatccctgtcccagatgctgcctgcctcccttgctctgtagatgtgttccagcaagagatactcccttgagcacatgagtgtcctgcttcagagaaccagacccagagtccctgctccgagcccatgcaacccacaagtgtcagcaagaatcagaagccagccctggctggctgcagagcccacactcttagccaatccctggctgcttctagatctgaagatctgatggtagaggctgaggtggtgctccacctcaggggtctgggtgctcctggcacaggagctggccggccagtggggcagctgccaaggtcccatgcccttgcccttgcccttgcccttgctttgcagagaccctggagcagctgtacccttgggaatgcttcgtcttctgtctgaccatctttggcaccttcaccaaccagatccacaagtggtcacacacatacttagggctgccatactgggtcaccgtcctgcaggactggcacgtgatcctaccacggaaacaccatcgcatccaccacgtggcgccccacgaaacatacttctgtatcaccacaggtgggtggtgctaccccccagggtcaggagggtggatggccataaggccttggcctaccaagtattctcagagagcacatttactgaatgaacctctcttatgtgcaagcgttcttctaggtcagggccctgaacaccaaagccccttccttacttcaagctcttgtgactccagacattcactcagcccacagacaatttactcggtgcttattcactgccctgggcttaggctctaccagtaaataaaacagaattccttgtgattgcccgatggaagggcacacacctttagtcccagcacagaggcaggcagatctctgtgagttcgaggccagcctggtctacagagtgagttccaggacagccaagtctacacagagaaaccctgtctcgaaaaaccaaaaaaaagggggggggggaatcctagtgatttggggagacctgagggagggccccaagccgcacttgaaagaggtctctctctttctgtgtgctccaccttcttctgcctgtctcctgagggctctccaccccagggctggctctcctcactacccccataactgtgtctgctgcaggctggctcaactaccccctagaggttataggcttctggcggcgcctggaggatctcatccaaggcctgacgggtgagaagccgagagcggacgacatgaaatgggcacagaagatcaagtagcatgtctggactcttggtcgccaaccttcccaaacctgaactgaagccatctgccaaatcccggcgtctctgagctaccctccagtgaagagaagtcccctgggctgggcccgggcacccctagcccacccccagtgacacagaatacttgagccacccacttttcatttcctcttctccttttctttccttgggccttcctggccactgagctgctccgaggccaagcctgactgcagacgggagcccagtcctgctggccagccccaccctatgcatctgctctgcacgcctgctccctgggccgatgtagggtcacagacaacaagtggtctgtctcggtgacccagagagcccccagaacacgtaaatgtccctggatcatgattctccctcagccctgtagacagaccccagaggcctaggtgggtgggtcaccccagctgccacccaagggaggcagagctgggcaaaggtcagggggcaagctgtcaaggagaggccatgatgccccgcccactctcggatactctcctttcccctagttctcctgtccatgtgtccagccacttctgaggtctccctgcagagacatcttcatgggcacagctcttgtgaagggcttggtcatctggggaagggacactgtgtcccttctggccagtgtgtcagaggaagaagaataaggcttttttattcggattttttttaaaggtgcttgcttgtcaatgtaaataatagaaagccttaatatctttctgtaacatggagtaatattttaatgtcatgttttggatgtatataatatatttataacagaggaagcatctccttcactctggttgccgtgtggtgtttccggatggctgcatagagggagctagccctggcctgagggatgggggctttatcccccgacacagtgaagtggtctagatttatttattttatgttttgcccacatgtgtgtgtgtgtgtaccatgtgtgtgcctcgtccccacagaggtcacgagagcactggaaccctggatctgaagttacggatgctgaaacactgtgggtactggggaaaaaccgggtcctcttaagtgctcttaaccagggtgccatctctctccagtactgaatttttgtttaaggcggtggtatatcatatactccaagtgacctcacacttcttatagaaaccaaggctgaccttgaattcctggtccccgtaccctcccaagtgccaggatcacaggtgtgtgccaccattcacatgacctttcacctagattgtgctagagcagtgctggctggcctgtcccagaactcctttaagaggtcattggcatctgatgtatgtcatggctctggcctagacccagaccaccagactgactgactgtggtgggagctgatcaaaaaaaaaaaaaaaaaaaaacaataaataaagagaacgtactacaacttctttattatatttttttgtttgttttaatactttgttctttcaagaggcaagggtctccgtatatagttctggttatcctggcacttgctctgtagaccaggctggtcttgaactcccgagattcacctttgatcccagtgttggaatcaaagcttgcgccaccatgcccagctcacagtgcagtttcacaaggtacaaaggccctggggcaggtgcagacttgcagttagatgctggggtgatcagcaagaccagccagcacagaagtgaggagagcagctgtcgcgaagccccgggccacctgatggacaagcatttccaaggcaccaggatttagtagtgaacacacattctggtgtgtatctggtcaggctgtctgtggctccaggcctgttgattcaagcctgtaatcccagcatttggaaggtgaagataggaagattatagagggtcaagttcatctttggctacatagcaagtttgaagccaacctggactatataagaacctgtctttattaagagataaacaaactgggcggtggtgacgcacgcctttaatcccagcacttgggagctataggcaggcaggtttctgagttcaaggccagcctcgtctacagagaaaccctgtcttggggaaaaaaaaagaaagagagagggagggaggggagagagagaaatcaacaacagctcttaggctgatttctgcagtattaataatggagggagaagggggcttgaggacacaaaatgacaataatctgaaaaacattcattgtccttgatgttagtcaacattggccactacaaccacgaccactgaaggaggaagtgttagcatttggcagtcccttagggataggagatgaggccaggcgtggtggcgagcctacgactctaactattctggagaccaaggtagagagttttgagagttctagacagaaggagttcaagggcagcctggttggtactttaataagcccctcaacagcaaaaagagacctggaaataagggcggttgtggagtgcgtgtctaggaggtgggcggagggagccagggttgtgctgccatctggtgacagggtcaggtcagtgatgcaaagggcaaacctggctttggagtggacttcggtcaggcaccttctgtgccaaactcttgaggggagctaggtatgtgcctcttcccacctgtaactcccaccccctcagatgaaacccaaacctcccaggcccccctcacaacggtgcaaaccatgagctgtaggtaggaagaccagcagggtcccatccagtctaccgcgttctccaaatgacagcaggcaaggagcaggttacagttcacggtgcagtgttcagtgtccttgtaaaatgcactgtcatctgtttcagccattcatttcctcccagcttcaaggggctgggtgtgtatagcaaagaccagacagcctgcaacgcctaaggcctgaacaggcttggaggcctgatgcagccagagatttcagtttcccaagcccccggtcgggttctctctcaaggcacacatgatatgcttgctctgtgtgtgtgtgtgttgttgttgttgttgttgttgtttttaaatagggtcccactctgtagccctggctgacctcaaacttagagacatctacttgactctgcaggatgctgggattaaaggtatataccgccatacctgtccttcagcagcaaacgttgctcctctgcaagggtggcccctcaaaggccatcgctttgataaactgtgatgtctgctgtatgaacacaggagtctgcctgcctgtcccctcctttccctccctctctaagaagacatcaccaatgaacagcggggtggatctctgccttcccttttctcacagaacatcttttagagaatattatatttgacggtcagaagatttcttagttctttttagcgatgtgtatgtagtattccaattttaaaatggacccatcttgggggctggggagatggttaaaaacactggctgctcttttagaagccctggctttgattctcagcacacacagggcagctcacaatcctccgtaactccagtcccagggaccctctcctaccttctgtcagcactgatcctgcaccctcttctggcctgcatgggtactgcatgcacatggtgtgtagacatacatgtacactaacactcacacctataaagtaaaatatgggtggaggcagtggggaatgaaccagtcttgtttttgaaagactttgtagtcctgactggccttgaatttgcagcagtcctcatttatctgcttctcaagtacggggattatagaatgtgctgccaccctggcagtccacctgtacagttatatgtatatgtagggaaggttgtgtgtgtgtgtgtgtgtttgcgcacgtgcacagatgcacacacaagtgcatgtgtgtgtgccagaggtcaatgtccggtgtctggtgtcttcctttctgcctaccttattttttgagaccagatctcttacagaacatggccgactgttcaggacccaaggatgcttctttcagggtctccccaatgctggaattacaggcaggctggctttgtgtatgggagctggggatcaccctcactccggtcctggtgtctacacagcaagcactctctgaacccagccactttcccataactaccttcgttcttcagacccacctactggtcatgggatgagatcattttcaggcccagggactagaaactatagaggaccttggctttgctcctgaatgccatgggcatcagggtcagtttctaggaaaggtcaagggtgttgtgctttccattttaatcgattcctcccaggctgtctcctgtctctgaagccctctccgcacaccctgccagttcagggtgctattgatcaggagtcagttctctgcccatctgatagctgcttgcttccccgactgtatttctctgattctgagatgtcctgggccctaagagatgccctgatttccctgatgctccagtgtaagacatgcattttaaacctcagaagtagatgcctctcatcagtccttgtgagtttataaagtgttcacgttccgcagtgcttgatccttttgaaggacaggggaggtgttgagaaagtcttattttgtagctacacagctcaaggtggactggaactcagtgtgtataggcaaggttggcctcagattcactgtgatcctcctgcctcagcctccttctgagtgttggggtcacagatgtgaaacagtacacccatgtgtaatggtcaatttcatcatatcctggaagcacacgggacagtagaaaagtgcgctctggtgtgtctgtgaggcctgtttccagaggtgactagctctgagggtgctaccctgagtacagcaccaccatggctgcagcctgggtggaataaaggtggggagggagaaagcctgcagcaagaccaggaagctggtcgagtttagggtttgccgtgcattctgccatgaattcaagaccagcctgataccacatagcaagatgaaaggaagagacacagaagaatgtgtgtgggaaggccagcctgggctacatagcaaggagagagcctggagagggggagatagaggaagagaggagagagagaagggggcttgacgttccagctctgctgcttccaggcttgtgactcaggtctcagtcacgtcacaacgacttgagggagttggtcgactcctttccaccatgggctcaggtgtagaattcaggtgtagacatcagcttgtcgggcttacgtggcaagcgctttttcctgttgagccatcttgtcagccccggtgtagaccaggctggcctcactcatgtaatccttctgcctctgtatcttcagcataccctactggaaaacacaaccacagccaaccagcctcttttcactcatctttctcagtgggctgcaaggtgagtctccccaccacgctgcacctcagacccctgcctacccgcgggtgcccttcctgccggcctgcctgcctatctgcctttccttctttcctttttaaaattctgttttctgtgtatgactgctctgcctgcatgtgtgtctgtgtaccgagtgctatctggtgcctacggagcccttaagagggcatccattccctggaactggagttatagataattgtgagtcaccacgtgggtgctgggaagtggacttgggtcatctgaaagagcagccagtgctctcacccgctggccctttcttacttctttctctctctctcattctttctttctcctcctgcccctctgtaatagtgaaaattgaacccttggcctaatacggacgaggcaaaggttctacaactgcagctctggactccttggtggcaattccttgacctccaaccacaaaactaacacatacaaaatccagacactgtccaaggtgctgtgcaccaggaaaccacagacagggccttgggatgaggcttcgcagcagacagcccttagggggaagtctgaagccattaaggaattattagccgggcgtggtggtgcactcctttaatcccagcactcgggaggcagaggcaggcggatttctgagttcgaggacagccagggctatacagagaaaccctgtctcaaaaaaccaaaaaaaaaaaaaaaaaaagcccacgctctcctttctggagtttgtatttagaagctggaacacaaggttgtggccttggacctcagctttgccatcacttttaaactgactttaaatgacacatgcctttcctgtccagagagactctagactcccatgctttcctacctcggtaggaccgaacttattttatttttcgtctttcagacagggtcttcttatgggaaatattaaaacgaaccagctcgttcctgtgcttgtgccggcaactctctgccccgcgccctggccggccacgcactggtaggcaatggccgacttgtttttatctcgtggagactctgactcagaactccacaatctctctacccagctcagtaggttcccactggcgggttgttaccacaccagccccatgcttcaataccccccacagcctttgtggtgcacatgaagtgaacctacgctttgacgccatacttttctctctgaaacccagacgagtttctgggagaagaaaaataccatacaaacttggttcagaaacaatggtaactcaatcgctgggtaaaacaactagaatcctaatcttgtaagccgtattaaatcttgttctcaagctatccccatccaatagggcgtctctctctgtctctgtctctgtctctgtctctctgtctctgtctctctctctctgtctgtctctctctctctctctctctctctctctctctctctctctcgtctccttctctcttcctctctccaacttggaagtccctcccagtgatttttcatttattcccctttattcattaggggatcacaaaaagtcaactgagtagtgactcactccttgtctgcagcttctcccaagagagagcagaatggggctggtgagatggctcagtgggtaagagcacccgactgctcttccaaaggtccagagttcaaatcccagcaaccacatggtggctcacaaccatctgtaacaagatctgactccctcttctggagtgtctgaagacagctacagtgtacttacattaaataaataaataaataaataaataaataaataaataaataagagagagcagaatgaattagcatcaaaatacaaacagcaccaggcccatccacaacagggtctcactaggtagccttggctccttatcaggctaaatatgtatagcagactggagcttgctctgtagaccaggctggccttgaactcatacagatctgcctgccttggcctcctgagcattaatattaaaggcatgtgacatataccctacctgtttctctttttattacaaaaatatgcattgccagacttgggggcacacctttaatcccagcacttgggaggcagaagcaggtgaatttctgtgaatttgaggccagcctggtctacaaagcaagttctaggacagccaaagctacacagaaaaaccatgtctggaaaaacaaaaactgaatactgtggtgcacacctttaattccagcactcagaaggaaggcagaggcaggaggatatctgtgagtttgaggtcagtctaatctacaaagtgacttccaggacagccaagactgttacacagagaaacctgttagtgagtttctttaagaacccagttatgtgaatatgtttttattttaatcccaggtgtgggataagaggctacttcacaatgggtgattatgatttgcctcgtgctccagcaggggcatggttttgccaggttcatatactttctgagagtgtgatgtttggaattctgggaacttttgagagtctgctacaaggggccaggtgtattcagaggaggttgcttctggttcctgctgctgctgtttgtcaggtagtcattagcgatagcctgatgactaagattggtcttatcccaaggaactcagacacccctaatcagcaggaagtagtttaaagaggtctacacccttctcccctctaaccttctttctctcttacctagtgttaagttggggagggtggggaggctagtgagatgactcagcgggtaagagcactgaatgctcttccaaaggtcctgatttcatatcccagcatcctcatggtggctcacaactacctgtaatgagatctgacgccctcttctggcacctctgaagacaactacagtgtacctgtttataataataagtaaatcttttaaaaaaaagagaaaccctgagcaaaaccaaaacgaatttatattttttatttatgtccgtgtgagtgttgagtgtccaccatgtgtgtgctttgtgcacagaggccagatgaagaaatagaatttcctagagctcgagtcacaggtttgagtgtcctgacatgtatgagtggatgctcagaacagatatcaagtcctctgggagagcaagaagcactcttaaacactgagccatctctccagccccttgttttaaacacaatcttttatttattgttattattgtaggagacatgctaagccatcttggtggccctcctctatttttattttttagatttttttaagatgagtttttgcagtcgggtgtggtggcgcacgcctttaatcccagcacttgggcttgggaggcagaggcaggtggatttctgagttcgaggccagccccctggtctacaaagtgagttccaggacagccaggactacacagagaaaccctgtcttgaaaaaccaaaaaaaaaaaaaaaaaaaaaaaaaaaaaaaaagatgagtttttgcctgtgtatatatatgtgagtgcctcctgatgctcatggaggccagaaggcagcactgggtaccctggaactggagctaagaattgttaactgccatgaagatactggaaattgaatccaggtcctctgcccgacacgtgctctcaacagctgagccatctcctcttcttcttcttctttttttttttttttttggtttggtttggttgactttctttcatttaccacataaaaaccaataacctttttaatctaatttcactcctcgatgtgtgatcctggaaagaactaactgctcccaatttcagtttccttatctgacaaatgtaggctgtaaggtgctactttgctggagcctcgaagcttctttgctagggtcactgaggattaaataactaagacttagcatttagtgccgaacactcttctaaattcggtagttaaccactttaatctttccaccaatccgataaactggattctctcatgcctatcagctgatctcaagcgcaatgcgcgtgggtgagcagcaagaggaatccctctctggggactcgatgtgacgcatggaaaggggcggagtctccttgagggaaatgtgaactccaagtactacaactcccagcaggccaccgctggactacaataaccagcatgccccggggcgctctttccctcccccccccttcctcttacgttgttctcgtgggaatttgcaagatcacttttgcttgcaagatgcatctgctggcagaaattttatgagcatagaggataaagagttgtgttttggccgtcacttcacctattggcccagatcctgttttctcaccttcctttcctgtcttttctgagacagaatccttccttcgccctggcctggaatttcctatcaaagatttttttttttttactgctatgtttatgaaggtttgctgtacgcatggatacatgcgtgcctgatgtctaagaggtcagaacagcagttgtatcggtgctgggaattgaacctgggtgcttagcaagagcaataaatgcttgaaactgtcgagacatctctcgagcccccagcctccttttcctcatctttaaaatggaaccattcttagcagtgcctggcatttatacgtggcttagcaaatgccagatttcctgccgcacccgcatcctctcatcgtccagggtatttatcaaagcatagagtgagactagccccttttcagaatgttgaaccagatactaggtgcttcaaacctctgggggtgtactttgttgttagagtcagcgtcttgaccatgtattctaggcaggccccaactctccagcctccagcctcagcctccctactgctgcaattacaggggtgctatctttacaaacctctcagcagaagccacccaaaaagattcacaatgaagacccaaatctagagactctcacttctgaagtgagtcagcctccagagacaaatgcttgctctaggtcccagtgctttagagtggctcgaaacccggagcgaatgttgtctgtgcgtccaaaggacgctttgtgtcatgtgacatgtgaagcaaaggcaagctatatggcaagcagctggaactcctggcatctcaagagcctccagagacgattacaataggagagcccaaaggctctgaggacagggagaccatgtgaggttccagcagcctcgagaagaggcagagacacgctagagaggccctgcatgtgtcataaggtcaaggctagagtgaggctgtcgtagtattgtggactcaaacctgcagacacttcggcaagcaggtacaatattgggaaacagggaaagccttcataaatacaaggccacagacacgtcacggcccccagcatagccccagccccgggagcagagcctcagtgtattgtgcactcacccttcccagtttacctagagacctggttccctctgttctgtgggacagactcctaggctggtgtgcatcttctgcaggacggtagttctgagcttaccacgtacttcctcaagaggaaatgcagtggagctacctagaatacaccaaacagatgacaaatggaatgttccaggaatgtctccagcttccttgcccctctgctgtccctcttagcagtataatctgcagcctatctggctacttcatcctcgatttccaagtccccttaagggtttcacatcaaaggtggctttgtgatgggtttactctatatgcagacaagtgtcttcagacctttgcaggaggccttttctgattcttcctggtgccctttataggtttgtcccctatcttatcataggtaaaatgtatatttatctatttatattggcttacttgttctctgtccaactagaatgtagcaattgagaagagaatctcatttcgtggagacattgccatgtccggcaccaagcacagttctcccacataattccatctctaagaagaactctaaaacacaagcctgcaaccccagcatgaggcagaagccgaagaatcagacagccaaggtcatcctctgtatagtgggctcttggacagctgagttgagagcatgtctcgaacaaaacccctaaacaaacaaacaaacaaacaaacaagcagaatgcatgtctcaaggttggtggttctcaagcccctagctgcaccttgtccctacatgcttcaggccccagaacagcaacagtgccggaaacaagattgtactggcccacaatttgacgcattcaggcctttcggtgttatttttctccatataccccataacaaagatcatctggcttggggtcaaattctgactcagctacttagcagttgagttgaacttcatctctcgcggtttcattttcgctacgtggtgaggacacagggggacggaaacagcctgggaacaggcgcggggctccacagcccttcccccccattctattctcccggaagcgcacggtcaccccggggccctcgagccgagcacctgcacgcctcccccgcgctcgggctgggcggggcttgcaggttgccccgccctcatgctcgctcactgaagactcgggcaaagcccttcccgcccggctcctgcgaccccgagcgggcgtcagcggcaccgtttgcggctgcgcctacacctgcgcctgcgcactagcgcccggagaaaaactcaagggggggtgaagaaggggccggccttcgagcgacagcgacgcaagatggcagccaccacaggctcgggtgagcgggggcgccgggcgtgctggcggacggggcgcgggctccctgggcttggtcccggtctagcggaggccatggtggccgggacagggctccgcgctgtccctgcggctgcgtttggctgctcggccgggcctgggaccatcaggcggcggccggaagcccgggcgggggcagccgggccgtgggcggtgcggccaagccggagctcgggcgcctccggggggcggggggtgggggagaggccggcagaggggccgagtgtgctcgggaatgcccgggcgaggtcccgctgggagctggcccgggcgactgggagccgggaatgcccggcgggggtacgcgggcgcaaccctagggaacacgcacggagcctcgcgggccgcaggcgaggccgccggggccccgcgtcaatttagggtcggggctgctctcatcgtggtggtcgcttcccagggaaatccgggcacctgcacgggctgagcccgggcgttctgccgtgggagcaggcctgggttgcagagaccagggataggtttcagaaggcgcgctgggagccgagcgccgcgttggatgggcacgagcaggtgcctaggaagccctggtgtgtgtgtcggggggtggggtggggtctgttggggcgtgtcgccattgggaaggctcctgcagtggggagaatgggatggggtgcagtcccgcagatgctgcttttagagaagaaaaacctcttcctgcggggagcggatggaggaagtgcctgtcactcctaatccttctgcgaattgggggaaaatatgtgggttcaactcagaaactctccattatctggatgggtaggagaggagcagtgaaatgagagcccttggatcaaatggaagggatagcaagagggtaaaggggatgctcttaggggagaagctcttgtcggtctctgatgggctaagaagagaaggccagatggggagacccgaagggtctgctgccttagaaccggcaacctgtacttgattatgagccatggactctggcaggctagagaaggtggagtgggtttggtgaaggagatcccccggggtctgggaaggcatgggagtctgcttttccaatgaaggattcaggagagagtgggtgctcccttctggtgtggggctatatcctcgggagtctgttggtggaggtgagcaaggggtaaggacaggccaccagcctaggcactggtgttttggggctgtgaggccaccagaggagatgttgtggggtgggaagcagagaggtgctgcctgcagtgacccaccacacagtgcctggtgtgtcctggagaagactgcggagccaagtcagtccatttcctgacaaacacatggcggtgggcacttgggaagacccagtctgccacaggctgtactggggtgggatgcagggtatctcgcagagaggtgccaggcagccagtactggggtggccctaccagtcagcactgcttgtccttgctttaggacatctcaggatccggtttgacagccacttctaacttctgaggccctgcccgtgcctcaggagtgcagatagaaacagcagctcagcagcagctgctgtgtacagaatccagaagagtttgggctgggtgaggctcagtgctagagtgatctgaccagcaagtcggaggccctggattccatccctagctccatgaaaagaaggaagcgcacatagcacagcttagatagcataggaaggctttagggaacccagaaacaggcgttcctcagcgcctgtctagtccacagatggttcctggggcctcttgtgtcctgttactagtagcagacaaggtagacagagcactgtctttaggtttcattcaaaccagacagaaggccattcaggatggaaataaagtgactccaaaaagcaggaagtgctctgaagaaaattgtgtgctgtgatgagcgagtctgatgaggagggggcaggcttctctcagggccaaccctggaactgagaccagtggtgggaagagcaaggcctgtggccgtgggaaagtaccatcggtgcggtggggacacttgtgttgaaagatgagattaaaggccatggggcagtaaggtggcccagcagacaaaaggcccttggcgagccttgggacctgagcttgatctccacatggttggaggaaagaacggcttccacagttgcccgccgccctccacttgtgcccctcccgtaacaaaggaccttagtaatgagatggagagagaagactttgggctttactaagtgcaagggggagccatggaacagatgcctgctatgagcagcattgagtgtttggttgatgaatgaatgaatgccttgaagagaatgatgaatggtgagctctgacttgagccccaaggcatcaggagactgcagtggtgagagtggaagcaggaccttcgttaaacttggtgcttagtctcctctccctgctacaaccttcaggtgtgctcaggccttgggccgcctgtagactgagcctggtcattaatctgtgccctggttaccaggaaaccactgtgtggccttggagtcctgtgacgcccagctcaggtggtatggtcactgctgctggcatcttcccacattgttcgctgttgtaattttggcgcaggtctcagagaggagctgagatgagcccactacagccactcaagatgtctacaattgaagggacgtctctcctgtgtgtccaggactgcaggatgtcagacagtggcccttggctgccaggtcgttcctctcatccagcagcccacaacgctgtgctgcccagagctgacaattaaccagacaccaagtgccagagtgacaagccctggcagggtgccactgtaaatatacacgcaggggtgtggcctcatgcacacattcagcttctagaaatgtcaccatctgggtggttgagattgggtctttccttccactcaagggtgttccccagacagctggggatgggagatgagaactgaggccctgtaataggccccagttcccacaggtcttactgtgagctatcttgggtcccttacaaccaagaaccctttctccttcatggcctgctttctggatagctacttctgaatgtgctcagcctgagagcagaagccaggacccacagtggggccagcttggtgagcgagtgcaagtaggatttctttgtttttgctgttataagatgggatattatgcagcccaggctgctcttgaacagtgtggagttgaggatgcctttcgacttgcctctggtcctcctgcctccatctcataagcgctggcatcatagggatgtgctgcctgacacctactgttgtatcgaattcctgtctggcagtggtggcacacaccttttatcccagcacttgggagtcagaggcagatctctgaatgccagagatcaggtcagcctggtctgcatatagttccaggacagccaggactgcaaaggaaatcctgtcttgacaaaccagagagttgccaagtaaggaatgcaacaaggtggctcactggttaagagcacttgctcttctagaggatcagagctttgttcccagcatccacacctggctgctcacactcataatcatacacacagatgcatgctcacactcacatgtcatacacacatacatgctcacactcacagtcatacagatccatgctcacattcatgttatcacacagatacatgctcacattcacagtcatacacacaaatacatgctcgtgctcacatatcttacagacagacacacacacacacatatgaataaacacaaagatggatccttagaattgctaagtgagttttcacggggcttttgccccatcactcttaattaaaaggctgagaatggagtttatgtagcgtatttgccaagctggcccttggtttggttcccagcatcaaaagaataacaaaatcacctccaccttccctccctctgtccctccctctgtctcgagttgaaactaccaaggtttgatggccgcagaatgaatacaagctgggcatccttggtctaaccctgaaaggccatagcaatgcctagagtactgtgtggggtgagatgaccccccccccccccaagaggttctctctgtaaccctggctggcctggagctcactgcatagacctgcagtcctcagactcgggcctgcctccgcctctcgagtgagttctgtgcccttgtgagtagttgacatctgctgagctgggacctgtgtgtcacacacagggtaagtgggtccttgtcctcatctgtgtgcaagccgccttgtgagaggagctcaccctgtagtctagcctgggggcacaggtgtgtggccttgcacttgatgggctggtgtaggcttgcgcatgctctctcttcctggacctcttgggaaggggtcgggctgccgtgatgagttctctgcccagatgtgtgactcaggcatgcagaggagacagtgtctgacaggatgatgcagaggtgtggagctcacagtggtgcagccacagaagggggggacggggtgcagtagctccttcctgggctggatgtccagctcactctgtcactgagccctggcacactgagctgtaaagagtgacagctgaatgggggctggagcaatggctcagcactggcctccctgggttcccagcaccacaactgcctatcacaggagtgcaggagacccagcttccccttctgactccgtagggcgccaagcacacatggtaacttacatacaagcaggcagcacatttacgtacataaagtaaaccttaaaacaaagagtaacaggttccatgctaagttctgcctaagtcaggcccgtcacattgctgggctgccctcggagctgctcattgtgagttcccagaggaggacgtctcaggctggctggaaatgagcataagtcgtgtgtccgctgtccgtttcggtaatgctgcatccagggcacctttcaggtcctgtcaacttctgaagctgagccttagtgcaggctgctacgcaccctgaacagcagctgggctccaggcccctctgctgtgcctgcagtttgccagagctctgcttttaatccccagtcctccaaagaagattgtattttaattttattttttgtttatttattttggtgttttttttttttttttaagccagggttttttttatgtagacttgtctgtcctggagcttgctttgaagacatggctgttgtttattatttttgagtcaaagtcttactctttagttcaggctggcctggaacttgtggcaatcctcctgcctcagcctcctttttttttttttaagatttatttatttattatatgtaagtacactgtagctgtcttcagacaccccataagagggcatcagatctcatgtggttgctgggatttgaactcaggaccttcagaagagcagtcagtgctcttaaccgctgagccatctctccagccctcctctttttttttttgtaatttttaaaaaaagatttatcatgtatatacatatatgtgtgtatgtgtgtgtgtatatatatatatatgtatacacacacacacacacacacacacacacacacacactgtagctgtcttcaggacaccagaagagggccattactaatggttgtgagccaccatgtggttgctgggaattgaactcaggacctctggaagagcagtcagtgctcttaacctctgagccatctctccagcccctgcctcaggctcttaagtgctgcagttacataactgagtaagacccatttttagtcagggtcttactgtgcagttccagctgacctccagctcagactcatctgtctctgcctcccaggtgccaccacacggattttgttttgtttttgagacagggtctgtgtgccttgtgtggcctgcactcagatctgcatgtctcatctggctggcatgcttgcttggttgtgtctcatgagcatagactgacctctaacttgacttgtaaaggagaggatgacaaagaactcctggtcctcctgcctctacctgccaagttctaggattacaggcacacagctacatctgactcctgatggtgctgggctctgaatttctgacgccaagcttacacagtgagccagctccccctttctcctgtctgacattttgtttggagtcatgctgtgtagccttggctagtcctgatctcagcagcctcctgagggctgaggttgcaggggtggtcacaccccagagtcatctctgtgcttcgcgtcaccgtgctaaatgtctcccgggggcaccatgtgagactgtcagcctgcttggtgcctgcttttcttttggggggttggcatgtgttccggcatgcttatggaggtcatgggacagcttggtgcactgggtgttggttctttcccactgtattggtaccagaggtggagccctgaccctctgagccatcacactcatacctgcatttctattgttttctggattttttgtttgttttgttttgttttgttttactgcattttagtctgtgtgtgtgtgtgtgattgcatgtaccacgtcatagggctgggggtcagaacttgtatgcggtgactctcttgctgcggggtttctccaggtggagctcagggaaccaggcgtgacagccctgtgcgtctaattttgagcccatggagtttgaactcacgccctgaggttcatggcactgaggtgccttaggccacgaggatttccgtgctttgtgactgctgcggcaatagcttactttagcttccgtacagtttctaaagtttggggcagcagtagagcacatttgtgagttctactctgcagaccccttgcaagaggtgggtcctgtcctctggaggcagtgcttggagaggctctgggctccagcccagcacagaaaagaggctttttcttgagaggtttggtggggaaccagtttgccctagtttataaacagaataagcaagtgggtctggcccctagacagctcagctgctggagagacaaaggcagcacgggcagaaattggaggctcgctcaagtacagaggcaggcagttgaaggccgtcctgtacagttgagtaaggtactgtgttagagagcttcagtggcaggggatttgcctggcatgtgccaagccctgggcaatacccaatatggtggctaccccctccctccaacattaagtttccctcagattcctactttttttttgaatggggaaggattgttggaaccaaccatggcagcgcacacttctaatcctagcagtctggaggcagaggcaggtggatctctgagtttgaggccagcctggtctacacggtgagttcaggacaatcagagctgcacagagaagtcctgtccttttttttttttttttttttttttttttttaagatttatttatttatttattatatgtaagtacactgtagctgtcttcagatgcaccagaagagggcatcagatctcattacagatggttgtgagccaccatgtggttgctgggatttgaacttcggaccttcgcaagagcagtcgggtgctcttacccactgagccatctcaccagccctttttttttttttttttttttaagatttatttattattatatgtaagtacactgtaactgtcttcagacacaccagaagagggcatcagatcttattacagatggtaatttgaactcaggacctttggaagagcagtcagtgctcttaactgctgagccgtctctccagcccccaccctgtcttaaaaaactaaaaaaaaaatggccaggcagtggtggcgcacacctttaatcccagcacttcggaggcagaggcaggtggatttctgagttcaaggtcaacctggtctacagagtgagttccaggacagccagggctacacagagaaaccctgtctcggaaaaaagaaaaaaaaaaaaagttaaaaagctgagccaggtgtactggcacatacctttagtcccagcaccaggacagcagcagcaggtagattagagttcaaagccatcttgatctatatagcaagttccagatcctgtctcaaaagttaaaataaggctgggggctgggaatggattgctggggaagggctctcatgccagaacagacatcctgagtgccacggacctgctgtggcacacaaaagaagtaaaatgtagccattgtaaaagctaccagattttacatccaaaaccaaaaaacccacacctcagatgactgagtgtgctccagagcctggtgacctgaatccagtccccacgatctatgtggcagtagaagagaaccgactcctggccgttgtcttctgacctcaagtgcatcacggtgcacacaaaataagaaaatgtaactgaaagacaaaaccctgaacttgggccagggaggtggctcccgatgcaggcatctgctgggtaaacctggggaagtgggtttgatccccagaccccaggaaagagagaattgtgcttacaaggttgtcctctgacctccacacacaaaatgacctcagacatccagatagcctcagttgtcatctgatgatgtccagtattttggtcctagtcaaggtagggctcgaagtatggccagaagattctgctatccatccaggaagctaccatggtgtgccagacagctggtcagttgtgtgtgtgtgtgtgctgagggcaggttgaacgagtcatatagctctgtctgagaggagtgagatagtagaaaacaggcaggaacagaaagagaaagcatctgtgtgtgggtgggcaggaggctcggtcaaggtgcaagctacagagccctgctggcctctgcagtcagaggaccgacgagtcttgttcattctgtttgtatgttatctggaattctgcttaaattttaaaatcctcactaagcattttgtaagattctcaaaccaaactaggtgggcacacctataatgttaggacttgggagtagaggcctgggacctgagggcatccttgttatataagctaactcacagccagcctgggctatatgagactcagtgttcatacacacacacacacacacacacacacacacacacacacacacacacacacacaccaataatataataataattaggctcccttttagtgaagtgtttcctgggtatgttttcaggaatctgtcagtatcctgtgagacgggtttaccagcacacatcaggtacctgctggagaaggcagtgtgcgaggtcacgtgtggtcagagtgtccggtcagctcgctggagctgagcaagaggcaagaggaggggtgtaggctggggaggaagaagctagtgacttgccagctgtccatgccctgggcgaaagcaccgtgacacaaaggctgaaggaagccaagcctcccccggaagcctgaaggacgtctaccgtggtgctggccacttgtgatgaaggctccgtggagcaaacctggcttggctgtgctgagaggcttgtggtgccctacagggaaacgatggtgtcctgatcacgtccttggagaacaggcagggggagtcaggcagagcaagaggcagaggtggcagggtccccagaagtccctagcgagatgatggttggggtaagaaaaccaaccgcacagagatgcaaggagggattgccgactgactgagatggagccagaagaagtgttggtgccacatcccaagattaggagtgactgtgctatttggggatgtgtgcagcaggatctgtttggaagtgttctgggtgcctgaggccccagaggccgggtgtctgggagggatggcgtagcatggacattgagtcagcttagtgtgagatgtggctcaatggaagcacttgagcagttgggttgagagctgaagggtcaggctcaggggccagggtgagtttggaggcaggaacatggaactgagtgtgacatctggccaggagctggggtgcaacatctcctgccatgaatgaccgggggagtgctcaagtagagccacagttgggactcctgtggggacagcctgtgactgctgagctggagagggtatgtgtcaggagaggtgctccaccatggtggccatgtgccaccacagccttccaggctcactccttctgcagaggtcaagagtattgtgacctctgctaggccaggggaagggaagggaagggctcagctcctgtaaacaggcggggcctggctcagtgggcacatgcaccctggcttcagtattcaccctcccctccccttccctgtccccctctctccccgccctctccctctgacacccagtcacctcctactgtggacccagtctaggggaaaaatactaatgctgttggtgcgcttgtgtgtgtgtgtgggcatgcgtgccatcatgtgcagtcagaggaaagtgtgtgcaagtcagttccctccttccaccccacacttccggggagagagctggtgctgccagccttgatggcaggtgcctctctatgctgaagtagctcgctgtccccagcctgaccgggaaaacagcagattactgaaggaggtcaagtgtcatagaaatgagtccccacaaaagatggagtctgtcttatggctgaaggaagtcttctataaaaaacaggaagtgccaaggctgggcgataccttggtggagtggagtacaggtgcgcgcgcgcacacacacacacacacacacacacacacacacacacacacacacacggctgaggcaagaagatgacaggtctggataataaggagagaatcactagccttgattctcagagatctcactgcctcctgggtccttcccagcacttgggaagcagaggcaagtggaggccatcctgggccaatcgtgagactctctctctaatcggaattaggtttgactcttgtgtgtgccggcatacacaccggcgcaggatgcatggagccacagcgtggaataccttctccttgctgccttgagacacggccccactgaaccagcagccccctgactgtcaagtgctggcttgttggcagataggcacgtgctcctactccctgttttctacatggctgtgtgggatttgaactcaggtcctcatgcttgcagagcaggtgcccttggcattgagctgtctcccagtcctccctctcattttttatttaactctgagcagagtaattgtgttgtttcccttttgcctgtgatgtccaaaccttgtgtttactgaaggacgtcacctcatatagccgaacagtgcggctggctctccaagatgggacagatgctaatgattctgagccagcgagtcaagcatgctttatgtttctgctcttcttgtttttcccccagtgaccacatttgctacttagtgttttcagtcaaatgactcttttgcttgagcttgtcttggggtggctcaggtggtgagaccttgtaagactgaggaccgggctttgagcctcagcccccaagtgggagctagacaggcaggcatggtggtacatgtctgtgacctaggcatttggagatggggacaggaatcctggggttcactgcccagccttcacagtctatgagtgagaaccagccactgagagaccctgcctcaaaaactgaggtggacagctcctgaataacaacacccaaggacatgcatggacacgcatggacacatgtgtgtgcacagttcttttctttttttttttttttttttttttttttcttttaaaaatttggtttctctgtagccttggaacttgttctgtagaccaggctgcctcaacctcagagatccagccacctctgcctctcaagtgctgggattaaaggcgtgtgccaccactcccagcttccaacactttttttttttttcgagacagggtttctctgtgtagccctggctgtcctggaactcacactgtagaccaggctggcctcgaactcagaaatctgcctcccgagtgctggaattaaaggtgtgcgccaccacgcccggccacaattttttttaaaaaaagaagctttcccattactgtaaatggggttaggatgatgttatttgtcctaaataaattctgtggtgctggaaatagaagctgaggcaggtgtctgccaggcttgtgctctgccactgagctgaaccccagcagtagtgaagttgctgttgctgctgctggaggaggagaggagaggagaggggagggtgagactaggcctttcaactgatgggaccctgtgctgctttctagtccagggagccactcctttttaaaattttttttttttttttttttggtttttcgagacagggtttctctgtgtagccctggctgtcctggaactcactctgtagaccaggctggcctcgaactcagaaatccacctgcccctgcctcccgagtgctgggattaaaggcgtgcgccaccacgcctggcttaaaattatttttattttatgtgcattagtgttttgcctgcatgtatatctgtgtgagggcactggatcccctgaaactggagttacagagagttgtgagctgccgtgttggcgctggcaattgaagccaactgagtcctctggaagagcagccagtgctcttaattgctgagccgtctctccagcccccggggagtcggtcataacaggagctgtgacactggaggatgaagcactccactgctcaagtcactcacgttccacgagcaagtctgtcccagatgctcgcaccaaacctgtagtactagagttgaccctttctcaccgaccacaggccacctggaagaatcctttctgctggggccagagcctggcacatggccactggtccttttcagcatccctcacaacacctggggtcactttgagaactcactggtctctctctcgtggtcctctgtgctgtcagaggccttttctgctgacctgtgttcccagttcctcttctggttgggcatctgcacgttgtttcttggcactaagaaatgtcagacctggagacctcctgtcccttgagccacccctcatctgtgcctttgtctcactttttcttcaggccctcagctgagacctgttaccccctatcctacacagttcatgtatttatgtttatcccactactcttctgggtggaggttcaaggaatacaggcgctgctccttgcctgtctcccagtgtgtgggcatggctgccatgatggcataggtgagctatatgccctgcacatcaggaagcccaggacatcccagggcagggtcctggagtccggccagatgagctagtggcctgtgtagatcctaaggtttttgtcaggaaaagttgcaggggaggccaggagcaagcctcccagtgccactgctggcgtggattccctaaacctgagctctgtgcaagataccatgacattgaggtggctcaggcgcctggtgtggttgtggcggtgtctgggctgccctcatgggctttgtggctaaaaaataaaccagaagggccaaggcttacggagtgaaaaagcctcctccgcgctcctgcctgatagctacttgtggggacagcatttcatgagatacaatgctggtgtcgctaaggccgtcccagccaggagcatccctaagtctctgcagcctccaaaatgtgtcataccacgattgcgtgaaaggaagtgccgtgtcccaggctgcggttggcattcctctcagccagtgctcagagcaaagggagcaacagctaaacggggtggggcactggaggggctggggtgggtgagcacccctctggctccccatggctcggtgcgtgtgaggcgccattgccagctgtgtacacagcgtccgcagcacacactggtgatgagcagctcctcgctgtgctatcttagccgtacacctggatttgctggaaccttgaatttctttccgtttgttttaggagtaaaagtccctcgaaatttccgactgttggaagagctggaagaaggacagaaaggagtaggcgacggcacagttagctggggtctggaggacgacgaggacatgacacttacaagatggacaggcatgataattggacctccacgagtaagcaccaagctccagctgtcactgtcatcgagttaagctcactgtgcctttccttaaagcagttggcagacactcaccagaggtgtttgctcaagtgtgctgttttttctctgacccatttcaatttatacatttgagcccctctgatgcgctttaatcctctttggtaatcaaatcctgtgtagccagtagtgtggatttacatgacagtgtagactgtggtctttgagctgccgtccctcagctgagttcaagacaaagcaagcacttggacagctaccatcccagctttgctgtgcctttgtgttctgcctgtcactcagggcaggttcaagtcctgccatcagctctgctgggtccagaggtatttaaacccagggccaaagaagaggggcaagcaagcctacaagaactctgcttagtgaggtcctagccactgtgtgtttgagggtacatggttagccctccaagaattgtcacccagtgcccacaaagtcgttgtctcatcctcctgcgtaaccacattccaggtcacaggtggggaagctgacccagggtgaagtcacctgcccagggtcacagaactgggtctgtttgccaagcctgttctctctcctccctgcccactggtcactgacacactgctgacaagttgagtattcattagtcagcactgaagtgctagggagtttacgactaggtacaggagagaatacaggaagagggaaagaccctaaaagggacacttctggagatgagcctgagtgtgctgtgcctatagtgacagcttccttccttttcaacagcaaggcacagtggaactaagagggcagacacctacctcccgctcattagcattcagacatttgaaggtcacctttgagggtcattgagcagccttgcacttcactcctgcttcctaagtcatctttgcaactctgatgccggtgcaagagttaatgtatatacattccccatttcctcctccctgcacagcagtgtgctgagtctcaggacgtacaggtagatggctttgcagatgctctccttcctcagaggatccagcctcgagggagatggtctccttagagcacctgtgtgtgggtcagggggtacagaggctgtggaccttgtgccatcagctctgttggatgctgagaggctctgtgagaactaaacaagagcttgctatggccatagttacccacatcccagcatgcagtggcagaggcagaaggaccgaccagtcactctcagtgatctttgccacacagggaattttgggccagtatgtatccttgagacactgtttcaaaagagacagatgggctgaagacagctgggtggttaatagcacttgttattcttgcagaggactgaggttcgttcctagcacccacccatgtgaaggctcacaactgtcacacatgaagcacacacacacacacacacacaagcaaagcaaaaggacacacagaaatctaaaacagcttgtaaatactgttgaaaatgttctgcctaaatgttcaggctaggatttctacagcacactttataaactcagaaggtgaggcaggaggattactgcaagctcaaggcatcttggactacataagaccctttctgtaacaaaaactgtttagattgtcctgagctaggctttatacccttttctaaaggggagtggggctcactgagctgctagacaccagatactttccacgtgtctattgtacgggcttgcagtgcaacccgatggagaggatctaccttaggacctcacagatgcttgcttgccaggcagcacgccatgcctctgaaatacactccaggcagaccagcctgtcttttgtttaagacaaagtggttgctcagacctaatcccagctcttgggaggttgaggcaggaggatcactattgattggagggtagcctgggctacatatccagctcctgtctcaaaaacagaagaggaagctgggcatggatgggacatgcctttaatcccagtactcaggaggcaggggaaagtagatgtctatgagtttgaagccagcctggtctgtagagagagttccaggacagccagggctgcacagggaaaccctgtgtccagagacttaagaagaagatcctgccttgcagacctgggtgccaaaaccttggaatcctcttgtcccaggctcccaaaagctggggtctagggctgtggacatggcaggcaggtgctctaccactgggctatgtctgttggccgtttgtgtttgcatctgctggtatcctggagctgtgctcgcaggaacctgtgatcttctgacaggtgctaggcatcaactgggtcctctgcaagaacagctaagtctgtgtgctccccaaaccttgatttttgagatatagtttgataatgtagcacaagctggcctcagattccacccctgaagcactgaggcagtgtgtctccttgcctggcttagagtgctcttaagtgtgtagtccagctgggttagtatttgtagtacctacaggaggagtctggggagcgagcatgtgctcccacaggcagggcggggttgaaagctggtgctccacaagcctgccctcctcttcatgctctgtagcccagcacagggtagctcagtgggcgatgcacctgtgccaagcctggcagccactgtgagtgagtatgtgtaagtgagtgagctatcgagcgagcgtgtgagagtgagtgagcatgtgggagtgagtgtgtgagtgaatgtgggtgagagtgagtgtgggtgagaaagcatgtgagagtgagtaaatgtgggtgagtgtgagtgagcgtgtgagagagtgtgagagaacgtgttagtgagcatgtgaaagtgtgtgagagtgactgaatgggtgagagagtgagggagaacgtgtgagatgtaagtgaatgtgtgtgtatgactgaatgtgggtgagagtgtgagcgtgtgagagagtatgagtgagtgtgtgagagaatgagcatgtgagagtgagtgaatgtgagtaagagcatgtgagtgtgagtgagcatgtgagtgaatgtgagagtgtgagagcatgtgagagtgtgactgtgagagagtaagcgtgagtgtggatgaatgtgggtgagtgaatgtgagtaagcatgtgtgagtgagcgtgtgagagtatgagtgtgtgagtgaatgtgggtcagagtgagtgaatgccacctggctagcaaggccaccacagtatctgtcacttgccattgggtcatttttcatcacactaaagaactgttggtggcgatgtcgtcccaggagcaccctgagctttcttccagtagagccaccatggagctgctggctgcctggttgtcttcactcgttgctgtaggcattgggactgacgctggcgatggtagagggtctgtgtggatcagtcctcagttctgtgcggaatgtgctaggactggccatgccagatgaggtggtagctgttgggcattttcaagagcttgggcttgctggcagtgtgtgcaaagtggtgtcccctgtcactggctctgtcctgttcttctttttttctttctatatgtttatttaatgtgaatacactgtagccgtcttcagacaccccagaagagggcatcagatcccattacagatggttgtgagccaccgtgtggtttctgggatttgaactcgggacctttggaagagcaatcggtgctcttaaccgctgagccatctctgcagctcccctgtttttttcaaacctataccttcatcgtctttttgctttatgagacattttagagtctcactgcagccccgattgacctggaacaatgattctgcctcaacctcccaaagatgaggttactcgcctcagcggccaccctggcatccctatgattttgattaacttagtcctctgaggtaaagaacgagctcataggagcgacgacttctaggttcttcatgtgattgtgctgctttatggttgcctcataggccatgtgctctggaactaaaaacctactgggtgggtttgtttgtttgtttgtttgtttgatttgtttgtttgtattttacttggggtcttaattactataggctagtcttgaacttctgaacttcctgtttccacttccaccttgctttgacatattttttaattttaagataggatcttatgggggctggagagatggttcaacagttaagagcactgactgctcttccaaaggtccggtcctgagttaaattcccagcaaccacatggtggctcacaaccatccataaggagatctggcgccctcttctggagtgtctgaagacagctatagtgtacttgcacataataaataaataaatctttaaaaaaaaaaaaggctcttagccaggcagtggtggcgtacgcctttaatcccagcattcgggaggcagaggcaggcggatttctgagttcgaggccagcctggtctacagagtgagttccaggacagccagggctacacagagaaaccctgtcttgaaaaacaaaaaacaaacaaacaaaaaagataggctcttaacttagtccttacgaggctggggctgaccctgtcatctcaaactggcagaaatttgcccactttctacctcccaggtgctgagaccctacagtgtgtgtgttagttagcaacatggttttatagagagagaggtggctcagtggttagggtgcttgccgctccagacgaccagagctccatccccagcatccatgctgcccactgctgtctgcggttacagcagctccaaggcctcttctggcctctgtggacatgtatgcacaatcaaactgacacacataagtaacgtgctcacatttatgtgttctttttttgggggggtgggggagaactttctcagaaatccacctgcctctgcctcccgagtgctgggattaaaggcgtgcgccacacatttatgtgttcttgtgtgtgtgcgcgtgcattacagtgaacctgtggaagtcagaacactgaaaagtctgctctccttcccaccctgtggatcccaggaagagagacccaagccaggcagctatacagctgagccacacactgcgcacttgtgctctttatagccctgccagggcttgaacttagatatcttacatcagccagctgagcctcagtcacgggcctgtaccactgggcccagagttccaattgagttttgctagagttttgtgtgtttgtgtgtgtttgtttgtgtgttttgttttgttttcaagacaaggtctctgtgtgtacagaactcaactgtagactcaactgtagcctctacctcccgagtgctgggattaaagcggggagccaccactgcctggctgctctgcctcctcccatgagtggaaaactagcgtgaggcgctctatgcagctgtctcgggcagtagcccaggctggcctcatcttgctgtgaacctgctgccttccaggtggtggcttctcaagcctgggtgggcacctgctgcactgagacaggggtctgcgcatgccgggcgggcgtgcagaggatgaggcgtgtaggtgtgttggtttagggtattctgctgtgatggggagggaccctagcctcctgtgtacattcagcacacgcactgccctcgagccacaccccagcgctggctttctgaaatagggccagtcttttacgtagatggcattttgtttgcatgcattgtttatgtaccatatacgtggctgctgtccaccagggcaccacgtcgcctggaactggggttatagatggcttagaacagccagtgctctcagctgctccccagacccctccctcccttcctccgtcccgctcttccttgtttgtttgtttgtttgtttgtttgtttgtttgtagggcctcactttagagctcttacctggaacagtgaactttggcagccttgccttggcttctttctcctgggtgctcctgggggttgtaagtttttatggaccctgtgctgggggctgaggggctaatcctgcttgggatacctcagcagatgtgaacccacaagctatgagcagcattcctccacccagacacccagaccctatagccgagttctgctgtgcgtgctagatggatgatgggtggcagcactctcagaggcggggaaggggagcgtgcgtgcgtgcgtgcgtgcgtgcttgaagaaagtctttgagctggcttatcttggcttgagaatggtttacgtaggtgagttctggaggacctgaacctgataaggggatgtttaggctgtgttcaagggttttaaaaagaccttgagaccagtaggtgtcactgtgtgcataggagcaactgctttgtgtgcaagactcctaaggagagggtgccccctgcctgataaagaggcgtggcccctggtccagggcacaggtcccatgtggaaggtctctgcagtgttgtctttaggcacagtcacagagtagggtgcttgcagccaggtgttcagggctgtgtgatgtttccactcggggtggatgttccacacatgattgggctgggccaggcacaatttgctgttgaacattacaggtgctggtgtgggcctcactttcctgtgggtctctttttgtttgttggtttggtttggtttttttgagatagggtttctctgtgtagccctggctgtcctggaactcactctgtagaccaggctggcctcaaactcagaaatccatcttcctctgcctcccaaatgctgggattaaaggcgtgagccaccacgcccgtcttcttatgtatctcagtgaagagatggttggatggttggctttgtaactgtgggtagaggtcagcagacaccttttgtagtcttcctccttctgctttgacaagcttgcatgacaagccccttaccctctgagccatccccacagccctcagcagttggtgttttcatttattcgcgatagtgatattcatagcccagactcctaaggccttcaaggtcactgtgtgcctgtggatgatcctcagctcgtggggtcacagctgggtaccatcacgcccagacacagttgacctttcagagttgatgctgtccctgatggtctggtgcctcagctgcctggccttctgcttcactcacttgatgctggtggcatcttaggtcaccatgactacataagagaaagaatgctctgagggcagatggcatatgctacagaagtggcctcaggtcggactcattgacacttaaccctagtttcctcctgtgtctgtcctgtgcttccgtctctgaggcacccacgacaggcagtctggggcaacggtgtctcccaggtgttggaagctgtacctctcttaggtctctgtaacttgtctctattccttttttccagacaatctatgaaaaccgaatatacagccttaagatagagtgtgggcctaagtacccagaggcacccccgtctgtaagattcgtaacaagagtcaatatgagcggcgtgagcagttcgaatggagtggtgagtcccccactgcctgcctgtaggttatcacggtgcgcttgtgtctgcagcgttgggcagggccgctccattgtggcttgtcactgcaggagccctgcactggctgtcagccgggcgtggtggcgcacacctttaatcccagcacttgggaggcagaggcagacggatttctgagtttaaggacagcctagtctacagagtgagttccaggacagccagggctacacagaaaaaccaagaaaaaaagagtgttcagtgtccatggcaccatgaggtagagttgggaagttggggctgaggcagaactattcccatatctttacctcctgtgtcctggcccctgccatgggatattttttaatactgtttgcttgtgcagccctggctggcctccacccatggcagccctctgtctgagcccctgcattagcgttgtccatggccttgaaggcctgaccttgagaggtcaaggttgcagcgctgtctacaactgcagccctctgtagagctcaggccttacacaggctggccacacctcggctgtaaatccccaatctgtgtcttgcttgctagaggcttggaggcgctgtgcctgtcctgtcctaggagtcttcagaagatgggccagagaagtagaaattagcattcctgccacttgtcctatgttgttctgtgttggagccacttgtcctatgtgttactgtgtcggagccactaactccttagtgacctaagagacctgggcaccatggctgctcttgctacctgccccaccctgggtacacattggagaaaggacagggcatgggcgccaggtgcttgttggtcaggatgggcccagtttggccaagttaagtctccctgtgtgcctcaggctctgctagttttcttcatgccaggacccagaaaaaggaggcaagactgtctgcaggagggcagcttggcccagcccatgggtttgatgggcctgtgggctgggcatatcagccccggggagggcgggaaggttttgctgctgagtctacagtaatgtgtgcatttgcctctgcgcaggtggatccgagagccacggcagtgctggcaaagtggcagaactcccacagcatcaaagtcatcctgcaggaactgcggcgcctgatgatgtcaaaagagaacatgaagctgccacagccgccggaaggacagtgttacagcaattagtcaccaaggccccggcctcccctccccatccaacccaagtcttcattttccacagtagtgaattttctagatacatctgtagacctcaaagtaccggagaggaagctccactcagccttcatcctgagacactgttctgatactaacttctcgtccatttgaaatacctaagttgtgctgtgtaacatcaactgttgagtgtaaccgctgtctgcctggttgaacttctgggatcaagaaggtgttgaaatcggtttcctgtgggagcggtgggcacagctaacgcaactgtgaacagacacgtcacacaatcacctgctgctggcccttggcctgggtctgcctttgcccgccccgccctccgccacagctgtgtggtggcccttagaatagatgggaaggcttcaggtagcagttgtgggactgactactgctgggcttggggcgctttggctgcacccctgcttcttaagtcttaagtgatgccccatccaagccatggtccccactcctccactcccacccttggccaaagcttagattgtaaccctcccctccctctgaaattggccgcgggtgaggaattcagggcttcccgtgtccccacctttatcaaggggtgctgcttcccctcctcaactcccctgttgcccatcaccacccaacacttgctgtggccagaagccatcagatgaggttggaattgcctggcctccctcacttagctccggaccacactcacctgccaccagcctgggaagggagcgccgggtcctcagccctgctgccaccgtcagccctcgagctttgtgctcaggtctaaggtaaacagcagtcacagggcgactcggaccggccagcgctcagggtccttggtgaaaagatgcctagagaaaggccatgcggagtcctcagtgcacacggttctgagttggttccttttcccatcattgctttgcttttacacattgaagaggtttgaacagggctctcgtcaccctggccacccatcgggtctgatgtggagcctgacagctggagcacgaggccctgaccctgcagactcaggtttcagtgttgctcctcagaccctctgcagggaccaggaggagctctgtgtccccatgtttgcagatcatctgcagatccgtgggcctggcctcctggctcactgccacgctccccactctgttcaggaccactaaatgttgaaatgtggatgcataccgaaataaaggcaatccgttgtgttgcagagctcggtggttttattttaagcacgtgtgtggctccaccttctgaagcagcagctatgaggtctaaagagtggctggtggggcctttgatctatctggggcaaactagctctccggtaggcaccctgtaagtcaagcttgactgtccataagcaacgttctgtcgtcgtccgagtctactataataaaaaagtatgctttgatacagggcaggctgtgcccttcttcagcctattcagtggggcctgcctgatggctgaaaccagcactttacctcttaggaaaacattcagggttctccagccaagtttaggctcttccctcactgtgcatgagggacagacctctcgatacttggtgagatgcaatgtcaggcacagtgaggcagggtctggctatttcataaccctggctgtcctggaactcactctgcagagcaggccggcctccaactctccaattctcctgcctctgctcctaggtgctgggattaaagggctgctctccactacaagccgaaacatagctgttaaaggctcttcaggcggggaatttgacctagagaccctgggaaaagcaaagtggctggttgtggttgtacacacctgtagccctcctccttaggggcgatgcaggaggatgagttcaagactccagggaagtatgtcctctttgagcctcacaggccccatgaatgactagttaagtctagcagatcacagcaaaatgggtgtggcgtaggtacttgggtaaaaatgaaaattggtttccccttgcttaagttgccttggggcactccagctgctggctccttggggagagcctgcactggttggactctatgctaaaattggacggatgtgtcatagctgtgatgttgcaaacaagaatttcgatctgatagagtggcagctgtctaccatacaaggggtgagagcaggtctgaatgtcttgactcaggagttgagcttcatcctggagatacacaggccagcctacagctggggcagacattccctctggcacatggcgcaacaggctgccctccagaaggccctgccagaccccaggtgcttggtgctggcctgggcttgttagttcactgccaggtcacttggggctccaggctggggtctccactcagcagagcttgcagacagtacatcctcctttgagggtgtgacctcacgtgaccccagcatgagcccacaggatctggcttttgcactgtggggtccacgtgggtcccttgatgtccaacagctgcaatggcttgggagatggagatcctagagccagtcttgtagctgctgccaccagctgtcactgagaagccaccgtgcacacacaggtgtgaaggtctcattcaacaccaacattttccgtggaagtaaattttacatgctgtctcccagaaaccacaagtccggtagcctactggtacatgggcaacagtggccaagcctgtagtctctgtggggtaccaggtcctcccacgatgtttaatgtgtgtcctttggcttttagggagccacagttctaggagctctttgaggaacgcgctatggcctcaggagcctgggtgctggcatttgtgttcccgagcggctgggcaggaagctgatgaggacaccatccacctgtccccgtcatcacagctgctgctaaatgtcagtcatgagaaaccagaagtgtcagtaaacagaagaggtgtgtggcgggggtcactttaggatcatctttttttttttttctttttaaattccatatgcaatagtgagtctcattctgacgtttcacacgttagtgtgtcctgatcatgtgacctccggtttacacttatgctttttgtgagcgagagtctcttgtagcttcccagcagatcctgggcagacacagccagaccatccccactgggactagctttatcttggggcactgcttctggttaccagaggcattcagtaaggaggagtgatgtcacctaccgtcaagaccatgatagtgacccttagttgactgaggtgtggcaatgacgagaaaagcctatctcaaatgtgtaaaaaaaaaaaaaaatcacgtcagggtgggcgtgtggctgaagctgacacattcaggctctatcacacctgatagggacatatttattcctattgtttgcccctcctgccccactgagcgtcagctgtgagcagcgaggcccagcctaactccacaaatgctactgactgagtggaaccgaggcagaggcggggtaggcattgttgagggtgtgaggagggaatgcaccagttctccattgtaggcctcaaggccagagtctactgtatgacttcaggcaggttcactaacctctccgtgcctgggtcacacaccgctgcaaacaccttggcccaagtctgcatgaagtactgcctccaggttcagctcaagccttagcacccattgaagtcagcagagggcgcccttgtgctacagactactgcctcacccacatcggttcccagccagctggactaaaacagggacaggtggggacagatgtggccactgagcaggaaaggagttcccagctccagggtgtcccgcagagaaaacagcagagaaaggcagtcccccaccccttaacttgtgctgtcccttggctcctgagatttcagtgagggtagaggcaggggtggggtctcaggggtggggtcctctggaggccaccaactgcaggcaaaggcctaaagggccccggggcgaaacagaagaggaaaaatgggtgtctggaacacaggcctcataggccagcctttccccttgtggagctggtgaggtgaggtgtctgtttctgtggggacagtgcactgaaggtcatttctgtcattattttccctgttccctgttcccacccctgagcagcctcacccgcacctgaggcgagtatctgagaagaaactcctttctgtttccccacctgcccatcagcccttccccaggcgacagccctgacagtcccctttccatccggtaaagacccagccccgagctgcccccagcaggctttcctcccctgacacactcacccagcaagcatcttgtgtgtgctcactgcgtgtcagagcctgtgcagtgaacaagagctgtgagttgggatggtagtgggctgggggactaggaggcaggtgcacacagtgtggctttagaggtgtccagagagtgccctgtggagatcaaggggtgatggagaggatagtcagtgcctttgaaggggtgactgaccaggcactgttggcagttctaggtgggggaggctgagaccacaggcctgggttgaaaggttcgggtcacagtgtcacactaatgcccccagtgtgccgcactgaacaggtacccaaggaacagataaagggacatgtgacagtctgggaacccctgcaacctcccactggctcagtggacacagaacaatggcccgtcacccacagaaggagctgggactgctgtacccaccactcacagtttgggggccacctctcctactcagtaaactcccagcattcctggcccactgtgaacccatgacttgctcctcaggtaggggtcacttcttccccgccagcctcccagtgcacccgtggctctctggcactcgcttatatcacagcttcctcagaacataattattttttctctcagataattcagaccaggagactccccgaccccttctggccacactctcacccccctccctaactgacccctctgacatagtgattgcttcaggtcagagacccgatgcccaaaagccctggcttccctcctggcccagccccaagaacctggttgcgcccacccatccacccaggtctacccacttagctgtattcttttccagaacccaaactcttatcattctgacacaccctttgcatccagaaagcacaggactctacagtttatacagtgagccacattacaatgccttcacttagacaggaacacgctgaggcgcccacttctgcattcaccctgctcaactagtgtgtgtatgtgtgtgtgtgtgtgtgtgtgttactaccagagccccaaaggtgtagcagaaagctgaccactggcacactatgctggcagaggtgacctaggatggccatgacccctgcagagacaggaaattgacagtaacaaattatatagaggagttaaggcagagaatgggttcgcacagacggggcagagggtccctggagtcggagaaagccaacgaggtagccctcgaacaaagatggagaatctgccagcatccgaggggagaaaggtttcagacagatgagactagagcaaaagcccccgaggcaggggcatggtagacttgaagttgtagctgggaggtctgcatagctgcaagggagcaaggaaggaggaggcaggggacaaggaagtgaccgtgtccctgaagcaaggctggaatctacgctggtgccccagaccaaggccagagctactgatgatttgggtaccaggtaccttactctgcagcctggttcaacaaacccaccaggactgtgtagctgcagggctggcctcccaccctgtcactgcttgtccctctgtggcctgagtccagcaaaccttagccagctgtttgctgctggggtgagcaaggactctgatacccagggaggggcgccatctgctcaaagacagcacgtttgagtatgggcctgcgagccggggttagctctccctccacaagttggcagggtctgtctgtccttcagaggaccctggagcagcacatctctatctataagctctgtgatatggataagcatgggctctgggacaagtcccaaactcagatctaccgcaagtgccctctgagtggccgtagcctgaatgtcatgggcccccagaatccctcacaccacaagggtccctccaagaaccatgttctgtggctgctaatggggactactggccttcttccctgccacctttccttccttctcaacaccccttgacccagaaaccaggactttctataggccctggggtcagagggagacacctggtacactgccctgggtgagacactcacttcccataacaagccacctgtgttccacagctttgggcctggaactttaacagtttcaaggctgtttcccctcttccgggctcttcttgggcacaggctatagtggggtcctgctgcaagaagtgaggggcaggtggcttagagggttagtgagccctgtcataccagagagacctctccaaagtcagtcagttgtcacacctgtggggctgactctagcacccagagggcaggaaccaaggacactgtgagccccaggtgaccaggcagccccaccctcacccccagatgcacagaggatctggtctcagcgtggtctaagccaacacagctagtgagcaaggttcctttcagctgagctctagacagatcctaaaagaccaagggtgtgcatgagcagccagggcaaggtctgtcacagtcagcctcagctgtcaccttgacacaaaggcagcatcacctgggaagagggaacctcaacggaagaattacccagatcagattggcctgtggccatgtcttcgaggcactttcttaattgttaattggtgtgggaaggcccagcccactgtgggtggtgccaatcctaggcagatcaacctgggctgtgtaagaaagattgctgaagcctggatggtagcctacacctttaatcccattaccctggatgcagaagcagacaaatctctgtatatttgaaggcaacctggtctgcagagcaagttctaggacagtcagccctatgtatggataccctgtctcaaaaaccagaaacaaccttactgactgagtctagcagctcacacctttaaacacggcacttgggaggcagtggcaggcagatctctatgtgagcttgatgccagcctggtccataaagtgacttccaggacagccaaggctattaaacagagaaaccctgacttgaaaacaaacaaaagaaatcccaacagtcttgatctctgtgatttttgaggcttagcctcatctgcatataaagttcaggacagccagggatacataaagagacccaaacaaacagaaggaaggaaggaaggaaggaaggaaggaaggaaaggccactgagggagccaactcagttaaggaccttagtctattttctgggtaccacacgatggaaggagagaatcaagttccacaagttgtcctctcatatatgtgtattctcatgcacacgccactcacgagtgagcacacacacacaaacacacacaatgagcaagcatgacaaaaacacatctaaaagggttatgtgtgagcaagcagagtggacagtaagagcaccatcttcctggcttctgctccaggctcctgccctggctgtccccagaggatgctctgtaacctggaagctaaatacacccttcctccccatgttgcttttggtcacagcgtttatcccaacaacagaaggaaaagtagaacagggttcgaatctcggccctgcctcccacctgctgcgcgccccaggcgtgggtgcttccatctctcctggctagtttccataactacagtcaggcagcgtatggggacccatcttggaggccgaaggagatgagtcttagggctccatggggttagtggaggtaggaagactcacagggcagatccagcaaactcagaggccgcatcagctcctcccaagcacccactcctccaccgtcttcaccccacgcctgaggggaggcttctgatggcctgtgaggacttggtagaagaggaagccgatgccctgagatgtcaaacaccctgcgcaatgctacctacccagcagtccagacatcaagtggggacaggagtcctggctgagtgtctgcactcggaccagaagcccctccctccctgacctcataccacagaagtacctttgtggcatttgtccaagacttgggaattctgcctcccaaatctgatggaactcagttgccctagagttagcagctgtcccgctcagctctccccttctgcccacaagttccccagagggacagagacactggactctcacgccccttcccaacctcaaccactttcaaaacgctcctagcctgagccagctatgattccagatcttcccacagcagaaaacatagactgagtccctctgagggcccttgtgccatagccccgaggggcccaaggacaggcctcactcggcaggaggcagaccggaacttggcaagctcagtccctgctttaggtcaggtctgtgtccaggaaacccaggccctgggccctcatccctcagtgagcacctactgagtctgttagcccctactccccgccacagctttgccaaagacaggggacctttccctcacctgtagaaggggaaactgaggctcagtggggaacacgacacagccaggctttgtttgggccctttcttgaactacctcctgctgacttggagaaccacaacaagaaggactaagggcagacaggtggggaacttccctccacctgcctgactctgggctgcgcctgaagggaccaagcgctagctaactgcagcttctctggaagttgtcagtgggtgctggcttcacttctgagcttgtgatgtctgtggggcctgtttccatgacgtctcaagtcatgccctaacagtaatgcccagtgtgtcaccagctggttcccatcccagccttgtcacggctcccagcagcccccagtgagggtgagtgcctcaccctgcctcattcttcctgcagaagctctcgttttagcctttgtcctcttcctcatggagatcctgaagcaacacttctgtaaccccgaaccctgcaggtggaagcaggaggaccagaagttcagggccatcctcagccacagagggaggctaacctgggctacgggagaccttagctaaacgaacgaacaaacatagagacaaacgtttcttcccttggtgctagggccagaatctgaagtttggggacatggtgctgaagtttggggacatggtgctgctccttcaaggctccctccaatccctgatagcacctagcattcttggtctgcagccacaccacaccagcttctgctgtcccatctcctcaaggtcagttctctgggtccctgtgtcctccctctcattgggcgtcaccatcggccattatggaatcttgtcttgagacccttagttaataagcctgggagagtctatttccaggtccagtcactcctggggctcctggggcacttgacttaggagaaaacacaactcaattagctacaagcacctactgtgtgctctggggacagaatggtaagtggccaggctaggtggggttggagagccagttccgggaaggggctggcaggggcggaaccaacaattacagaactgaatgaggttttaattacagcctctgagaccccacaggagacacggctggcctggtcaggccaccaagcatgagctggcctgtgggtgtctggaccccagctttccacacgggccagctccttccacctgtgtcccctctcgcctgtgcccaccacccagcttcctaagacccctagagtttctccccataccaacaggaaggtacattttcacagacttgggattttgggtgtgggtgccgggatggcatccagggttgcaaacaagttaggccataggtgtttatgccacaacccccagccctacttggaaatgtttatttgttaacaaaagaacggtttccggggctggagagctggctcagtggttaagagtacttgctgcccttcctggagaaccaagttcaacccccacctcctcctcttcctgcctctgtgggcagctgggcccacatgaacagacagccatgcaggttattaaaaacaaatcactaatcagctgctgctggcgactctaatcccagcactcgggaggcagagacaagcagacctccaagattgaggccaacctggtctacagagcaaattccaggacaatcagaactacacggtgagaccctgtctcaaaaaaacaaaaacaaaaacaaaacaaatcaaaaacctaaaaacaaacaagtttctgtggctgggcctaatggctcacattaacggaagcattctggaggcagagacagtggatctctgtgagttgagacctctgggctacagagtgtgttccaggccagccaaagctctacagaaaggcctccaacaaacaaacaagaaagattctcccgcccactcccaggctgcagcttcccggtgatgaaggtgccaggctttgggaatggtaagtgcacaaccgccttcagaggaggaaagatatcacctgtcacactgctaagactcgactacggaagcccagaaaatacttccccagccctggaacacaaacacagtgagcacgctgtgggcagtctacagtgtgtgccacagggaaccacttagacacccatcaccacagacctagaaagcgaggaaatgcatagtgtggagtactacacagctgcgaaaatgacttccctttagcaccttaagcgggtagactccaagtaggggatgtgcaggcggagcccagaccttctcaagcccacagaatgaggtccctgccgcccttccacacacacctccagcctcgaaccgtttgtattttaaaccgttttttaaaaactgcaacaggaaggagttctgggatgcgctccgactagctgtaggaagcggctcagggcagcagggttgaggccagcaggcaggagtcttggtctctatttatttactttgggactataagttattattattaccgagaaaccataaagaagagcgccctcgccagccagccccatccaaccctagagtggaggggacctcctgtaccagaagcgaggcagcctaggaagccctgcatcgatcggcctctgcccaccccaccgccctgaaccctgtctttcccgtgtccaccccccaaccagcccctctgtcatcgtcacccccgccccacccccaccccccaggcacgagggattgccgtccgtgcggaggggagctgctgcctgggctctccctggctgctgcaggccgggtggggcgcagagccagcaggctggagccaggcagcctcccgggcctcctcacagccgcttttgataaagcccctctgtgcgtggggtgggggcccggccggctggagccagcgcacatctggaggccagcagaggcccaggcggccggcggctgacagcggcgccatcccgagccacacgcccggccctgggtaaacacgcccgcgcccacccagcggctcacctttcgcccacaaggctgcctttcttctcggacccgggcccatgccaccgcgaacattcctcccgggcacagggcagaacaggccgttcaccccaaggctggctgaaatccgaagccggggcgggcgcaggttgcggtggaggggggctctgggaagtgttcccccagccccagccaggccctgactgtggttcggacccccctggaatggtgtgtgtgtgggggggggggtacgtagacctcaaggtatccctgagttcctatagggatgagatccgggctccagttgtgtgcccttcagaaagtcaccgcctctctgggcctcagactgggcacccagctgccttacactcagagcttcgagaagtttccatgagcaaagtgctgggaagagaactcgcacaacctagagctccccggatggctagtcccatcgggctctcccagggccaccactgtgtgccagacactaggctgaggaggtggaaacgggctcaggccctcagaagctgtgtcgtttctcagagcagaccccatcacgtctggcaggggctaccccgggactagactattcttgcctagttgggaaactggctggcttctctgtcccttcctctggtggatcattacacggttccagcctggggacagcaggctgggacctcaccatctgctctaagaggaaacagagggtctcctggcttcagtactgcagcgtcagcacatttctgctgcctcacaacctcttgtttcttctctcctcctcctcctcctcctcctcctcctcctcctcctcctcctcctcctcctcctcctcttcctcctcctcctcctcctttttcttagagactctaagacaccaccgattggatggtggctggcacaaaaggagaggtgtgggagcagtcagggcacttcctggaagaggaggcctcgatgtctcaggctagaagatgaggagaggatgattggcagctgtgtacccagcatagcttggatgctttgtggaacttcagccttcccggctgacctaagaggaaattgaggcccagaggggagctgcgtactttactggggagggggatgggcctggacccctctcctccctgtctctgtcagtgggcaagtctactgagtgctgggatccccaggactgaagcatgcttgcttctctgtcccctcctttgcttcttctggcctcagtttcccttctctgaccaacagcttccttctccaagctgcctttctgacccagggtccctaaccggctggggctctgaagctggctggtggggagggtcctccacctgctacaccccctgatcccaggaacctgctcgccaggctggagccagccgccatctggaatgccgggctgtttatggagccggcggctgcagccctggccctgacccgaccaatctggaagtgattagcagctaggccaaggggtattagaagttctcatccgtgatccaccgcccacccctgcaccgctggatcccaggctgagctggggggtggggggtggtctctgagaagtcccctctctccctctaggtcctgcttctaggccagcggctcagaatcccacgatccacagaggcaggaactaggccacaagcaggccagggctctgggtggggctgcgggccaggatctggggctttcccgaggggaggatgccttttccgaatatgaaagtggacagaaagaaatactgactccattagcgaagcccagacagaagtggacagagggaacccctgtcaccagggtctagggactctcgccggggtgggaacacccactcatgggaaccttcccttttttgtagcaggatgaaggagtgtgtcaggattgggctccgtgtgtcctaggctgggttcaagctctttgtggagctggagatgactttgaacttctgatcttcctacttcttgtacgctgggatgacaagcttgagtcaccatgacagctttctgctgtgagggacagaatccaggccttcatgcatgcggggccagagttctaccacctgagctgcagctccagactttttttttttttttttttctttcagtcctgggaatgggacccagggactttcccatactgggcaagctctctacatgtgaggcatacttgctggtccttagactattattgccgatagctgaggctagcccagaactgtcttcctcctcttctcctgagtgtcaggattctaggcccgcgtcaccacatctggcttctccctctttgctcacagggacaaccctctgtcctacctgtccctcaagcacccaggatgaatcctgcagctcatgacactcatgacagtgcagctctaggctgcggcacggggggggggggggggggatatggagtgtcctgctgtgcactcataggtctgactgtttcccatgcactgatcacttgggtgagagattccatggggaagccgcccttatcatctctgtcccataagaggagacttaagcgcacaggtacctgcctgatatcctacaagttgacaggcagagctgagactctggactccagctccgagggctgagtcccaaacgccctcatcatgttgcctctccctgggctgcagagcgttctggagagatctggtgtcttgccaggcctccagtggtgcacagctggcttgcttccactgtgggctggccagacaacgacatctgtggcagtggtagggctgtgggggtgtttccattcccagaaggggctgtttgtcaccatggtgaccatttcctgggatgaaggccatccgcccaatgtcctccatggggaggtgctgttgatactgacctggacccctgccctcaatcccatgtcctaggcttgcttccagggacctcagggcatgcagccatgaagctccttccgtcctcaccgagcctccttacttcgagactcctccggcttcctttgtgccgccttcccccagcccaagctcctgctccagccagagagaggacagcagagcagcatgggaggggctggaaagctcacttgcaattgagagcactggttgctcttgcagaggaccaggctcagttcccagcagccatgcccagtggctcacagccacctgtatctcccacttcaggacatctgatgcccccctctgagttccatgggtacttacactcacgtgtatgtacccctgtgcttgcgcgcgtacacacacacacacacacacacacacacacacacacttccccctctggccagcaccactatcagggaacaggaccaggacatccttggcgacgctggcttttcaaggactctttccatgccccttgttcatgtgtcctagggcctacagcagagcctgccatgtgctctaacagtacctaatgatgcagttggccatgccagccactcaagatgctgagacaggaggatgacagacggcaaggcctgcttgggctacaaagtgaggttagacctgcctaggcaactgaataaaaggcttgtgtcaaaataaaaagtcagcacagggctgggctgagtagtgtgtgtttttaatctcagtgaccagctgagtgggggtgggtgggggtgtctctctgtgagtttgaggccagcctggtctgcatatggagttccaggtcagccagggctacacagtgagatcctgtctcaaagtaagaaaagagacagagggttacggggtgggatgcagttggtggtagaaggcttgtttagcatgtcctggcttccatcccagaaatgtaaagaaaaagtaagtgaagggattggtgtggggacccaacctgacttggctcaaagtcaagtccctggggcatgcagggaaggaagagggggtaggaaggagcagatgacacaaaggatttataaagtgtccactatacccaatggactttcctcccttcccatagcctgtgccccaggccacagtgcccatccactccacagagccacccttccaggtgccagtgttggagaacaagcagatactttgggtcttgtgtacagggcaaaccctgcaggaggcaaaaccagaatggaccagaaccatcagctcagttccacctaatctgaggcaggaggattatgaatttgagggcagcttgggcaacactgtgaagtcctgtctcaaaaaaaaataaaaagggtctgaggagatgttcagtggtgaagaacattggttgctcttccagaagatccgggtttaggtcccagcacccacatggcagctcacaaccatctgagactatggggactccaaaacccttgctggcctctgagagcactggtcctgaaattcactctagaccatcctggcctcgcagacacctgcctgcctctgcctcccgaatgctaggattaaaggtgggcaccaccatcaccactttcttttggttgttttaaaaacagaatgaatatacatttattaagaaaaagagagggctggagagatggctcagcagttaagagcgctgactgttcttccagagattctgagttcaaatcccagcaaccacatggtggcttaaaaccatctgtaatgggatccactgcccttttctggcatgtctaaaaacagctacagtgctttaacatccaaagctgaggcagaggcaggtggatttctgagttccaggctagcctggtctacagagtgagttccaggacagccagggctacacagaggaaccctgtctcaaaaaccaaaaaccaaaacaaaacaaaacaaaaatccaaagcttttttatttgtttttgggtgtttgtttgagtttgagtttggttttttgtttttttggttttttgttttttgggtttttttttttttttttttgagatagggtttctctgtgtagccctagaactcactctgtagaccaggctggccttgaactcagaaatctgcctgcctctgcctcccgagtgctgggattaaaggtgtgcactaccactgcccagcttgtttttattttattttatttttaagatttatttatttatttattttatgtatatgagtacactatagctgtacaaatagttgtgagccttcatgtggttgttgggaattgaattttaggacctctgcttgccctggtcggccctgctcactcagtccctgtttgctccagcccaaagatttatttattatcataaatagatacacttatagctgtcttcaggcacaccagaagagggcggatctcattatggatgggtgtgagccaccatgtggttgctagaatttgaactcaggaccttcagaagaggagtcaatactcttacctgctgagccatctcgccagccccgaagcttttttattttttttttaattttttttattacatattttcctcaattacatttccaatgctatcccaaaagtcccccataccctcccccccactcccctacccacccattcccactttttggccctggcgttcccctgtactggggcatataaagtttgcgtgtccaatgggcctctctttccagcgatggccgactaggccatcttttgatgaagcttttttattaacagtaagatccagggttagtttttgtagcctagcctagcccttcagcaagccttctggcccttggaacagacatagggtttggtgtagctgtgtggggttcctggggccttgccaaaatgttggtacacctctctctccccttctgaggaccagacatgagcacaatgcctccacccttgggagactccagggccagctggtcaacagtgaggatcttacccgcagccttgaggatgggactttggccctgcagtgcagcacacacacagtttgggcacttccagaatccccatgcacagcatctgtgacagtccccacaaccacagcggccgggaagcttcagctttcagatcttcggggacagggacagaggcggccagttagtgtgtctcataaatcactcagaaataacccttcagcacagcctgactggaggtggagttggtccgtctggacagaaacccgtacggcttgacagcagcctcgggcagatgtcctggctcttgggttccttgccctgaaccttcggtccttgtggtgagtgtcaatactcatgaaaaaataaaaagtaaaagagaatgaggccagcagtggggcccagcactcaggaggcagaggcagggggatctcttgagtttgagacaaacctggtctacagagtgagttccaggacagccagggctactcagaggaacccccccccccaccccgtctcagagaggggggaggggaggggaggggaggggaggggaggggaggggaggggaggggaggggaggggaggggaggggaggggaggggaggggaggagaggagaggagaggagaggagaggagaggagaggagaggagaggagaggagaggagaggagaggagaggagaggagaggagaggagaggactgttatcatcctgttttatagacagggaagctggggctcggaatgatatgaccagtccagaacacacacacacaccacagagagagacccaggaaggcatacacacaggttaaggagggagggaaggaggggaccacaggggtaagagaaatctcagggttcccatgaccttgtcaggccctcagctttctgtcctctgggaaatgggggtggggggagctcaaacaccgttcccgaactttgttgcaagcctaaagagtccattccagcaagtgcccacgtagccctgccgcagagtgactaagagtggacatgaagcaagccttcggctaattctgcggctgaagccagcttgggtgtgggccctgcccagtccccctctgccttggatcctcctggcccttggtgacgcagctgtggtggggtttggcaactccagctgcccacagttatgacagctgggggtggggtagttgggtcagtcccagcttctgccagagaccctttctgacagcctcaccagtatgaggcgcctctctctgcaccttctctgacagtggtcgtttccaaggactagaaactcttggccttgggcaggaccctgcttgtcactttgttaccaactattctgagcagaatagatggcacctgtcctcttttttttttttttttttttttccttttcgggacagggtttctctgtgtagccctggctgtcctggaactcactctgtagaccaggctggcctcgaactcagaaatccacctgcctctgcctcccaagtgctggttttacaggcaagcgccactactgcctggtttttcttttcttttcctttcctttcctttcctttcctttcctttcctttcctttcctttcctttccttttctttttaataaaagacagggtgttactatgtagctcaggctaactttattctgtagcctaggttggcctcaaagttcttctggcaattcttctgcctcaacctctccagtttggggattatggcctagtcaccaaacccaggccagtggacacttagtaccagacaaggaaatgagaaactgaacaaaagctgggtgtggttctatacacctgtaatcccaaaatggaggatccaggagttcaaggtctgggctacttgagatcctctctaaataaataaatcagaaagaaaaaaacggaacaaaataatagtagtgatttatacccctcccaaataaccgctaagctcctactgtgtgctgggcactaatcatagccccaggggttcgacagtgtacacagtagacactcccttttcttagaacggagtggatttagcaatggcccagctgtagatggtgagaggggggcaggggtcaccccacaggacaggtgagcaccagctgaggtacagagctctgaggctgagtcggcttggaaggagaccttcgctgagcaggacactccttgtgaaagcggaaacccgcagggctctgagcaagtgcctggtcaggaaggtccctgaggaagtgacgtgtgtgctgcactgggaagggggcagatctataggccactagaggaagaactttcccagcaggggcaaagctggggcagaggcaggaagacagtcgccacccctgggagccggtgaccagtgggaatgccccttggccttgggtttctcctctgccgggagggagcaagtccttccaggcaggcatcaggaaacatctccgaagctgctaggatcccccagggccatgcacctttcccccagccgccagggccccagctgctccgctcggaccaaatggcaggtgcgtgggaatgctgtgcctgtggtcaccaccttctcaggatccccagtttccccgtgtggggagataaagccgacgtccctctctcctcatggcggtcagcttctctgaagccccatttgctctgaggtggaaggggatggtgtgggtggagcagacgcggctctctcaggaggaaatgctgttcagtctcccttacaaaaggaggaactgaggccgcggcgaggcgggttctgaccctggcccggtgctcacagtgaactgggcattgggcggagccctttgaccccagctgctgcgcctggttctctcggcaggcaaggtaggaagcagccgctgggacccaagctttcagtgaggaagtaaaatgcaagctaagaggaaaggcaaggccaaggccaggtcacaggggaaatggggacagccaactgcactccagacccagggacaccaacctgatgctgctggctgtgcaggcaggatgagcaacacacacatacacgcacatgcacacactcacatacacacatacacactcatacactcacaccatacacacacacacaaacacacctatatatacactcacacacaaacacactcactcatacatatacactcactcatacatgcaaacttacacatatacatactcacatatacatacatacatgcatacatacaaactcacatacacatatacatacggtggtagtagagttgggttttgggggttttttgttttgttttgttttgtttttttgttttgaaagatttatttattttatgtatatgagtgtactgttgctgtcttcagacacaccagaagagggcatcagatcctgttacagatggttgtgagccaccatgtggttgctgggaattgaactaaggacctctggaagagcagtcagtgctcttacccacagagccatctctccagcccgttttgttttgttttgttttgttttgttttgttttgttttgttttgagacagggccccatgtagcctaggctaaactaaaattcactatgaagctgactatgatttttgaactgtgttttgtttttcaagacagggtttctctctgtggtgttagccatcctagaatgcgcgctctctctctctctccagaccaggctggccttgaactcagagactttgcctgcccaccaccaggcttatttcgtcctgcctctacgtcctgagtgctggaatccaggcatgtgccaccacacctgagttaccatgttccttttggttgttgtcagttttgagacaggatctagctgtaaatagcccaagctggccttgaacccacagctctcatgctgcagaatgcttggatgcagaggtgtgggccaatcctagcttagcttcatgttttcctacctggattgcccaggggagctggggaaagcctcaatctccacccatcccagcagcctggagttcgttcattcattcattcattcattcattcattcattcattcgaacccttaactgaaatggcccagtactaactttaaatgtaaatagattaactcagcaagacctgtctcaaaaaggaagaaaggcactgggtgtggtggccacacctataatcccagcacctgtgaggcagaggcaggtggatccctgtgagtttcagcccagcctggtctacagggtagagctcactacagaacccttctatagcgtgcacaaggctctctgcttttgactcctgctctgcgtgggcaaacgcagtaaagcatcctcttttgttgggcaaatatttacggagtgcttcatctgttaaaagacgctgttttagactctaatgagagtcaataagaatcagatctagtgggggcggaacacggagggggggaccagggagagagacgcgaaggtgctggtgtggaaggtgacagggtcgagaggggaggagctgggagaggccaccgtgattgagtaacagcctggtagggggaagggcgggaaaagatctgttagctaggccaccctggagcataaacaggacagtcaccctgtagatgtgttggctctccaacaaagccagctggggtgggctggagatcgggggcttcctccagctgcctgggccacccagggcacggtctatgcttccttctgggaagaacactgtgtgagtcactggctcaggctcaggttcaggctcaggctcagcctcttccttaccagttctttaagtcctggtctcatgttagtttcctcccattttacagaagagaaaactgaggaccagaggcatacagtaagctgtataggggccacacagtcagccaatggcagagcagaagtttaaagttcttgtgtagggtatcttttgtgtgcctgcttagcatcacatggcctcttagggtctggaggtggactggcctccactggctgcgagtccttatatctgttcccttccatcctagggccttagtttcttatctgggaaacagcatgtttggtcagagtcaggacccactgtttgggtaacagctccctaaaggctgtgtggacaaccctcaattcaccctcacaatgactctgtttaacagagaaggaaactgaggcacagagaagtggtgttcatggccttggggtctcccaggggcttgaggtcagctcattggattgtcggatggtaaatcctcagactggggaaatcagagacaaggactctagggtcagggtggggacagcagggacacccggctgaactgggcgggagcaaatagaacccaggatgtgggacccagcccctgccttctggatagaggcctggttcgtgagtggcaggaccatgaaatccctgtgtctctcctcaggcttttgcctgggccctgcccaaacaaacaggaaatgccaagtggtcccccacccccaccagggccgtgggaagactctggaagaaggttttgagtcagatctcctgctctgggtcagcttctgcgggagaccgggcccaggaggctgcctgacctcaggcagggcctgcccttcctggcctctgtctccccaccacttgtcgaaacactggcaaacaagctctgctacctcgggctgtgtgacctgggcagcggctgtggccctctaagcccagccttctctttcatgtttttcgttcactgagctgtttgtgaccttagtgaagaaggggagggcaaggccgggctctgagaagacagtggacaggggacaggggatgcctgagtgttaaaaagcttgctcagcatgtaaggggctctggattcacctcagcattcctccccctccctccttcccccctacagccccctccctccttcccccctacagccccctccctccttcccccagggcacacacacaaattccaggacctctacacatggtttccaattcttccctgggccacgcttctcctcctcctatgcctcagtttcccctcagtaaaggaggccaacctgcaaccgatttattcctgggtatcactggcagttccgggcatggctgatacaggatgggggagggtggcatggtgggaagacacagacttggagcggtctgggtgcggggagatagaaagctcacctcccacacatgatgaattcaaggccaacctgggcagcctgagaccctgtctcaaaacaaacaaccagacctcctgcccacaaccagggaaaccccttaggggttctaaaagtgaagcagggcctgtccccagtcaccagacacacagagagagacacacattaccaaactgtgtaatgggctgtggccacactgtactgagggaaatgcagtacccagctcatacccagaggacagacatccagggccatggctctgtcaccagacatctattgtctggtcctggggacttgggtccctctcacaatgggtgcctgtgcagaaccccaaggctcttcttttaccatccaatacttacagtagagcctggcacacagtaggtactccatgccctgaccctgctgagaccctagactccgtagctttcctccagttaggttctggtcacccctgctcctttgggtggcagcaccccctgccctgagctccaggttctgtcctgcctgccacacgtcaggagctggggacagagctgaggacttggttgcactgggcctagagctttgggaattctggctctgtggatcaggtaggagccagagggggctctgagcagaagagaactgagatctgactcagcttcaccatccagtgcacactggagggcacagagggagggccaggaggatgggggagggaaagtgtgatatcccagctgtcaggagggtacctgggaggtggccacttcccactctcctggggtttcggtgctggggactgaacctagggcctcaagcaagcaccccaccaccaattacagccacagtcaccccttttccttcttcccttccttccttccttccctccctccctccctccctccctctctccttccctccttccctccttccctccttccttccttccttccttccttccttccttccttccttccttccttccttccttcctttctctttaggttttattttattttgtctgtttttttccagacagagtttctctgtgtagccctggctattctggaacttgctctgtagaccaggctggccttgaactcacagaggtcctcctgcctctgccttcttagtgctaggattaaaggtatgcgccaccactacgtggcttaggttttattttgaaatgaggccttccccacccctctcctactttctttcttattttgtttttgttgttattttctgagacagaatctatgtagccgcagcctggaactcactctgtagaccaggctggccttgaactcagaggtccatctgcctctgtctctgcctcctgggtgctgagatgaatgaaaagcactcaccaccatggctggccctctccttcatttttggagacaaaaacttgctagtccaactgacctggtactgtgtagtccatgctggactcaaacctttggcaatcctcctgcctctgcctccagagtactgggaatatacacagatgctaccatacctggcttagaggttcagcctcccccagcagctgggattacaggcctgtgctcacaacatagtcctcggctctccccattctgtctaactgcaaagaagaggggccccaagttctggtgagatgccccagggttcccagaatccccaggctgaggcacagacacaccagagtcaggcctggagggatgagaaaaaaggtcttcccatcaggccctgcctgttgtgggtaccacacccctaagcctcacggggaggacacagcctttccatgtagtgagggcccagtcagtgctgttcccaacaaataatgaactgtaattataaatcatactgagaaaaattctacagcctgaggcctctaaagagggacgatggctcccccatcttccagctgaggacaggggtgcgggggaggggtgccacggactgaggtcacaaggtaatgggactgtgttctgttccagaaacaggctgttcaggagctgcaggtatccagatttgtaagacaagtcgggaaacagaggcccagggacctgcccttacacatatagagccccctgacagaaaaaggctttcctgggtcccccttgcatcccccccacaagccgggggttctgggcccctgcaggaagcagcctggctgggacaggcccactgctttgatcagctttatgagacttggctgtttatggagagcccggcccccaccctgccacccggggctgtgtcctgtcagtgccactcagagatattagctgtccccggagagtttgctgctgggcctcagccccatttcctctggcttggcccttggccttggctcctgggaacagagcagcccctcaggctggagtgggggtgggtcctgaaactgagagcttacgaccatttctgtcttggctggcccttgttgcccaggctggccctgacctgggaccaccaccattgtccccctccccttggtaaacggtgctctattctcctcctggagcagagtagccctccccaccccatctgatgaccatcaatctggatcactctttctcttcacccccaggctggaaggctcgcaggacctccctccttcctcagtgcagagacctcatcccccagtaccggccccagctcctagctgacacacagtagaacaaatgcttcttgagtgaaagataaaaatctttgtctgggtgtgatgggacaagcctgtgaacccagcacttaggaggctgaggcaggagaatcagaagttcaagatgctctcagaacatcgtgagttccaggccagcctagagaggctgcgtgagacactgtttcatccctccctccagagagagaggggagtggagatcaagtcttccctggagacagacctgtaggaagccaaaagcttgatcatacccaccccatcccccccagcagcatccctgtgtcaggaaaacccacggggtgtggcctctgctcatgcactaggcctacctgcagctccctcatggatgagggaacaggaggtggaggtgactggttgttcagggggccagacttccctaggccctgccccgagtcccactccccacctgcagcccaacccccagcttacacctgtgatggctaccggggcaggtgtctgaccagctgggccggttctggggctcacacatgagggcactttcctaggggtgatgctggaagatgcttgtagacacctgcccggcacctgccctgcatctgccccgcctcccctccccccagctgagaccatcaggccctgtggtctcctcccaaggtactgcccacaagccctccacacccacaaggcacaatggctggttgttctcagagacactcacaccctcatctcctccttgagtgttttctgtgacctggggcaggtgtaatgatagtttggggaggacacacaggtgggagaggcctgcctgctccctgagaatcccgccagccccagctccccatcagccagccgtctagaacccttcaattctgggggtccgtgagtgtgtgtgtgtgtgcgagtgtgtgtgtgagagagtgtgtatgtgtatatgtaagtgtgtatgtgtgtgtgtgcacagtgaatctctgattttggcagtggaagttcagaaacagagatcagggcacctgcccaagttcacacagcaagcagaatttgaacccaatgtctttccagctccttcaccttgtgtccccatagggagttgatgtcactttagcagttttgctgaagcctgctgtatactggcatttagccaggtccaagtgcattagataggaaggggtttgtggagccttgtgcaaggtgtggggagaaggcatgactaaggtttgtctgatgttacaaccggggacacaggatctaccagcaaagtaacagtgatgccacctctggtacatctcagatgaggccaggccatggagggcagggagggcacaggagtaggtggtctactgtgaggaataagttccaagctgagagagatgaacagacaggagaggagaaagggaggctgaggggcggcttctgcaggtgagcctctgtgtcccccatctgcatgtgagtgacctctaggcttcccatctcatgggatgcctggtactcagaaggtgtggcaggggtcctcaggctggcctcagtagaccaccccagaggtccaggcgtgaacatcaaccctggagcttgcccaggaagcctgaaggattctagggtgatggctgctttgggaccctgaagggtagatggagggccaggggcatcaccttagaagcttcagcctcaagttggctgctgtccactcagatctgggagaattcagtgtcccaggatccaaaccccatcccatgcatgagaacttgggggttgagagaaagcccagggtcacacagctagacggaccagaactggacatagttcagtcaccttaaatctcactgtccccaaacaaccattaggatggataccatagttatcctgcagtgcacccattgcacagatgagtaagctggggcttggagagaagcaacttctcagggtgtttgtaatttatacaaatattcgctgatcacctactgtatgccaggtaaaaatagacacggagacaaaaccaagttagacagcttatgtggactccgcccccagtccatggaacagctgttattcctgatgacacagggtgagagagtcaggaaaatcagaagttcaaggctggtaactttgtaggactctgtctcaaaataaaaaagtaagaacgggaggggggtatagcttagtgataaagtgctcagtctctgagcttgatcagtggtgatgcatgcatgactctaatcccagcacttgggaggcaggggcaggggcagggcaggggcaggggcaggggcaggggcaggggcaggggcaggggcaggggcaggggcaggggcagaggcaggcgaacatctgagttcaagtccagcctgggcttcagatggaattccaggacatctcacaatttaattaattagtatatcaaacaagggctagggagatggcttggtggctcgagtgtctacatggcaagcatgcggaccagagttcaaacccccagcacctacttaaggagggcaagctggcccgggggctggcacagacaaggattcccagagcaggctggccaggtaacaaggcaaaggtgaactctgggttcagatggagagaagcctgcttcaatatataagtggaagtgaccgaggaagagacctagtgtcaacctctggcctccacatac

SEQ ID NO: 748 - DNA, 2555 bp, Mus musculus
tccccacaggcaagcgcttccaggagtggtgttccgtgatcctctgtttcagtctcatcgcccacaacttggtccacctcctgctgctggcccgctgggagcacacacccctcgtgatcctgggtgtcgttgcaggggctctcgtcgctgacttcctgtccggcctggtacattggggtgctgatacatggggttctgtggacctgcccattgtcgggaaggccttcatccggccattccgggagcaccacattgaccccacagccatcacaaggcatgacttcatcgagaccaatggggacaactgcctggtcacgctgctgccactgctaaacatggcctacaagttccggacccagagcccagagaccctggagcagctgtacccttgggaatgcttcgtcttctgtctgaccatctttggcaccttcaccaaccagatccacaagtggtcacacacatacttagggctgccatactgggtcaccgtcctgcaggactggcacgtgatcctaccacggaaacaccatcgcatccaccacgtggcgccccacgaaacatacttctgtatcaccacaggctggctcaactaccccctagaggttataggcttctggcggcgcctggaggatctcatccaaggcctgacgggtgagaagccgagagcggacgacatgaaatgggcacagaagatcaacgggcgtcagcggcaccgtttgcggctgcgcctacacctgcgcctgcgcactagcgcccggagaaaaactcaagggggggtgaagaaggggccggccttcgagcgacagcgacgcaagatggcagccaccacaggctcgggagtaaaagtccctcgaaatttccgactgttggaagagctggaagaaggacagaaaggagtaggcgacggcacagttagctggggtctggaggacgacgaggacatgacacttacaagatggacaggcatgataattggacctccacgaacaatctatgaaaaccgaatatacagccttaagatagagtgtgggcctaagtacccagaggcacccccgtctgtaagattcgtaacaagagtcaatatgagcggcgtgagcagttcgaatggagtggtggatccgagagccacggcagtgctggcaaagtggcagaactcccacagcatcaaagtcatcctgcaggaactgcggcgcctgatgatgtcaaaagagaacatgaagctgccacagccgccggaaggacagtgttacagcaattagtcaccaaggccccggcctcccctccccatccaacccaagtcttcattttccacagtagtgaattttctagatacatctgtagacctcaaagtaccggagaggaagctccactcagccttcatcctgagacactgttctgatactaacttctcgtccatttgaaatacctaagttgtgctgtgtaacatcaactgttgagtgtaaccgctgtctgcctggttgaacttctgggatcaagaaggtgttgaaatcggtttcctgtgggagcggtgggcacagctaacgcaactgtgaacagacacgtcacacaatcacctgctgctggcccttggcctgggtctgcctttgcccgccccgccctccgccacagctgtgtggtggcccttagaatagatgggaaggcttcaggtagcagttgtgggactgactactgctgggcttggggcgctttggctgcacccctgcttcttaagtcttaagtgatgccccatccaagccatggtccccactcctccactcccacccttggccaaagcttagattgtaaccctcccctccctctgaaattggccgcgggtgaggaattcagggcttcccgtgtccccacctttatcaaggggtgctgcttcccctcctcaactcccctgttgcccatcaccacccaacacttgctgtggccagaagccatcagatgaggttggaattgcctggcctccctcacttagctccggaccacactcacctgccaccagcctgggaagggagcgccgggtcctcagccctgctgccaccgtcagccctcgagctttgtgctcaggtctaaggtaaacagcagtcacagggcgactcggaccggccagcgctcagggtccttggtgaaaagatgcctagagaaaggccatgcggagtcctcagtgcacacggttctgagttggttccttttcccatcattgctttgcttttacacattgaagaggtttgaacagggctctcgtcaccctggccacccatcgggtctgatgtggagcctgacagctggagcacgaggccctgaccctgcagactcaggtttcagtgttgctcctcagaccctctgcagggaccaggaggagctctgtgtccccatgtttgcagatcatctgcagatccgtgggcctggcctcctggctcactgccacgctccccactctgttcaggaccactaaatgttgaaatgtggatgcataccgaaataaaggcaatccgttgtcagaatagatggcacctgtcctcttttttttttttttttttttttcc

SEQ ID NO: 749 - protein, 414 aa, Mus musculus
PTGKRFQEWCSVILCFSLIAHNLVHLLLLARWEHTPLVILGVVAGALVADFLSGLVHWGADTWGSVDLPIVGKAFIRPFREHHIDPTAITRHDFIETNGDNCLVTLLPLLNMAYKFRTQSPETLEQLYPWECFVFCLTIFGTFTNQIHKWSHTYLGLPYWVTVLQDWHVILPRKHHRIHHVAFTYFCITTGWLNYPLEVIGFWRRLEDLIQGLTGEKPRADDMKWAQKINGRQRHRLRLRLHLRLRTSARRKTQGGVKKGPAFERQRRKMAATTGSGVKVPRNFRLLEELEEGQKGVGDGTVSWGLEDDEDMTLTRWTGMIIGPPRTIYENRIYSLKIECGPKYPEAPPSVRFVTRVNMSGVSSSNGVVDPRATAVLAKWQNSHSIKVILQELRRLMMSKENMKLPQPPEGQCN

SEQ ID NO: 750 - DNA, 68495 bp, Homo sapiens
ccttatctcctaggctggctgagcacccccaggggctgagtctcccgtgtttccaggctggggaggaggaagagccagcaagggaggctgggatggcgctgccagggagatggggggagaaccagggaggtcgggggagaaccagggagggcttgcaggggccaagaggagaatgtgtttccaggagtcttgggggtcgactgggaacagccaccgagtggaccagcaaggtggccagtaaagggacctttggatttagccacgtggaggtcatcagccactgtgacacgcacatcgttgtcgtgagtgagtgggtgaacaagtgaaggccgtaggagccctgagcttttgttccacgtggagaagggggaggaagtgtttgggttgtgagttggcccttaaaggagcagagtccttcgtggaccttgggagaagccttccgggcagagggcacagtgagtccagaggtcagggatgaggtcagagaagtcccaggctcgggtcgtggcccgtcctgtggctggaagtggagtctggatctgactgagctggaaggcggtagagacaggactgggacccaggaccgaaacccatggatttgccctcagtgcattcacttggcccctcagccacgccttccatctccacgccaggcctttgaggtgggcagggaggggtgaggaagtcccagctgggtgacctctggggaaatggaagcccgcacgggcccagcgactacctcaagttcccccgtgagtcagggtagcctggggtgagccgtctcccatccctctccttgtcccagtgttctgcggggaagggtggtaaccaagccgaagctgcccccagggggagccggctgccagctgccaccaccccaaagctgggacaaagaggcttctgtgtgcctgtctgccacccctgcccccattaaagcagcctcagacagcagcctggagtcactgccaccggcagaggccgcaagatcacggagccagggggagggctcctggtctcctaagatgattcctgacttctgtccaaagcagacatccctccctgctgggcagcgtgcaggcgccaggccttgaccattggacagatggcaagactgaggctcagcagagagctcacaggagctgcgttggggggatgcttgctgtgtcgcgggacccaccgggccctttacccagcagcccattttattaacttctcatagttaagggaggtaaatgtccccattctccatacctgggtgcgaagtctccctaaccctaaccctaaggttgcatcatcctgaatgactctagcgagtctctggctactcaccagcagccctgccttgcccctgccaccgtgtgaccttggggagttcttaccctcctctggaaggtcaggatggggtggggcctgttactgtggacatgaagtgagattgtccactttttgaaaaacagactttattttttagaacaagttttcaacttacagaaggatggggcagatagtacagagagtccccatatgcctggggcacgcagtttcctccattattcacatcctaaatcttacattagcggggcacatttgttacagtgtgtgccagtgttgatacattatcatgagctggagtccatggcttattcagattgccttagttcttccctaatgtccttcttctgttcctggatcccatccagggtatcacatggcctttagttgtcatgtccctttaggctcctcttgtccagttttttttgtttgtttgttttttgagacggagtctcactcttgccaggctggagtgcagtggcgcaatctcggcccactgcaacctccgcctcccaggttcaagcgattcttctgcctcagcctcccgagtagctgggactacaagcgcgcgccagcacgcccggctaatttttgcgtttttagtagagatggaatttcaccatgttggccaggatggtctcaatctccggaccttgtgatccaccctcctcggccttctaaagtgctgggattataggagtgagccaccgcgcctggctgaccttgacggttttgaggagtgctagtcaggtgtgttgtaggctgcccctctgttggtatctatctgatgtttttctcatgattagactggggttacgggttatgaggaggaagagttcagaggtgaagtgccattttcatcacatcatagcaaaagtacagactgtcaacatgacttatcactgtgatgactctgatcccatgactaaggtagcagatgtcagagttctccacagttaagttaccctcggctgggtgcggtggctcacgcctgtcatcccagcactttgggaggcactttaggatttgtgagtgggtcgcttgagctcaggagttcactggtcagcctggacaacatggtgagacccttgtctctacagctgtagtcccagctcctcacgagtctgaggtgggagggtcgcttgagcatgggagctcaaggctgtagtgagctgtgaatggcaccgccacactccagtctgggccacagtgggagagtctgtctcaaaaaaacaacaaacaaaagttactctgctccccccaccccgcctttttttttgagatgaagtcttcctctgtcacccaggctggagtgcagtgactcgatcacgactcactggagcctcaacctcccaggctcaagcagtcctcccacttcagcctccagtaggaccacaggcacatgccaccacacctggcgaattttgttattttatatacagacagggtttcgctgtgttgcccaggctggtactgaactccaggactcaagcaatcctcccaccgtggcctcccaaagtgctgggattataggcgtgagccaatgcgcccagccttcctcccctctttttttttttttttttttttttgaggcagagtctcactctgtcacccaggctggagtgtagtggcacgatcttggctcactgctacctcttcctcccaggttcaagtgattctcctgcctcagcctcccaagtagttgagattacaggcctacaccaccatggtcggctaatttttgaatttttagtagagatggggtttcaccatgttggccatgctggtctcgaactcctgaactcaagtgatccatctgccttggcctctcaaagtgctgggattccaggtgtgagccctgcgcccagcctccgtcctcattcatactgtgctctttttggaaggaggtctctgtacacagcccacacttaaggaatgggaagttatgctcccagtgatgcacttcttaacacttcacaaagccccagtacacagtgttaacccaactactgttttctcatctgtataatttttattatgctcatctttctcattatctgtgaggattaagtgtttagaatgattaaggagataagattcggcctaagcgaggccttgatgccattcagggattaaagaagataaaacatttaaggcgttggcacggggcctggtagttataagtgctcaataaatatcaggtttttttttaaaaaaaaagtagttgacatcttaacccaaagtaaatgagggtggatgtctacacatagacttgtacaccaatattcactgcagcagattcaaaacagccccagactggaaacagcccaaatggccaaccatggccaggtggataaatgcatcattgtacatccagatggtgggatactcagccctaaaaatggtgaaccactgctgatccgcacgactgcatggcccacgctagaaacattacactagtaaaagaagccaggctccaaagagcacctaccatctgaatccgtttaaataaagttctagaataggcaaaatcagtctctgctgataggaggcagctctatggttgcatggaacagggtcagaagggagcttagtgggacaggggagccagctgtggggctggaaatgctttttttttttttttttttttttttttgagatggagttttgctcttgttgcccaggctggagtgcaatggcgtgatctcagctcaccgcaacctctaccttctgggttcaagtgattctcctgcctcagcctcccgagtaactgggattacaggcatgcgccaccacacctggctaattttgtatttttagtagagacagggtttctccatgttggtcaggctggtctcaaactcctgacctcaggcgatccgcttgcctcggcctcccagagtgctagaattacagatgtgagccaccgtgcccggcctggaaatgctttctatcaggggtcagcacactatggcctgaggaccaaaaacacttgtaaacaggtattctgggaatgctgttgatgtctgccttcacactacagctgcagagttgaggagctgcagtggagactgccttggcctgcaaagcccaaaatatttactgtccatttatgtatttatttatttctgagatggagtctccatctgttgcccaggctggagtgcagtggcacgagctctgctcactgtagcctctgcctcccaggttcaagcgattctcctgcctcagcctcctgagtagctgggactacaggtccgcaccaccacacccagctgatttttttgtgtttttagtaaagacggggtttcaccatgttggccagactggtatcaaactcctgacctccagtggtccgcctgcctcagcctcccaaagtgctgggattacaggtgtgagccaccgtgcccggcctgcctgaccctttaaagaaagtttgccaacctcttatattctgtgtaggtatagaatctctatcttaacctgggggttggtcagacaggtgtgtctacgcataaaaaggctgtgagctgtgtaaggcctatggcctttactgtttgtaggttatattcaattataacataaaatgagccaaggtttagagaggggaaggggcttgtccccatctcatcaggagcccagaactcggggaacaaggaacctggactctgaatcccttgcgaggccccacccttatgacatccagccacttctcctctgtagctatttctttcatgaaggcagcattcattcattcatttatttttgagacagagttttgctcttgttacctagcctggagtgcaatggcgaaatctcggctcaccgcaacctccgcctcccaggttcaagccattctcctgcctcagcctcccgagtagctgggattacaggtgcccaccaccatccctggctaattttttgtgttttttgtagagacaaggtttcaccatgttggccaggctagtcttaaactcctgacctcaggtgatctgcccaccttggcatcccaaagtgctgggaggagtgcaatggtgccagctctgcagctctgcactgtgctccagcccagcctgaaggcagcatttagagatgtcattagtccgagctatggggacaggacctcgagatacctcagttgacctcattaagcaagtaaagatgctgaggcctagagtaggcacagtgtcacacagcaatatggtagcaagagctgaggcccccaacacttgatctagttctgtcatagctcttggccacatggccttttgtccctgctggtagacagaggcagtgcatacacagcatcccaaagtatgcagtaggagctctaataatgccatggacctgctgcagtgcagtttaaggacacaaaagggtgctggttttggaggcaggtcgacaggcctcttcccatcccacagctgccatttccaggccacttgactgggaggcagtggttcaacttctccaggcctctttcttcatccaagaagggatgacaaatgaggccatctcaggggatgacaagtgccatgaaagaaatgaagcagggagatgtgagcgagagcaactgcccggaaggatggctttagccagaagggttggctgaccttcgctctgagcaagaaggccgaggaggagccagcacaggggatctggagtgggggtggggtgctgtgtagaggaacagaaaatccagaagcccttctcgggcttccacctccctcgccttctacatccccgcccctgcccctggcctgggtccaccctccccatcacaaatgggcaagactgcccagaccagagcagggccactgggtgcacaggctctggggccttgctgagtcccaacccctttacctcagcccagccactgtgcagtgacacccttcagcctgtccttaggcgtctgtgtgccaggaggtgtagctgccacctgtccccacctgcccttccgcccttatccccaggaacttgcaggtgcctgcatgaagctgtgctgcccccacccccaccacccctcccgtgcttggcacctgtgatggataccacagggcctctggaaagtcggcatccagtggctgcccctcaccccaggcctggacgtcaggattgcacattcacagtgacttgcgtgcttacttttgtcccttcaaccacaagtctcactcacccaggaggcatccaggggcttttctgcagtctccacagtacccccaagaccctggtcccctgtcaccaaggggttgagggcaccagcagaactcagaatcttggacaaccagttgacacagacaaaccgagtctgggaaggggtttgtctgaagccccatgagccagggggccacacgtgtcatcactcacagctgcctttgtcctctgctggactttacagcgtttctccatagacatgtgttcagtgtctgacatgtttctgtccctagagcttatcacacaggaggcctttgtggagtgtggcttagttgattgactcaatgacagcaacagtaatatggcctgagggcttactatgtgccaaacactgcacttagtagtgctctactgagttctgaataggtgccaagagctgggatgcagccacaagccagactaaagccctggccatggtggagccaacctccttgttgggggagaaaataaaccagcacaagagcagtcagaggtgccgagtgcttggagaacaatatacataggagatcggaaatgctggaagatgaggtggttgcaattttccatcaggtgtccagggaggacatttgagtaaacatctgaagaggtgagggagtgagctgtgttgcatcttaggaaagaatgttccaggcagagggaacagcaaatgcaaagacccagaggcatgcaagggaaaggagataaagtaggcctgggctgcagcgaaagaggagagtgatgggaggcagcaggggtggaagcctcagtttccacctctataaagtgggaataaaaaagctaccaacttaaaacaaatggtgagaattcatcaagatctagcctgtaaagcatttgtgcttggcattgagaaagtgctcgtaaatgttagcatcattcccttttatttatttattttttcaagacagagtctcactctgttggccaggcaggagtgcagtgcatgatctcgactcactgcaaccaccatctcccgggctcaagcaattctcctgcttcagcctcctgagtagctgggattataggtgtgtgccaccacacccggctaatttttgtatttttagtacagatggggtttcaccatgttggccaggctagtctcgaactcctgacctcaggtgatccgcccacctcggcctcccaaagtgctgggattacaggtgtgagccacggcgcccagtcgcatcattcccattttacaagaggaaactgggcacagagaggctaaataacatgtgcagcgtcacagctagtgagtgccagcactggaatttgagtccaaatctactgaaccctcaagtgagtgaatggtgttggagtctgagggaaccctgctcaagttccgaacagattgagaacagaaacaaggaaaaggctgctggagaccaaatgatcatgtttattgctgataaaagctggaggggtgggggtggagcagcgaggcttctatctgcaggtaaggtactttctttttttttttttgagacggagtctcactctgtcacccacgctggagtgcagtggtgtgatctcagctcactgcaacctccgcctcccgagttcaagtgattctcctgcctcagcttcccgagtagttgagactacaggcgcatgccaccacacctggctaatttttgtgattttagtagagacggggtttcaccatattggtcaggctattctcgaactcctgacctcaagtgatccgcctgcctcagcctcccaaagtgctgggattacaaagcatgagccaccgcacctggccgaggtactttctttctaacaccaaacccagaaggacattgctgcagttccaggcagcactggtgcagagcaggctttccttatatggggcagagagaagggcacagcctgctcctaatagggaaaggttgagctgatctgagcatgcccagtttatgctctccagactctccaagcacatgagtcttggcatctccccgagcacagcaagtaacaggcaggaggagtgttaagcctgaggctccatcttcagggaagaaaacatcccaactagagaagaagggacaccttcccctcctaacaaatgaatgagcgggcaagtgagtaaatgaatgagtgattctgattgggggggtgcagggatgtcccttcactcaccctcttgtccacagttgcaggggctctcattgctgacttcttgtctggcctggtacactggggtgctgacacatggggctctgtggagctgcccattgtggggaaggtgagtatgttgacctaaccatgtcctcaagaaggaggttgggctgtatggccttgagtgagtcccctttcttctctaagactgtttccctatctgaaagatgggaaccatcattgcagcctgtccctcacccctgtgctgcaagactagaacaggagtcccttgggattttggaagcaaaagcatcaggcttgggatggtccaagagtttagatatgtgcctgcctcatcagaacccctgaatttgggggtgtcttgcttttccattgtctcccctgctgcttcttgctgttttaactgcattttatcctgtattagtcacttttttggttttgacagaaaatctaaactggcttaggcaaacaagggtactgattcatgtaactgaagatttcagggttagagccaaattaaggaatggctgcatccagtaggaccgacagaccacattcttcaggcccagtcttcttccatctctatctctactttcccctcataaggtggccagtgtgctttctcaccgcccagagatccatccttccagctcccaagaaaagagaactgtccttctccttccaggagaacagcatttctccttccctgtagtttccgccaactgaagtcccacggctcactcccattggcccagattgggtcacgtgctgggccctcaggcagtcactggctagagggaggagatgctatgattggccaggcctggtcacgtgttctttctcagcccggggcgaggtcagccttgtcagaagagcctggactaaggaggggaggctgttaccccagcaggtgcagggggtccagagggtcccaccttttacttagagggacctcctcaactgccttggggtggggaggaagggcggaggttgtctccaagcccccttacagcacaggtagggagactgaggcccagaggcagacagtgccaacccaaagcccttccagggtcatttcggctcatctccccaaaggctggatggggtctgtgtctggcagtgggccaggtgggaatgttcaagcatcccgggtggaggaaacttaggatcaaaggcgggaggtgagcccagggtgaatgtgtttagggggctgtggagagcagctgaccaccttaggctgactgctggggctgtgtccccctcaactccaggctttcatccgacccttccgggagcaccacattgacccaacagctatcacacggcacgacttcatcgagaccaacggggacaactgcctggtgacactgctgccgctgctaaacatggcctacaagttccgcacccacagccctggtgagacacccagctagtggtgggctgggagggggccttgggggcagaggccgacccccaggagccttctggggcttatgtgtttggctccttatggtattttaaaagagttttcattcattgtcttcatgtaaaatcaggaaacctgacatgaagatggaggtttccagcttctcttgcacaatctgctctggcccccctgggtccatgttcccacctggcctcactgggtgggagctgagctgcagccactgcctttgacaggacgcgtctttccagtttaccaccgtccccactattccttgcttccctgcacccaacccaccttgttcatttgtgttacctgcctggcagggcttctggggttttgctaccgtggcctagtggaaaatgtctaggctgtgaaaacagggcctgcctatttttagagggactggtcccaaagtaagtgatttcaccactctgagcctcagttgccttatctgtcaggtggaggtaggttggggcccggtcctgttccagcaccttaacacccatttgttcttcaggcagcctccggtgggtagaggtggtgaggacgtgtagtgtagtgggtgctatggcaccctgcccatccccttccctgggggtgcacccagcccctgcttctgtgagtggtggctgctgacagctcccagcttctccagggatggaggggaggtcccacctgtctccttgggataaggctggagccagtgactgaaacgcctccgacgctagtccctttgcctctgagtgggtctaattctaaagagccgttaacacctcagagctccttgcaggaacagactgagacaggacgccacccaccccatctttgctctgctcttcccctgccgtgtcttgcttccctccctcccttcgaggttttttcctgaagaggctcccttgataaatcacatgcacaagaacctgtttcaggctccgcttctagggaacctgggtgaaggcatcattcccattttcctgatggggaaattaagcttcttagaggcagagtcaccgatccagcccatactgccaagaaatgtcggcagagatcggaacccagctccagctgactccggtctacattcccagccattgccatgcttatgccattatcctattacaccattacgcctgcttcctgagcaggaggaaagcctgaagcccagggcagcacctgagcttgcctgcggccctgcagggggtggaagagaatcctgggtgcttgcccagctcaggagccgcccaggagcaggtggtgagggccatttggggtgggttccccgtcccgagtgacagctgtgccggccccccctctccccaacctgcagaagccctggagcagctatacccctgggagtgcttcgtcttctgcctgatcatcttcggcaccttcaccaaccagatccacaagtggtcgcacacgtactttgggctgccacgctgggtcaccctcctgcaggactggcatgtcatcctgccacgtaaacaccatcgcatccaccacgtctcaccccacgagacctacttctgcatcaccacaggtgcggccaccagtggcgtggaatgggctttccccaccccagccactgcaccatcttcgaggtcaggagggcagagatcacagcaggaggtcacacagtccttgccctctgggaacagtctctcaggtcatgcatttattgagcacctactgtgtgccaggcactattctaggtgctgaggacacagtaaatgagactgacaaagccctctccctcgacttcatggcgttgtgattccagccacccatcatcccgtatttattgagcacctaccacatgccatggtgctttgggcgtaggctcctgcagcaaacaaaatagcatgaatcagctgggcgcagtggctcatgcctggaatcccagcactttgggaggccaaggcgggtggatcacttgaggtcaggagttggagaccagcctggccaacatggtgaaaccccatctctactaaaaatacgaaaaaaaattaattgggcttggtggcaggcacctgtaatcccagctactcgggaggctgaggcaagagaattgcttgaacctgggaggtggaggttgcagtaagctgaaatcgcaccactgcactccagcctaggtgacagagactgtctcaaaaaaaaaaaaaaaaaaaaaaccagaaaacacggatccttgcccttgtggcactcaccatctagtgagggagctggaacgaatgaataaaatgtgtagcgtggctaatggtgctaactgctatggaggaaaataaagcaggggtgggagaaggaagtgggggctttgcctcttaaatcgggtggtcagggaaggtgacacttgaacaaagaccccgaggagctgagggacaaagccgtgcagacctctgtgggaggcactctaggcagcaggaacagtaggtgcgaaggccctgaggctggcctttgcttgcttggtgtgtttccggaatggcaaagaggctcctgactggagttgaggcagagcaatggaagagggagaagcgggcagagcagtggaagagggaggagagaagggggcagagcaactgaagagggaggagagaagtgtgggagggccctgaagatagatgagcacagattagagcaaaggtaacaggaagcagcaggccagaggcaggaacatgcccagtgcagtggaggaagggaaaggaggcccacgtgccatgctcagttagcagccagtgcgaaagaggtgaggtgaactgggagtttctctggagccagctgggctgctttcaaggttaagtgtatcaggtgctgtcaagtctaactcaggcctaactctcagcttctccacatgtgcctttaggcaactcacaaacctccctggggaccgcttttctccttacaaaatagggctgcagccgcctccttcatatatcaccttcttagggccatagtgggaatggcaaatgcggtgtttggcatatagtaggtacttgataaattacagctactatttttttttaggtctttctggaaacagaactgagaaccacaaaaaaacattctttttcatgtcctcaatttgtgctccttggaaggcaggtggagggattagaattcaggctatttaggagatgggttaactacttaggcagggctgagttccaatcctggtttggccacctgctaattgggaaactcttctctaagcctcagtgtgctcatgtggaaaatgggactgatattagtatctacctcatggtgagctggaaggctgtaagattgtgagcaatatttattcagcacctactctgcgcctggctgtattctaagcactgaggatcagcagtgaaagaacatggtgttttgcattttggggataacgttccagttggggattggggggtgaacaaacacagaacaggaaaatagagaattaacgaagatggttacaggttatcataaaggctataaagaaatgaaagagggtggcctgtcatggtggttcacgcgtgtaatcccagcactttaggaagccaaggcgagaggattgcttgagcccaggagttcaagaccagcctatataagacaagaccccatctgcattaaaaaaattgtaaatagagccaggctcagtggttcatgcctgtaatcccagcagtttgggaggccgaggcgggtggatcacgaggtcaagagatcgagaccatcctggccaacatggtgaaacctagtctctactaaaaatacaaaacttagctgggcatggtggtgtgcacctgtagtctcagctactcggaggctgaggcaggagagtcacttgaacccgggaggtggaggttgcagtgagccgagatcgccccactgcactccagcctggccacagagtgagactctgtctcaaataaatagatagataaatgatagatagatagatagatagatagatagatagataaagggtaatgtgagaaacctggggtgctgcttaagtggatgatcagggaaggcttcctggcagaggtagcatttgagctgagtgataaggccaccacagtgcctggtatatagtaagtgctcaaatataagtaagtgcctggtatatagtaagaaagtagaggaatatgggggttggaggcctgagtggccccaggcccattggtgggaggcccccacttccagttccttggccggtccctgtgtcctatcctgtactgactcactcctcattgggcccctccagcccagtgaaggtcagctctcttccaatgtccccttgactactctctcccattcaaactcccgctgccatttctactgcaggctggctcaactaccctctggagaagataggcttctggcgacgcctggaggacctcatccagggcctgacgggcgagaagcctcgggcagatgacatgaaatgggcccagaagatcaaataacttctccgagcctgctacctggttgccaaccttccctagcccccaaaccgaagccatctgccaaattccagcctctttgagctggcccctccagatggagaggacatctcctgggctgggcccaggtaccccagcccacccctcatgacacagaatacttgagccactgatttttcatttcttttttttttttttcctcggcccctcctcagccacctgagttgctctatctgcaagcctgactctgccagcctcccctggtagagaggaggtttacccactccctgcacgcctgccgtccctgccccgctgggcagcccttcagtgtggctggcgttggggccagtgagttgcctctttccctccttgtctggccccagtggtctggggagcccccaggcacacctaagcgtcgtggagcattgttctgccacagccctgcatactgaccccgggaggctgggcaggtggacagccccagccaccaccttcagcctagcctgtcccccaaggatggtgaagctcagcaggggtctgagggtagccggccagaagaggctggaacctcctgctcaagtctagacccctacttctctgctgcccccaccctgccagagctgatgtttccaataccaagatgtcttcacagggcacagcccctgcagagcatcttggtcatttggaagaggacacggtatcccctctggccagagtatgtcagagaaggaagagtagggcttttttgttttgtttttttttaaaggtgcttgcttgtttaatgtaaataatagaaagccttaatatcttttctgtaacacggagtaatattttaatgtcatgttttggatgtacataatatatttataacaaagcagcaagagtctacttaaccttggctgcctcgtggtgtttcctggctgggtggggtggggggtatcaaggagcctgggacgtgaggccccactctcgccccattcccagctccccccaaccctggcctcaggatgagagctgtcacctgagacagtgaattaatgttgacatctgctccaaagccttttggaggggattgggtgaggacagtggtctttcctgttgatcatgatgataaagtaatgatggctgatccctatttgtgacttccttcagcaaatattcactggcacctggtgtgtgccaggctctgtcctgtacacaggtacagcggtgaaagaaccaacaaagacctatcctggtggagctgacctcctgggaaaagagtcaataaacaaataaatgcacatggaaattcaggtggtgatttgtgaagaaaatcaaacaggacagaaccacagcggaaaagcagggtcggtgctgctttggcagggtggtcatgaagggcctctgagctgagacctgggggaggagaggaggtcagacacgaaagaagtgagggaagaggcctcttgatgggacagcaagtacacaggccctgaggcaagaacaagcttggggccacgcacagtggctcacgccagtaatcccagcactttgggaggctgaggcggacagatcacctgaggtcaggagttctagaccagcctggccaacatggtgaaaccctgtctctactaaaatttacaaaaattagccaggcgtggtggcagacgactttatcccagctacttgggaggcagaggcaggagaatcatttgaacccgggaggtgaaggttgcagtgagccgagatcgagccattgcactcaaacctgggggataagagcgagacttcacttagaaaaaaaaaaaaagaacaagcttgggattttaagagatggtgaggcagccactgtggctggactagagtgagctaaggaaaaatggaagacaaggttgggaaaacatggatttggtatacagagactcataggctgaggtgagtggggacctgctggtcattttatttatttgtatttattactatgtttttagagacagggtcatgctctgtcacccaggctaaagtgcagaggtgaggtgtaatagctcacagcaaccttgaactcctggacacaaacgatcctcatgagtggctgggactagcacatgccgccacacctggcttggctatttttttttttttttaaagaaatggggtctcactatgttgtccaggttggtcttgaactcctggcctcaagtgatccgccttggccttccaaagtgctggaattttaggtatgagccactgcaccgggtcaggacattatagaccaattagtaacttgtttatttgttgaataagtaattataaggcatctcctatgaactaggtactgcgattctgtagtgaacgctacagacatagtcaatagctagtctaggctagatagtttctgcaatattagccagaaaaaagaaagcctgttggggacagggaaatgcctaaaggactccagagcagtcacagataatgacatttctgagtagctgggattacaggcgcccaccaccatgcccggctaattttcgtatttttagtagagatggggtttcagcatgttggccaggctggtctccaactcttgacttcaggtgatccacccaccttggcctcccaaagtgttgggattacaggcatgagccactgcgtccagccatgacatttattttttaaaacgtgacccataatgccattttcctttgccaactagacttttgatttgtgactatgcctgaggggaccacacaaggaagggtgttagaattcgacaactcataaatgacagaaatttaaagtaaacagctaaaataatcgtattagctcataaaacggaaaagtctacaggtgttctgaattaaggtttggcaggacccaggggctcacatgattcatcaaaacgtggtctctctaagctctgtttttctctttgagttgagacttactagaccagctcagcaatctcagtggaaagtgcattcccagtagttgcagtggaagtcccagggcaggctctcattggtctggactgggtcacgtgcccatccctgaaccaatcacattggccagtggggtgaaatgctctggttgcccagggctgaaaaatgtccatctggatttgcagggttgtgatcacctcttcctaaggcattactacaaaaagaagtcaatggtggatgggacaggcagctaaattctttagaggccataggagtagcctcaccactgtggtgttggtttccaggccccaccaatctgtgtcagttcccctggagccgacagaaaaaaaaccctcagcctgagtccagagaggtaaagtgactcccccaaggtcccacaggtagtaagggtagagcagccctcagactcagaccatttcacttctgaattctgggggctggaaaaaaatccttctcaaaaccagaaggtgcgctgcattgggtctgagagtgttggggccacttgtgagatcagggacttgcaaacaagtgcctatgagggccagacaggggaaaatgctacttaatattactgagcacttaactttgcaccagactgtgcagagagctctggcatgggtcctgtcaagcagtccctgcagctctgagaagtgagtactctttgcaccatttgcagatggggaaactgaggcacagaggtcatgtaatatgcccaaggtcacacagctggtaggtggcagaatcaggatttgagccagcgtctgacccaaagcccctgtgctttaacgctcccattgtggagagggaggtgagacaggtggcacgtgagaaatgtgtccactatgaggcaactgcagcatgcctgagaaagggccgctgacgctggggactgggatgacctggagacatcaggcctaaagggcagctgctactcacagcagctggttaaacaggagccagaaatctaaactttaaaaatgctggctccgtgtttaaaacgtactgtgggcaaaacaaaatgagtgcataggccaactgcctgcagcctccctcccagctgctgtgggatggcttggtttcaggtaggcatgtgctgctgtctggtggtggcacagggtagtggcatgcagggcaaacatgggtttccagctcaaccgggggagctgtagtgaacttgcatacccctgtgtgctcactgttctttagaaggggcctgggcacatacctttgggcgcctgcccccaactgaaactccatcaccccgccttttttttttcctggagacggggtcttgctctgtcacccaggctggaacacagtggcatgatctgcgctcactgcagactcaacctcccaggctcaagcaatcctcccatttcagcctcttgaatagcgggaacgacagacatgtgccaccacccccagctagtttctttttgtattttttgtagagatggggtttcaccatgttgcccaggctggtctcgaacgcctgagctcaagcgatcggcccacctcagccttcctaagtgttgggattacaggcatgaaccaccgcgcccagccaaccctcctttgataaaccaaaaatatttttcaagctacccacatatatatatgggtatatatatatatatatagcaatatatatattgctatataagcaataggtaatgcttgcataggtaaagaataagaatcacgccgggtacagtggctcatatcaaataatataaacagggctagagtatggataagctgaccctggacagtgggccaaatccagccacttgcttttctatagctcagaagcttttgtgggttgtttgtttgtttgtttgtttgtttgtttgttttttagagacagggtcttgctctgttgtccaggctggagtgcagtggcacaatcacagctcactgtaacctcagactcctgggctcaagtgatcctcccacctcagcctcctgagtagctaggactacagatggacaccaccacatccagctaattttttttttttttagagatggggtctcgctatgttgcccagggtagtctcaaactcctggcctcaagtgatcctcccacctcaacctcctgaagcactgggattacaggtgtgagccaccatgtcagccacgagcattttttaaatggctgggggagggggaacaatatttcctaacacagaaaattcaaattccagtttgtaaagctgaattggcacacagccatgcccctcatttacatattgtccgaggctgcttttgcactgcagtggcagaattgagtcgttgcatcggagaccacgtggtccacacagcctaaaatatttacgatctggccctttacagagaaaagttaccaacctctccctagtctagaatgaagggtaaattgctccccattcatgttccctcaggtactcagttcccctccttagaggccatcattttgacaagacacttgcaatgccttatgtaggcagaggggtatgtctgccccactccttttcacacaatatgtaggatattatgcacacagttctgcaccttgccttttttcacttaatatattttggagatagtgttatcattaatgttcacaaaccattattattttttacagctgcatagtgttccaccttcaggatggaatggacttgacttttttttttttttttttttgagacaaagtcttgctctattacctgggctagagtgcagtggtgcaatcccagctcactacagcctctgcctcctgggctcaagctatcctctctcagcctcccatcccaagtagttgggactacaggtgcatgccaccatgctgagctaatttttttttattatttttagagacgggggtcttgctttgttgcccagactcgtctcaaactcctgtgctcaagcaatcctcctgcctcagactcccaaactgctgggattacaggcttgaaccacgagtgtgttttaaattttgatagtgcataccaaattgtcttccagaggccatgccggtttaagttcacaagttttcagagtccctgtttcctcacacccttgccaacacagcgtgttatcaaatgttttgttctttgccaatctgataggtggttttaatttgcattcctcttactgtatttcattgattctaagatgtcactgattctaagatgcatcctgatttcagaagttcacatgtaaaaatgtggctgggtgtggtagctcacgcctgtaatcccagcactttgggcggatcacgaggtcaggaattcaagaccagcctggccaacatagtgaaaccccgtctctaccaaaaatacaaaaaaaataattagctgggtgtggtggcgggtgcctgtaatcccagctacttgggaggctgaggcaggagaattgcttgaacccaggaggcggaggttgcagtgaactgagatcgcgccactgaactccagcctgggcgacacagcgagactctgtctcaaaaaaaaaacaaaaaaaaagtaaaaacgtatagcttcaaatcactgaaatacaatatgttttgtgagattgggtatcttactgtgagtttaaaatgcatttgcatttcctcatctgttcatgtccttttcctatttttcttggaagggagggtagcattggttaagagtgtagggttcaaatcccagttctgccacttacaagcttgtgactttgggcaagttacttaaccgttctgtgtctcagtttcctcacctgcaaaatgggaataataatggtacctacctcataggataggtgtgaagattaaatacattattatatgcaaaataccatgttcctggaatatggcaaatgctcaataaatatttgctgtaactgtcatctttgagttattttttcttaatgagtttcaagggctctttatacgttaaggaaacatcctttttgtccccccacctccctgccccaaaccccagttttcattcctttttccttgaccacagaagtaacatataatacaaaattaagacattacaaaaattgtatcagaagaagccaatggaaacaacttagatgtccattgatagagtgagttaatgaagtacaccaagaccccctgcccacccatccccaccgctttttgactgtatatttcggaaactacatcagacattaaataagatgtctcagcgccatggctagacacacctcagggagccatgactccacataaatgccatagaatttcactagcaaatgcatcacacatcctgtttgtttgtttgtttgtttgtttgtttgtttttagatggagtttcgctttgttgcccaacctggagtgcaatgctgcagcaacctctgcctcccaggttcaagtgattctcctgcctcagcctcccgggtagctgggattacaggcatgagccaccatgctcggctaatttttctattttcagtagagatggggtttcaccatgttggccaggctggtctcgaattcctgacctcaggtgatccaccggccttggcctccctaagtgctgggattacaggtgtgagccaccatgcccggcctcatcacacactctgttaaccacacatcccttctcctctctgtcttctgcaagtccacagtccttcctgtcgacagtttgtcagctttactttctgcagcttatgctacaaaaactgtagcacgaggttgggggggttccttaactataaataggaaattgaaggttgtggataacattatataatttttgttttttcaccttttgaatatactttttcaaactactcatgccttttacatcccagagattccaaaccagccctagtgttttcccacttgaaaagagagttcacgaatggacattgtggatctgtcaggtctacatgcctctcaaccgaaccactgcgtcagcttcctgtatctattaggtatgctttttggtggtaggtaacaaaaacctacctttaagaacaacttaagcaacaggcacattatctcatgtcttcagatgtctgcagttgggcagccctgcaattccttcagcagctcagccacatcacccaggattctaattctaaccattacaacctcatattgtaggaaggaggaaaggggacaaaaataggctttttcttcagcttttttgtttgagacagtctcgctctgtcgctcagactggagtgcaatggcacgatcttggctcactgcaacctctgcctcccaggttcaagcgattctcgtgcctcagcctcccgggtagctggtattacaggcctgagccaccaagctcggctaatttttgtattttcagtagagacggggttttgccattgtggccagggtggtctcgaaatcttgacctcaggtgatccgcccgcctcggcctcccaaagtgttgggattacaggtgtgaaccagggcgcccaaccttctcttcagcttttatgaggggagggaaagtttccaaacacccaccttgccatgtggggacatggcgactggaatggcggtaaacatgcccaatacaccttctctctgggttccctgctaccaatattgctgctgcccaattgggtgtcctcgccctgtctcctcatggcagcacgatgcactttgtaaaaaggcaaacctgcccacatttagctcaaaacctcccaggctccacctccctcatcacgggagagccagcgggtgacacagggtaaagagaactggattccaaaactgattttactccttccttgttgtgtgaccttggaaaagccatctaactcctctaagtctcagttttctcatctcacaaatggaaatggtaacagctactttgcaaggttcattgaggattaggtaataatagcagctaatacttatattgcacttagtgccaagccctcttctaaattctctagttctattaaccattttaatcttccccaaaatccgataaaacaagactcttatcccatcagctgagtttatcagctcaagcgcagagcggtgatcaggcgcaggcgccggaaggaatcctgctctggggaccggctgtgacgtccaggaatggggcagaaactcttcgagggagcgtgtgcgcgggacgtactacaactcccatcaggcactgcgccaacgctagactacaacaaccagcatgcctcgggctgtcccgcctaacctcttcctgcgatgagctcggcacgggaattattattgtcaattttacttgcaagaagtttcctacaagagccaaggaatccatgcgagtaaacatttacgggcaccatagataaaaggcttgtgttttaatcctcatcctctccacctgttagctctgagtctcagttttctcatctctaaaaatggggatattcacaggagttgctgcatcgagttgtgaggattaaaagttggatgtaacggcttggtaattatgagctcttctagtgtcccttcctcttccctgtgcccaaggggttttaggaaagcattttatctccacagcaatcctatgaggttgatactactatcctcatagaaggggaaactgatgccaggagaggttcaagcgtcttacctgaagtcacaaagcaaactgagtgatgaaggaagacttgaacctagaaaatttcactgcaaaggtgagtccaccttaggaacccaaatgcttccacttgctactgatgctttacagtgaccccaagtccagggcaagtattttctgtgctccccaaagcaaacttgtatcacgtgatacacgaaaagtcaagttgcttcacctgtagccagtgctggcactttgagagctaattatagctgaatttgatgtggttggaggaatcgaggaaggcttccctgaggggatggtgctggatctgagaactgaagagtgggaacagcacaggcaaagcccctgaagtgggagagggcatgtgttccagggggcttgcaaagggccagtgtcgccgcagaggtacagaaagtctcagaggcgcaggctgtgccaaggctatggtgaggcaagtggggtacctagggtgcagattttttttttttttttgagactgaatctctctctgttgcccaggctggaatgcaatggtgcaatctcagctcactgcaacctctgcctcccgggttcgctcgattttcctgcctcagcctcccgagtagctgggattacaggtgcgtgctaccacgccccgctaatttttgtatttttagtagagacgaggtttcaccatgttgaccaggctggtctggaactcctgacctcaggtgatctgcccacctcggcctcccaaagtgctgggattacaggtgtgagccaccatgccctgccctagggtgcagattttaaggagtcactcacctgcagcgctgtgcaagtgcggagtcaggacctgagtgaaagccccgttaaatctgaccaccccatcctcgtccctgccctgggtgcagagcctggtgcacagggtgtccaggcatcctgctttgccctggagagccctggtttccacttgtcctggtgagattataataagtccccttttaatctgatgtgtgtcctcattaggtgataattctatggtcgctcaacttgtaaagtttgtattttatccagagggaatggggagccactgaaggctttagctggagggtgttttgagcagatgttggtctatatggagaatgggccataggggagagaatggaagctgctggggtcttccaagtgggagataaaggcagcttgccctgagtggagaagtgaacggagtggagagatgcagagtaggcactgctatcagacaaaggtgatgaattggatgtgctgggtgagggcttccagcttccttgtccctctatgtttagagtcctggtccttctgccagtattttgctctgtgaccttaagccagtcccttcacctctctcagcctcagtgtctacatccatataagggcttctcagacaatttataataaaggaggagtaccttcttgggtttatttatttgcaaaaatatttcccaagggcctttgcacaagctgttccctctacctcctcattgttacggtctctgctgaaatatgaccaccttaggaggcccttcctgaccatcctctgctgctcttgtcttggtttatctctaccctatcagaattatagtttcctgtttatttacttgctgtctacgactagaatgtaagtccctgaaagcagggatttgcttcttcagagatgtctatccatccccagcgcctagcacagtgtctggtacatagtaggtgcttaatgtttgtttgtttggttgaatgaatgaatgaacgaatgaatgaatgaatgaatgaatgaattgggtagatggttagcaaatgctttccctgccaccttaatgcccctaaatcatttagctgcacccactccaagccttctctggccggggagcatcaatcctaggagccagatcatctgacctggagggtgatgattcaaaaaatttgaacctggaggttaaaattctgcctgtctctgccacttaacagctgagtttagataaatcgcttgatctctctcggctgcatttttcacattaattctgaccttgcggagatgtggtgaggatctagataggaactagacaggaaaaagccccaagcgaattcggcgcttttgtttgaagctatattttctttttctttcacaatcgcgccttcccaagcctagtcacccctgcccttctcactaagcacatcacaacctccctcgcacccgatgtgtggggacttgcaggttgctgggccctcgagcacgcagatatttcctttctctaaaagggaaggaaaagagccttccaggccacgggtcgtgcaggtctccggggcgggcgtcagcggcggcgtatgtgcgtgcgcgcgcgcctgcgcatcagggccgggggacgggtaaggggggggtgaagaaggggccggccttcaagcaacagcgacgcaagatggcagccaccacgggctcgggtgagcgggggcgccgggcccggccggccgagggggcatgggcttgggccgggggccggggaccctcaaagcctcctgcagcggagccagggtccccgcgccgcctctgtctgctgggctccgcggcagccaccggcgcggcctgaccgggggaggaggagcaggcggtggccggaagcacgggcggggggctgaggggcctgtgggcggcgcggcgaggccctgaggctcccccgggaggcgtgagggccctctgtgctgtctgggggagccggagtgggcgaggagcgagctccgaggcactcctgaggataccggggctggcgactcttaaggggcgatctagaggtcccctagaggaggcgccccacagcggatggaagtcccatactgggtgccaggggtgcggctgagaggggccttgggatgtctggaggggacatcagagaagcccttcaggctggatggaagaaacgggatcctgagggggtgacttgagaggatcccctatcggttgagggaacggctccggcgttagttttagagatggggttagctgaggaaatagctatgttgactagaaaggaggagccttggagcagctgcttttggggagaatgaagggggtctccgcatgataagtgagaggagggaaaaggattcagatgccagagggacctaatagcggtgatagtgaaatgaccccatcattaccagtctcctgttcgaggatacagatggattgcttcaagttaggtttcaggggacaaggtccgagtggggcagttggtggaagcctctgatattggatgagggagaacagatgaattgggagccccgaggatgtctctttgggagtggggattcaactgagggaagcccctgaaatgagggagtggaaaaggtcgggttccggagatgtttcctgtaaaggagaaaagtctcctctttttgaattgagtgagggaagcatatcctagaagtgtctcttctgtggagacgctcactctcatcgactcctttaataattgggacagatatgtgggttcagctcagaagttccccactggctgatgggagtagggaggtgaatagatgaaatgggaactcttgggtgaggctgcaccctcaggtgcctggcagtgaagttggccaaggaggttctctcagatggggtgaaaatgggttacctctctgatggaggaagcaaacagggccacagtgttccccactgtggggctgcagggacaccagcctgagtacagcaatcattggcatatttaaggccacagcagcggcagtgttgggaaggaattggtgatccatgggaaatagggtgaggggaattctttataaatgttgctactctgcggtctcaaggagccatacttgcctgatggttggggtgggaataaaagaaattgaatgtgggggatctgactgaagtgacccaccacaagctgctgccttttgagtttaaaacagtggggtcttcttgcagaatagcggagaccatgaatccttttactcgattttggtttcagctggaacagtgctgagtcaattcatttaccatgacgctgccccaggcactcccagaagagagattctgagtcaggccagactgctgggtaaaacttctcaccagaataacactcctaccgggtcgtaataaacgaaggggcccagtgtgctggtggtagccagcaataaggtgctgttgcagctcagccctgcttgcagtcactcggttggctacctacaatctgggttaacagctgcccggttctaacttctccagaccctgacagttaaaaagtgagtgcttcataaatggctatggtgatcagataaaatgtcagctgctgtctagtggaatacaagagcacttggcatggtttagataacataggacaggctttgaggtgccctaaaatggacttcccaaaattcttttgtctgtttattcaacagatatttactgagggcctattatgtcccatcgtggatagcaaacaaaatggacatagtctgtatccttcgggagcttccattcaagtcagggagagaaggctgttaaggagtaaataagacaatttcagatagcagtaagtgctatggaggaaattgtgtgatgtgatagtgtctggagaggtggtcaggaaagtgacatttcagctgagtcaaataatggaaagagctaaccctacagtgtcacaggcaggagagagagtgggctgttagtgcaaaggccctgtggtgggactctgcttggcatgttgaaataacaggataaaaggccttcatgtgcaagcaaggcttgttaaggagatgagttggagagacatggctttggatttgagatggtatgaggggaagccatcaaacaagtgtctggtatgaagtaggcattcagtaaatatttgttgaatgaatgaataagagtcttaaaaagaggagtatgataagatctgaccttcgtccctaggcagtgaaaagagtgcagggtgctaagagtaaagcagaccttacttggggtaaactaaaatgagtgtacaggcctctctgctttctaaccctgagaagtcttccaggtgtggtcagggcccagaggccttccttagtcaggtttagagtgaggctcttgattaatctgtgcctccggttgccaggaaacagctgtgaagcctttgagttcctgtaagggctgaacttagttttttatggtcactgctttcagcatttggctacaccaccttcccacttcctttggttctgcaatgtgtgatatctacatatgtcttagagggtggaactgtgaaaagcccaccacagatcctcagaatccccatgttatgacgggtgacttcctcctgccttggccaggattgcagcacatcaaatagtggcccttggttgccaggcccttcctctcactcagcagcccacgagcttccctgacatttaatcagaaaatgagtgccagaggggtaagccctggtggggcatgattttaaatttgcatacatcggagtggcctcatatgcacattcagcttataaaaacttaaccatgtgggcagcagagattagtcttcccttccattcaggagtcttccccagagagagctggaaatggatgaaaactcacagtcccttagttcttctcagttcctgtatgtctcactgtgtgagcatcttatgccaattgtaattaagtgccttttgtacaacatgggccctacattcaaagaacagcttcatattgtgctcagccaaagaaatagcagcctgctccagtgatggaggggaaactggctttgttgggctagtgcaagcttttttttttttttttttttgagacggagtttcgccctgtcacctggctggagtgcagtggcgtgatcttggctcactgtaacctctgcttcccaggttcaagcgattctcctgcctcagcctcctgagtagctgggatcacaggcacgcgccaccacgcctggctaatttttgtatttttagtagagacagggtttcaccatgttggtcagtctggtctcaaactcctgacctcatgatccgcccgtctcagcctcccaaagtcctgggattacaggcgtaagtcaccgtgccgggctgcaagctattattttcttaagggattaccaaggttaattttgatgatcatgattttcccccttcatgttaactgaaaaccactctatttcccccaccacattctcttttctcttcatatctctatccctcccacctccccacaaattgtagctctgcagtaatttggtaaaagtagaatacaaaatatgaagtcaggaatcctctgcttaattttgaaggggcacagtgaagttcagagcagcacatttggcaaagtaaatgtttgaatactattactgttgtattgtggatagtgctttagagtgtcccatagacttcgacttacctgtgatgttgtctcatctaactctccacagcctggtcaccagccaggggcagtatccacccacattactgagggaggagccaaaagccaagggagactggtgatgctcggactagagcccaggcatttttaactcctgttccctcaccagcctgcaggaaatggaaaaggcatggatttagggatatgttcttcctaagtcttggagtgtttaatcttggagagagaaagggctttagtaagaagtgtctactgctacccgtttcaggaaccctttttatagcatctctggccactgtttgtcctcttctgggttatgtgctgtccaaggagagtgaggtccttttttcaggaagctcttgcttatattttatactgaataactcacacctcttgggcttggagccccatcatggcatgtacaaagtagttcctcatccttatttacatgcaagccatcagacttctttttaagttgcactcttgggtttactaagtgctagacactgtattaactacattatctcacttgtcacaacagcccattgaggcaggtatcgattgtgaaggtgaggaaacaggccaggagaggagtgactagcctgaggtgcagagcctgggtgctctgggatggtgttgcttcaggacacgtgctcttggccggatgatcgttcttccagcccccatttcttattctctgaggtaggcctcgcaagcatcttcagccattggcatgtctgttatttctgccttggctgattagcttattcatgggtagatggcagtgacctctcaagtagtagtctttcctcatcttcacatccaccctgtcacaagtccagtaggtgtaaccccaaactaaatgccaaatcctcctttctgtctccactcttgtcatcctaatctaaccagaaccgtctttctcttgcctggaagatggaaaaagcctcttgctttcagtcttgccctttccattttctatacaggagacagaatgatctttcacagacgtaaaatagaaactgccactccccttcagcaagcccttcccactgctcttattacagaataacccatcccttttccatggcccacaaggccctgccgccttgacttcatgtggtgtcacacacctctgatcttgctctgtccccagatcttcatgggcctgactgctgttcttcaggtcgcagctacccagaaaggccgtccctgagcactccattcaatagttttttagtcattgtcacagcttcttgttttgttctgtttctctaaagcacttaaccttacctgaagtgttgtttcgttgcatattttctatgccttttcactagggcaagattctatctcaacttctgttgtgtccctagcaccagcacagttctggacaaaatagtaggtactcagtaaatatttgtgaatgttgcagtgagttaattcagaatctctttgatgtagccaaatggatacatttgacaatttgtggagaaacaatgtatccgatagggcagaagcaaaagtggctattcagcctttcaaaaaactgaaactcttatccttatttggtggtatttatagaggtacttgatcgtagaattaaccatcctccccttctccagttgtcctgactcatttcccacatcttgtttccccctttgtcaaagaaaatctgatgcttggtcttggtcactgaccctagcagcagaacacagggtcttgcattctgtcactagctgttgtcacgtggctggactgtaaagaatgacagcttgctactaattctttccctagaattcccctagagcaatggatctcaaactagtatacctcagagtcctggagggcttgtcagattcttaggcccaaccttggagtttcagattcaggaattctgggctgaagacctgagaatgtacatttctagcgagtttgcgatgaggtctggggactaacttggagaaccattgctctagagaaggagaagaacagatctcctgggcaggctaactagacagccagactacacttgggcggttgctcagaaataaaagttacttgcttatggctctatgtccagttttcagggacgttgaatcccagtgcatcaccttccatacctcctcattttctgaagtgggagcagcatcagattcctagctcagttcactgtcttccctgaatgggcaaccaaaccatttttaactagcagctttcttttcaggagaaacctctgaggttctaccttttttttgtttttttttttgttgttgttgttgttgttgttgttgtggtttttggttttgaaacagagtttcactcttgttgcccaggctggagtgcaatggtgctatcttggctcaccgcaacctctgcctcccaggttcaggttcaagtgattctcctgcctcagccccctgagtagctcggattacaggcatgcgccaccacacccagctaattttgtatttttagtggagacggggtttctccatcttggtcaggctgttctcgaactcccgacctcaggtgatccacccatctctgcctcccaaagtgttgggattacaggtgtgagccaccacgcccagccagctctaccattttaattcaagacctaggccagggttttccaagattgacatgctgtggtagctgctgcttggtggccatgattttcccaaaagatgttttaaacgacttcagaatcctttttgtaccacaaatatattaatatgttgctgtgtttcagattactgcattaaatgttttactgtggcatggtgtaaagctctatcaaatattcatgctttttcaacctggttgccatattttctttgtaatatcctgcaactgctgtcttttcagtttatatttagctaagagaataaccggctgacttttgatactgacacaggtccaggaaaaagccttctggaaagaataattctgaaataataggaacaaatattttcttcaaaaagtcttggattactgtgatattttagcaccttgatgaagtttttttttttagcattttcataattcactttttaatagtcatagtctatttgattatacttatcattagctatagattttcctagtgtacttcctagctattatagagcctgtagttctcttggttttgcaagattataagagtccttttgtttgtttgttttttgtttttttgtttttttgttttttgttttttttgacgagtctctgttgcccaggctgggctgcagtggcatgatcgcagctcactgaaacctccacctcccgggttcaagtgattgtcatgcctcagcctcccaattagctgggattgcaggcatgtgccaccacaactggctaatttttgtatttttaatagagatggggtttcaccatgttggccaggctggtctcaaactcccacctcggcctctcaaagtgctgagattacaggtgtgagccactgcgcctggcctgtaagagtccatttttatgtcttccatattgtcacttgatgctgtttctccagctgcctttttggtgtcagattcacacagaaatattgggaatcctaaaattttatgttgattcaattgattaaagtgctagaggaccaaaacatatgttagagtattcttgggttttctcatctgttgtgcttctgttctttggcatatgtacgtttaattttttaatatattcactaaaatgttttgtttaatgtaccgtgattttgaatttaaactctatttaggataggatgagcttttcgcttgtcactgatacatcctgaagtctgcaggatctctgaattccaaccatatttggacttatgtccctggagtagaccctgaattctataactagggtgtgattaggccatttggaattaaatgctcttttgttttgtagaaaatattgatgtaactttgtatgcagtttttaaatggtttgaaatattagtaacttgctttcatacatactttatgaaacaaagttcattttatagtgaagaattctttgacttatgtgatttgggtgagaaaccagttttcccttattttaaaaaaaatggtaagttttcctaaaattctcatttattaaaaataaaactaggctgggtgtggtggctcatgcctgtaatcccagcactttgggaggctgaggcaggtggatcacttgaggtcaggagtctgagaccagcctggccaacatggtgaaaccccgtctctactaaacatatgagaattaactgggtgtcgtggcgcgtgcctgtaatcccagccactcgggaggctgaggcgggagaatcgcttgaacccagaaggtgaaggttgaagtgagccgagattgcgccattgcactccagcctgggtgacagagtgagactccatctctaaaaataaattagaaatggttaccaaattttacttatctcaaaataaaaaaccttaggtatgttaattttttttttttttttttttttgtgccagagtctcactgtcgccctggctggagtgcagtggcgcaatctcggctcactgcaggctccgccccctggggttcacgccattctcttgcctcagcctcccgagtagctgggactacaggcagccgccaccttgcccggctaattttttgtatttttagtagagacggggtttcaccgtgttagccaggatggtctcgatctcctgacctcgtgatccgcccgcctcggcctcccaaagtgctgggattataggcgtgagccaccgcgcccagccaaggtatgttaattatatggcaacagtgtccaatattttggacccagtagattagagtttacaataggaaatactgccttttttttttttttttttgagacggagtctggccctattgccaggctggagtgcagtggcgcgatctcggctcactgtaacctccgcctcccaggttcaagcaattctcctgcctcagcctctcgagtagctgggattacaggcgcgcgccaccacgcccagctaatttttgtatttttagtagagacagggtttcaccacgttggccaggatgatctcgatctcctgacctcgtgatccgcctgtctcagccttccaaagtgctgggattacaggcatgagccaccacgcctggcctgatactgccatttcttcaaccagcaaacatttattgatattgagtatcattatatgccagacagcataccagattctggggaggcgggattgaatgagtcacagctctgacttgagaaacttagagagtgagtcagacaataaaaaaggaagaaaatcaaatgtaaagaaaacataccacacatgcctgtgtggaagtaaaggtgtttgggaccgggaccggggtctctgagagggcctctcctgactgcctggcttctaattaagctttatagcttttaaaattattatagtcaggccgggtgcaatggctgatgcctgtaatcccagcaccttgggaggccaaggcgggcagatcacttgaggccaggagtttgagaccagcctagccaacatggtaaaaccccgtctctactgaaaatgcaaaaattagctgggcgtggtggcaggcgcctgtaatcccagctacttgggaggctgaggtgcaagaaacacttcaacacaggagaccgaggttgcagcgagccaaaatcacaccactgcactccagcctgggtaacagagtgggactctgcctcttaatatataactgttcttaggctttaaaattcatactaagcccctttaataatccttataatgttagactcccagataatggtgctgtgaatgtttctctcttgtattttcaaaaataaaccagattagaattttgtgacattgagcgttgttcattctgaaatactgttcctagctaatacctagtcattcattaattctttcaataagtatttgggtgcttactctagagggcaaaacaccctgacacattggagattcagcagtgaacaaaacagataaagttttactctcatggagcttatgttcagatgggagacagacaagaaacaaccaataaagtgaaaatgaatatatttacaatgtcgagtggcaatgagtactatgaagaaaaataaggcaagataagggaatggacagttagacccttggttgaggacaagggaaccagtcagccattcacagctctgggacagagaattccagggtgagggactcacaaatacaaaggcgggatgtaaggatgcctcttcagaaacttagagaaggactggtgtagctggaggaggatgggggagcaaggcagagtggcacaaaatgatgttggcgaagcaggtggggctctctcggccaggtgacaagtttgggtggattgcgggtgcaacgggaggccaagagtaggcttctggtaggagagcgagggcacctagtttacctttaagaggatcgtcggccgagcacggtggctcacacctgtaatcccagcactttgggaagctgaggccagcggatcacctgaggtcgggagttcgagaccagcctgaccaacatggaaaaaccccgtctctactaaaaatacaaaattagtcaggcatggtagcgcatgtgggaggtaatatatccattactctgacctgtcttttaaaaacagagtggtagaccaggtatccttacgttagtgattctgggtcatgacaccccaagatcattggtgagagtacaatgaacatgcaaggatgcatacaaggttgcttttgtgtttgttttttagaaaatgaggtttgcagaccttttgtccttttttactcgatttaaaaaattttcaacaggtatttatctgaagtactgggtacaggccagtttttttgttttttgttgttgttgttttttgaactaccaccacagtcatgcaaatgaatatgagctgttgaattaattaccctatcttctacatctcttctacttcccatcacgcaggcctataagaagtttgatgccacatgttcggtcacagtgtttgctctaggcaaatgcttctggctctatatcctgagacgttagcagtagcacaccccaaagctgatcattacctaggagacttggatatgccttatctcttgccctactctgagccttttgcagctccccccgattacccttaaggtaaagtccagtagtaacatggctccaacctcttcatcttttgtcagatttcagagaaggctgtgagccctcaaaggctaagtaacagtgtcctctggtaggttctgtttctcgtgctttgatatggttttatttcattgccctttgtgtatatcttgtttccacactgacaccttagactgtgttagggagaccccagtttttattttgttcatagcccctagattgtctagcaaagtgctggataggtattggataactatcacactgagagaaggtgtgtgtgcctatatgttactgataatttatgtatagggaaattttgacaagcaggtaaaaagccaagcaaactttttttcactgtggtcctgaaatgtgtaaaatttttttttttttttttttttttttgcttataaatgtgaagtccagttctatacacattaaacatcatgagaattgcttgaacctaggaggcagaggttgcagtgagctgagattgcgtcattgcactccagcctagggaacaagagcgagactttgtctcaaaaaaaaaaaaaaaaaaagttctttgaggtcttcaatgattttgagagtataaagcattcttgagagcaaaaggtttgagaactgctgttcaaatgaaataaatgtttattgtaattgttcagtagatagcagttatagatatttatatgtatatcacaactcctagttgcaatacagatagatattggccagtccaaagtttttcatttattaaactgtttctggtgctggctttacaacttgagtcagaatcaaattgtcctataatgcaggaacaaaagaaagctgacctttccctctgtgggtctcaattcctgttccaaatcctagcctaaaataaattgacctgacttatttctttggttcagttgtatgtgtgggctttgcacacttgtttttaagtaatcgaatatctaatccaatagaaatgtatgttggaagtataggattaattactaatatattttgccctacttcacaagtaaaaattaaatatcagaaaattataacttgaattcactgttttgaaactaatagcaacaagcttgtgatatttgaatgttaggatttcctaatcagatctgattgttaggtgaaaaggtaacctttcagccatagagaagttctttgcttaagtttgcaagaggaatagtcctactataaatagtccagctgacatttaaatacctgacataagaaactaacacatttttttgtcttgccaaaaagagcaactcaaaatagaggtcacttgtgtaatacagcttccattcagtaatgaagggcttaactgtagaagctgttatactttgccatttatttgacagtcttaacacttttttttttttggagatggagtcttgctctgtcactcaggctggagtgcagtggtgcaacctcagctcactgcaacctctgcctccagggttcaagcaatttttctgcctcagcctcccgagtagctgggactacaggtgcacaccaccacgcccggctaattttgtatttttagtagagacggagtttcatcatactagccaggctgatcttgaactcttgacctcatgatccacccacctcggcctcccaaagtgctggaattacaggtgtgagccaccgcgccccgtctttttttttttttttttttaaatagagacaggttcttgctctgttgcccaggctggaatgcagtggcgtgatcatagctcactacagacttgaccttccaggctcaagcagtcctcctgtctcagcctcctaagcagctgggactacaggtgtgcaccaccacacccagctaatttatttattattttttgtttatttttggtttttgagacagggtctcactctgtcgcccaggctggagtgcagtggtgcagtctcgcctcactgcaacctccgccttcctggctcaagtgaccctcccctctcagcctcctgagtaactaggactacaggtgggcaccaccatgcccagctaattcttgtatttttttgtagacatgagatttctccatgttgcccaggctgatctcgaactcctggcctcagacgattgtcttggcctctcaaagtgctgggattacaggtgtgagctgccatacccagctgaccaagttttagtaacattaaaatcattgtccattaaaagttagtcacttaaggaatgccgttaagtgagattcctactcagagaagaacccttgatccttattgagatgaagtgctggacaaccaaagccctaaagaagctgagggagcttggcttatggattcctaggggaaggagccttctggacagcaggaatgacagtcgcacaggccctgggtaggtccttgcgtgggggtgcagttgaaatggttcctaattggttttttgttatgcaaataacatgggattgttgtaaaaaaatcaggaaatagagaaagtagggggaatcatccataattcttttacccagagataacagctgttaacatcttgttctgtatccttaccaactctataaagctccttaagatgtcacttatcatctatatgagtttgctagtgctgtcataacaaaataccatagactgggtggggcttaaacaacaaatttctcacagctctagagaccagaagcccaagatcaaggtgtcagcaggttttgtcacattctgaggtactgggagttaggacttaagtatataaatttgaggggaacacagttcagcccagcccatagcacgatctgtgaacaagtacctcagtcatcagccttcctatcaatatgattcttttgatgttcatttttattagtgcaggcttgtaaattaaccagtagtaatgtagtgacttttcccccgctagcctaattaggattattaaagatttagattgaaccctttctgaacaatagttgtgttgtctggctttttgcctataatgtcaccactatctttcagttttatgtttgctacaggagacttaatccagtatagctgaataatccagttggctgctgtgcagatgaaaatgccagtgttttccaaacaagcagttcaagtatgcttgcaggttttgctgtttcctttcaaataccatatgtagtactatttaatatttttcttgtaatcaactgactcttttgcttacatttattttaaaggaaacttttaccattattataaatgggaagttagtatattacttaccctaaataagttattcttaaacataaatacgtgactgtaaaacgaagtgttcaatcacataccaccgaaagtcctctaacataccactaccaactctgtccttcagttgcttggaccaaaaacctgggagctgtagttgactcttgtctctcacacctcacaggcaacctgatagcaaatctccacagctcagacctctgaaatgcctagaattacgccactcctcactactttcctgctatcaccctggtccaaacgggtattatcttttgctaggattattgcagtagcctcctagctgcttctgcccttgctcccttcactctcatcctcacacagcagtctgagggatcctattaaaaacaagacagatcatgtcactcagtaacagttggcatccttaatctcctcttgctctctcatcttcctcacttggtttgagctaaattggcctccttgctgtcctttgacaccctaagcagcctctattttagggcctttgcacttgtttgctctgtctcaaagactttctcctcagctatccataaatcatgccctctcaccttctttaggtctttagttatgacacctgattgcaataacacttttcctttatccctccatttaaaagtatagcccctcccgtattactccctcctccggaacaccaggatctgtcatactgtataatttacatattcatttttgtccattatatgtcttctactagaatgtaagctgcaggcatttttgttttattcactgcttgttcttcagtgcttagaaaagtccccgatgtatactaagtactcaaatatttattccaattgaattaatggcgtgtgtcctacactttgggaaatacatatactggcaacacctcccacaatctggggtccctccagtgagcctctcttcacagtcacatggttagtcctgtttgtctctgagagtctggccaattgagagctcagcattcaaggcagagaacttgaaacttgactggatcctgagttttttccagagaaaatagtgcatatgccagggaaaatggaggaaggagagacagtcaggattggttgggagtgcaaccctaggagagatgatttgttccccaagcacagaaggaaagtccatctctctctcctcccatagccccctcccttgtctggccccagtacctaggttctgttctggaagacacctagaaatggctcaagcctcagcctgaacccggtactgtggcttgaacctgtgaggtgttttcatgcgttgctttcaagagctacttgccaggctttgggatttttggaaaacaattgagaaccagctattcccttttagcttttttgtaagttaaaagagaaactatcacttaaataattgaaaaacaatagaatattttatccttggtgccttcagttgactcttagttgattaagaggataccatttttatttcccatatccatggtgactattcctcctaaaggttgtttgagagtcatgccaacaaataagcgtagtcttagcctcttgtcttccaaggtacttttgttagcacctgatattgatggttttcatctcatactagttgaccccaattcatagacatttagacatgtaagccccttaggaggtttgtccaaggggtaggggtggggtatctttctaagtttggttatctagccctagtcacttcacctgtcagagaaccatgtgccccttccctctggttgtgctggttgatactgatagctttataagtagcaagtttgaggtgtgataactttccgtgatttttttgcatgttagcatcttgattcccagggagagataatgagcagctagctctaggcttacaagttcccctggagttgctggtatcttgaatttctttccatttattttaggagtaaaagtccctcgcaatttccgactgttggaagaactcgaagaaggccagaaaggagtaggagatggcacagttagctggggtctagaagatgacgaagacatgacacttacaagatggacagggatgataattgggcctccaagagtaagcgtcgagctacggctataaatgtcaatgtcttaaattcactgtgcctccttttaaaaaatattagccttatcacggaaaaaaagctcaccaatggtatattttctgaaatgtggctattcttttttgaccagtttcagtttatatatttgaacctcctctgatgctgtttaacccctctaaatggtaagcaaaaacctgtttagactcatagtgtgaatttatatgacaatgtagacagtgaggtgtgaagtcattgcaccatcagatgtcgttcagaacaatctctgggctaaccaaataactaggccctaggtatagccagcattcctgaagccagtctccaaattaactctggaaagccttcccagttgtggtttttcttcactgtctcccaggtctgccgtgcacctgtatcctagttccttgggccattcagcaaaggtccctggcaagcctgtcagctcctggtctattccaggcactactagacccagaggcctttgcaaagaagacgaagacaatgaggatggggaaaagtggcctctttcagaccttcctgatttgtgagagttcccagtcttcataatgccagccaaccgttttttgaggacacatagtaaaccctcaagaaatgtctcttaactctcacaagaccccattgttaggtgcaattgcattccatttcacagatgaggagacagactcagaggagtcagatctcttgcccaaagtcacatagctggtaacccccaaaccagatctgactccagagcctgtgctcttaaccactgtgctgtggtgtctcccttttgtttacattttgagttttcatctgttaccattatagaagatactaatcaagtagtaacttgatgtaggagtcaagaaattgatttccatactgtgacacacacttcagacaagcagtaagggcctctgcctgaatgtagcaagacctgtcctgtgtctgcttgtgtttaaggatgatgacaacattcattcttttgattgtgtgcaggactctgcactagcactgtgagagcagaaagacatgtagggcgtggcccgggctggaacagggacaagtgacatgttcgttaagtgttaggacactaatgctcatttcagatggtcatcaacactcatggtgaatgattggctttgccatttaatgttgcttcttaagtcattttgtgaccctatagttttgtggagttttaaaaatatatacatttgatctgtttttactcatttctttatcctttttttcctgtgaaaaccagaattttctgcgtctgctaaataccggggaaaacccaatctagaaatcctgtttctccatggagataattttctttgctgtctctgaaggtccatcatatgctgacatcttcttcactgcatgtcttctcttcctaagaatgatttcggtttcttgaggatgagaactgtgcttccctccttacttcccagaatacctagaaatgactcagaatggggtactcagtagatttgttaatcaacttactgatttacaggttctaaaatactgagaattgaaccaatgtacaacattgcgatacactaaataccactgaattgtacactttcaaaaaaacacacaaaacaatgcatcagtaaattctgctgaaaatattctgtctgcctaaaacagcttgggctaccctgaatttcagtttatctctttccaaaagaggctttggaagttgtaatgcgtagctacggtatgccaggagtcctccatgtatttgtttttagtaacagctttattgggatagaattcacccttttaaatgtacagttcggtggtcttacattcagagttgtgcatccgtcactaatttcagaacgttttcatcacctcaaaaaggaacccatacccatcggtaggcaccccccattctccctcccacatcccccatttcccatctttgacaatcatcagtctactttctagctcaatgaatttgctttttctgaacatctattataaatggaattctacagtatgtggccttttgtgactggcttcctttactcagcataattttttcaaggttcaagcatattgtagcatctatcaatacttttattcttcttatggctgaataatattccattgtacagatacgccatattttgtttttccatttgttgatgaacatttgggttgtttctaccttttggctattataaataatgcttctaggaacatttatatacaggtttgtatgtggacatatattttctttttatttttttatctacacctgctggaatagatggacatagttgtttttagctacctaatttttcctcctttgaagatggacatatattatatataattatatattatataatgcattatatattatataatgcattatatattatataatgcatatgttatatatattatatatactgtatatttatataacatatatgatatgtaatatatattacatataattatatataagatatataattatataatatatttttatttaaataaaagcaaatcctccaagcctatatatattatatatataacatacataatatattttatatatattttattattattattattattattattatttttttttttttttttttgagttggagtctcgctctgtctcccaggctggagtgcagtggcgcaatctcggctcactgcaacctccacctcccggattcaagcaattctctgcctcagcctcccgagtagctgggattacaggtacccgccaccacgcccagctaattttgtatttttagtagagacggggtttcaccatcttagccaggctggtcttgaactcctgacctcatgatctacccacctcggcctcccaaagtgctggaattacaggtgtgagccatcgcgccctgccggagatacatttttgaattcccctgggtgtatacctaggagtggaattgctggatcatatggtaactgtgtttaacatttggaggaaatgccaaactgtttcccaaagtggctgcaccattttacattcctactagcaatgcccgaaagttcccatttctccacattctcaccaacacttgttattgtcttttcacccttgtagtttttattatcctggttccccaaggtcagaaactaagtcataaaaggaactatctgtgtgtagatgcttcctgtgaccaatctttcatgattagcacatgagctatttgctgtgtaactcgaatatccacataattattaaagcatctaaatagagcacttgagtaactcatctccctattaggtttttgttattgttttactcaaaagaacattttccatcaaaatttcaaaggtctataccatgtgatccaggaattcttctaggaatttactttccaatttctcttgaatgtattgcccaaaggcagtgtacaaaattatttcatgcagcattgtcagtagtagcaaaatattggaaacaacatcattgtctttgagtataccatattatgtcctgtttagctgttgaacaatgagacagatttatgtgtgctgaaatggaatgatctccatgatattgtgaaaaagtaaattataaaacaggagacagagtatgctgccagttggagtggggggccttgggtgcagaggaagagctcatgcatacactgcttctgtgtgcttagaatacctctggaggaatgggaaagaagctgctgacagtggttgtcttcttcagaagggagctggctggctagggctggagtggaaaggaaacttactttttaccatatacccttctgtactctttgaatgttttagtcatatgtgtgtgctgtttgaatagtgcccccaccttttttgtttgtttgtttatttaaagaaaagcaaatcctccaaacctaaaaacaaagcttctgagccaactgctccttgcacaattctggcaaatgtctagctgtccacagcgttagacatggaatatttctactttgaccacagaagtactaacaatagtcaagttatatagagcagagtttctcagacgtggcatgtagggctggttcttttctttgtcatgagagtgctaggtatgtgcgttgtaggctgtttagcagcatccctggcctctactcactagaagccagcagtacccccgtctccattgcagcaaccataaatgtgtctaggcaacgcttgatcctcccttccccttcccagcagaggggcaaaaatggccctcatcgaggagcactgttgagcctctggggttctccaaaatagtgttttttctgtttttttgagatggagtcttattctgttgcccagggtggagtgcagtggcgtgatttcagctcacggcagtctctgtctcccgggttcaagcgattctcctgcctcagcctccctagtcgctggggttataggcacataccaccacacccggctaatttttatatttttagtagagacaggtttttgccgtgttggccaggctggtctcagactcctgacctcaggtgatccgcccaccttggtctctcaaagtgctgggattacaggcatgagcccaccacacccggccaagtgttttatgtgtggattagagcctggatgtgtgtttataccctggagtactggtacccatgcttcagaggaactgaacataattacaggggtgtaggaagtaaaagaaaagtgatcctttctctgattcattatgctcaccatcgaatgaaacttaagttggtgtgtggtgtggttctacccacttttgctgtgggtatgcaaacgtaaatatatatctttttaagaaaaatgggatcttcctatgcataatgttttacaacttaattttttttcacctaatagatggtggacatctttctatatcagtgcatattgactgatctcttttttaaaagctttgaggcggggcgtggtaactcacgcctgtaattccagcactttgggaggccaaggcgggcagatcacctgaggtcaggagttcaagaccagcctggccaatatggcgaaacccggtcgctactaaaaaagtataaaaattagctgggcgcggtggcagatgcctgactcaggaggctgaggcaggagaatcacttgaacctgggaggtagaggttgcagtaagccgagatcgcgccactgcttgcaacaagagcgagactccatctcaaaaaaaaaaaaaaaaaagccttaagttatatgactgattaatgaatatgaatatattcttgtaaaaatttttaatgacaaaagcccaggtgtggtgattcacgcctgtaatcccagcgctttgggaggccgaggcaggtgaatcacttgaggtcaggagtcgagaccagcctggccaacatgttgaaaccccatctctactaaaaatacaaaaattagctgggcgtagtgatgcacgcctgtagtcccagctactcaagaggctgaggagggagaatcgcttgaacccaggaggcagaggtttcagtgggccaagatcataccactggactccaacctgggtgacagagtgagactcttgtctcaaaaaaaattttttttccaacaatacagagtatatagaataagaggttaacttagtcccgctttaactctgtgtcagtcaggaaaagagaaatcataccagctaatttttttcccagctttattgagatgtaattgataaataaaagctgtatatatccaaggtatacagtgtgatgatttgatatacattgtgtaatgattaccacaaccaaattaatcaacgcatccatcaccacgtgtagctaccttgtgtgtctgtggtaaggacacttaagatctactcttttaccaaatttcaagtaaacaatccagtattattaactgtagtcaccatgctttacattagattcccagaacttactcataactgaaagtttgtgccctttgaccagtatctccccttacaccctggtccctgtcaaccactgttctgttctctgcttctgtgagttctacttttagattccatgtataattgagatcatacactttttgtctttctgtgtctggctgatttcacttagcataatgtccttcaggctcatctatgttgtcatgactagcaagatttctttttttttttttttttgagacagagtctcgcactgttgcccaggctggagtgcagtggcgccatctcggctcactgcagcccccgcctcccaggttcaagcaattctccgactggcaggatttcttatttatggctgaataatatttcattgtgtgatatatgccatattttctctaggacatttaagttgtttccatatattggctattgtgaataactgcaatgagtgtggaagtgcagatgatctctttgagatactgatttaatttcctttggattgatacccaatactaggcaacagagataatttaatataggaagttgatcaaatagatgttggactaaaaaatcaaagaaggcacaatatgagaacacagagatactgctgcagaaacagtaaccaccctctgggtttgggaggccagcagaggaagcttgggctgtcagaacctggcacttggggaaaaggtgccccctctgctgctgctggcacctgcggggcaggggcaagcctggttgggggagtgcaaaagacactgaagcccagaaccagctcttgctgccgaggtaaggggctcatactggggtgatacctaaaggaacagcaagcaaatgtgaagggtcaaatgcctcctactttttattttctattaggatcatgtggttaatttgaccattcagtccttaagaatatttgagtgccacccaaatattctacaacctaactagagaagtgaaaacttactattgcctagagatgggccccgtgctcactcagaaagataccatgaatggtgggaagagggagagtctctgtacaaaggataattgtgtctcgtcgctgtgcagagaggtgcctgctgctgctggctaggaaactccaagcccacttctctccactctgctttggatgctggggctgggactctgcacactacacttttcctttgtcagctggcttcctctgaaggttccaccagtcagggacacaagagagagcctgaaaggcatggggaagggaaaagggatttgctgtatccagtttgcctgtttgttctgtctgtaccaccctggtaacagcccttcatcctggcatcagcagtgtgtttcaacctccagctttctggggacattcacaaaaccagcctcatcacatcccgccaagccccctccttggaggttctagcagcagccaggcagcaccccttcctcagagttctgagttcaactcttcagacctcttccttagcctccaaccctggtaaactcaaccctggtaaactccagcttatccccccctcccttaagagtttccatcctgcttcatttcgttattacatctgtgttagcttagattccctttgaacattttcagtccactgacgcctgtttaagcaatgtcttatattaaattctgttataaaacctagtgtggagtcttttttcctgatttatccctaactgccatatccccactcttctccccaacagttactgtgatctgcattctaacatagcatgtacccacattgtacattaaacgtaatttgtatataactatgtaagattggaactgaatagcaggtgactggttgacctaatgtttcctttttgtatgtttagattttgtaattttccttgcatatttttgtaattaatacctttttccttttctcatatctcatacttttttttttttttttttgagatagggtctcattctgtcacccaggctgaagtgcagtgacacaatcacagctcactgtagccttgacctcctgggatcaagtaatcctcctgcctcagcctcccaagtagccaagaccacaggcgcaccaccacacctggctaatttttttttactttttgtagagacagggtctcactttgttgcccaggctggtcttgaactcctgggctcacgcagtcctcctgtcttggcctcccaaagtgctgagattacaggcgtgggccaccgtgcctagcctagctcatacatttttaaaacaaattttattttctaatacttacaggcttatagaaaagttgcaaaggtagtacttcctgtgctaccttttccctgttgctagcatcttatgttattatggtacatttgtcacaaccaataaaccaacgttgatacattattattagctaaagtccatactttattcaggtgttcttagtttttacttatatctgttttttgttccagaatcccatccaagataccacattacacttagtcatcatatctctggctcctcgtggcaatgacatttctcaggtttttcttgtttttgatgcccttggctgttttgaggagtactggtcaggtattttgtagactgtctctctattggaatttgtcttttttttttttttttttaatgattagactggggttatctcatatgtatgcatttggcccaggaaaaatttataatctccaggctctgggcctgtagtgcctaatggacaaagtagcctgtgtgcacacaaatatacccagaattggaagaaagtgtatgtctgcttttataggctatacatatcctacaatgtatcgtctatacctggtgccatgttttgccagtctttcgtatgtgtgtgtgtgcccaaggagtgtccctcggcctttgagaaggctacgaagtctccgggttatatgaatatgccatgttcatatagtcccttgcaaggagacatgtagattgtagttatttttgctattgcagacagtgcttcacattttgtgcacaagtttgcgtctctctgaaggaaattgctaggaaggggcctgctggtctgagcatgcccatttcacatgttgatgagcactgccaaacggctccacaaagcatgagccatatcaacaaagtggaaagtgtttgtttcatgatcaaataatgaatcttaagagcagtatttctcacagacgcagaatgttccagcaattctccttcaggcacatttcctttgctgaaacctttttagcaggtccctggagcactcatgaacaaaataaaaaaaccagaaaccctgtaaccctggttcctattaaagtctagcttggggcttttttttttttttttgacaaagtgtcgcaatgtcacccaggctggagtggagtggtgcagtctcggctcactgcaacttccacctcccaggtttaagcagttcacctgtctcagccccccggttagctgggactacaggcacctgccaatatgcctggctaatttttgtatttttagtagagacagggtttcatcatgttggccagatgggtctcgaactcctgacctcaggttatccacccacctcggcccccccagatgccgagattacaggcgtcatccaccgcacccagccttagcttggggttttttgttttttgttttttgtttttgagatggagtctcgcactgtcgcccaggctggagtgcagtggcgcaatctcggctcactgcaagctccacctcccgggttcgtgccattctcctgcctcagcctcacaagtagctgggactataggcgcccaccaccacacccggctaatgttttgtatttttagtagagacagggtttcaccgtgttagccaggatggtctcgatctactgaccttgtgatccgcctgtctcggcttcccgaagtgctgggattacaggcgtgagccagctcacccggccttaggttggggcttttaaatgacccttcaggtgtgtgtctgtgatgacttgaggcttttttttttactgtcttccagtgaaattaccagatgaatatcagtggtgagaaatttgattccttaaaatgtaaggaatttcattcttgaattgtgtgacaaaaccagggagcatgatttttgctccattcaggatctattcagtcaacactgagtatatagttgttgatggagactatgataggttctgaggatggatctgttatattctccataaatctgtatgtgagtcatgcctttgtttgcttcctacttgttctgtttactgggttttttttttctttgaggaaacaccttaattgcaatgaggtgtttattttataatataaaagtgtgaagagaaacattcaacaaacatttgagtaccaattcagttgagggcccctgtcaaggcccccaccctcctttttctgtgtttagtgagggtgtctgatgcataactgagcctcagttgggaggggctgaggggatcgggaacacttccaaggggaagcagctggggtgagagccccaaggtggagagaacttggcaaggttgaagaggaatggtgggcaggggagggagaagagtaaaagaagaggcagttagggctgcccgggtcagtctgggaactttggcttcctcttcaggtcactaggagccatcagagggttaagccagcagagacagcttcctgtttttaagacgttggtctggctgctgtgccgggagcaagagagaaagagacttgggggagttcagaagaggtgacggtggtggaggaaagtggatggatatggggtctctttcagaggtagaacagtggggtctctttcagaggtagaacagtgggaccttctgaccactggcaggtagagggtaagggagaggggaattgggttgcctgctagtttttgctttagctaactgggtagatgctgatgtcattcactgaggaggaagagggcaggttgagggtaggtagaaattcacagttttggtttggttgtagtttgggatccctgtggacaagaaaagtttccatgggtatattatgaatgccttctgaatcaagggtttaaatcacatcctctgatttattctccccaaagaccactagatgccgctgtttacacgggagcaattatgcagtacaagactcctttcctgaggagagggcacggatgccggagagggtactgatgccggagaaggcactgatgcctgacaggggaacccacagagaggggagcccctgcctttgagggggttactctttactgggagacatcacccttcagtgtggtcttcagacacatgtgatagcagtgtgacttcatatgggatagaaagctagggactaggtagtgtttgagctgggtcttcagggttgcaaggcatttcaggtgggggcaggacgctccaagcagaaggaacagccgggcaacagagcgcatctccctgcttatggggtagatggtacagtgaagaggttattggcatagggggttggacttttcagtgtttctcaacaaaggcacagttagccttttaaagaaggacggtttttggctgggtacggtggctcatgcctgtaatcccagcactttgggaggccgaagagggcagatcagctgaggtcaggagttcgagaccagcctgaccaacatggagaaaccctgtctctactaaaaatacaaaattacccggccatggtggcacatgcctgtaatcccagctactcaggagacaggagagtcacttgaacccgggaggcggaggttgcggtgagccgagatcgcaccattgcactccagcctgggcaacaagagcaaaactctgtctcaaaaaaaaagactgcttttccctgtgctgcctcacccattgaatgccagtaatctctcaggtcagactaccaaaaaaaaaaaaaaagactgcagggagggatggaacaccccagttgaaatcccttacccagtgcctaaccccggagtgatggagaagggggaagcagctctgagtctgcacccctccctcgtcttgtcttaattttgaggttctctaaagcagtgacctgttctgtgctttaataccacatagtgttatttaactgattggctgatgatcctggtgagtggacatttaactcggcttcctagaatagagaatgcctcttaccattccccagagaaggactgcaaagtagagaaattaacataaaaacaggtccctctgattagacttaatactaaaaacttcactggtactagcttaaatgctccatcttctttgtattcccccaaggcccggaagtcatataaactagtgtaggaactagtatagaactgctgacctaccacagaacaagtagactccatgctggaagcagatgtaccagttctacagtcagggataaatggggtttcacaagctctacctttttgaatgctttgtttgtaattgcgtgacatctccgtactctttttttccagacaatttatgaaaaccgaatatacagccttaaaatagaatgtggacctaaatacccagaagcacccccctttgtaagatttgtaacaaaaattaatatgaatggagtaaatagttctaatggagtggtaagttgttttctctgtcccacttgttccttggagttgacagttgctttgtacttaacatcaggagcttttagactgggcccaattcctaggttctttggttatttgttgataaactgtatcactgtgcataggagcacagatttgggatggggcctgtttcccaattatatctggcgatcactcatatagcacttaccctgggctagttctgtgctggtcgctttgaaatatgagctctttcctcatgccaccccagtgaggtagagatgaggaaactgaggcacagacgtggaagatctttcccagggctacacctttacccccctgggccttatttgtgaaccactggcatgtaatatttttttcctttaatggccttgcttttttatttttactaccataaatgaaaaacctgtctcagttgtcataactgggcaataatggcaacagtaaatattacaaaaacagagcaatgttaataaatcttgactccatgtgtcatttgccaaaagctttgagcctttgaggcctgctctcctgttcaaagaggagatcagcaagtgttgaagggatgctacacatgttaacgtcacgccaagccttcgtctttgagatactcagaagactggaaaattgaaaagagatgagctttgttacagtgtgtttagtgtttaatcctgaatctgagttccacctaaagtcctgagcccagagctcaacctgtgctttggggaatttattttgggaaatgctgccttaacctgagaggtgctggctctgtggcaggcccttgtcactggagcaggtgtcctggccaccctttgccttggctgtccgtactgccctgcatgcacatctgtccccctgacctgggcgcagtgaagaggacaggtcctgagcccggcagccgccagcccagcagcggccattattgaagagccaagtagggctgggttgagtctcacccaagtgtcagtaccaccgtttccttatcccagatagtaatggttcagggcacaaaagggaaaggcaggctgactggagggagggactctagcaggtaggtattccgcatgtaaggtattaggattagcagcaggttcagcttaaaaagtacatcttactccagtttgcaccttagcttaaccccggcatatagctattttgtttgagagtctgagagtaatttgcttttgtttgccttgttgtaggtggacccaagagccatatcagtgctagcaaaatggcagaattcatatagcatcaaagttgtcctgcaagagcttcggcgcctaatgatgtctaaagaaaatatgaaactccctcagccgcccgaaggacagtgttacagcaattaatcaaaaagaaaaaccacaggcccttccccttccccccaattcgatttaatcagtcttcattttccacagtagtaaattttctagatacgtcttgtagacctcaaagtaccggaaaggaagctcccattcaaaggaaatttatcttaagatactgtaaatgatactaattttttgtccatttgaaatatataagttgtgctataacaaatcatcctgtcaagtgtaaccactgtccacgtagttgaacttctgggatcaagaaagtctatttaaattgattcccatcataactggtggggcacatctaactcaactgtgaaaagacacatcacacaatcaccttgctgctgattacacggcctggggtctctgccttctccccttaccctcccgcctcccaccctccctgcaacaacagccctctagcctggggggcttgttagagtagatgtgaaggtttcaggtcgcagcctgtgggactactgctaggtgtgtggggtgtttcgcctgcacccctggtttctttaagtcttaagtgatgccccttccaaaccatcatcctgtccccacgctcctccactcccgcccttggccgaagcatagattgtaacccctccactcccctctgagattggccttcggtgaggaattcagggctttccccatatcttctctcccccacctttatcgaggggtgctgctttttctccctcctcctcaagttcctttttgcaccgtcaccacccaacaccttccatgacacttccttgctttggccagaagccatcaggtaaggttggaaagagcctctgacctcccttgtttagttttggaaccatactcactcactctccaccagcctgggaaatgaatattgggtcctcagccctgccaccctctgctgtcatcagctgatgcattgtttttagctcaggttttgataaggtgaaaagaatagtcaccagggttactcagacctgccagctctcggagtccttggtggttgaacttggagaaagaccgcatgaagatacttgtaagcacacatgatccctctgaattgttttactttcctgtaactgcttttgcttttaaaaattgaagaagttttaaacagggctttcatttggtcatccttgcaatccattggggtctagtttggaatctgacaactggaacaaaaagaaccttgaatccggtgcatgccttggttttggtgctgctgctgcttcccaagatcctcagcagggattaagaaggaacccggtgtgcacagcagatccccgaaattggtgggcttgacctcctggcaaattgctgcgtctttccacttgctgttcaggaccactaaatgctgaaatgtggatgcataccgaaataaaagcaattcattgtgtactaaaggtttttttttttttttttaatttagtatttgtgtaaaaccaccttttgaagcagcaactatcaagtctgaaaagcaattgatgtttccattaatctttttctggggggaaaaccttagttctaaggatttaacatcctgtaagtgaagtttaacataacagtattccataagcagcctttttattgtcagaccattgcctgattttaatataataaaaaaaaagtgtgcgttaatatttaacaggctgtacttttcttcctcttggcatattagggacagaatttaatgttttagatgctttgggattcaaattgacatcctaaagcaggggtcggcaaactttctaaaagggcctaaattagtaaatatatagactttgcaggccaagaggcaaaatctaaggacattgtgtaagtacttatattctgagagaaaacagatttcccaaatttttaattggtgaaattcaaagtggaattcagtttatttataatgctactggcccactaacgtgaggactggagttcttttaggagataacatgttgtttaactgggactcattagtgttccctgtcatcaagcctcttgcaaatgttcatctgtaaaaataattcttcatgctaaaagccatacagaatcagtcagtgggctagatttggcccatggatcatagtttgccaacccctgtcctaaagatggtaggtttttgttttgttttgttttgagacagagttttgctcttgttgcccaggctggagtgcaatggcgcgatctcagctcactgcaacctccacttcccagattcaagcaattctgctttagcctcccgaatagctgggattacaggcacccgccaccacacccagctaattttttgtagttttggtagagatgggggtttcactatggtgcccaggctggtcttgaactcctgacctcaggtgatccacccaccttggcttcccaaagtgctggaattacaggcgtgagccaccgtgcccagcccaagatggtagtttaaaaaagcgttcttcctttgatttaagtagcctcacaggtcttgagctattaagcctccactagaagccatttattggctggacttagtagtctattcagagaaaaaaaaaaatcatcggattgtcacatgtatttctgatgtttaaaaaaaatttttttttgatctgatgattaactatttgtctaccatctactgcatatgcagtgggaacgtgtctagtttttacccagagtttgaacttcctgctgtagtcccaactacatacaggtacgatcttggtgccctgtggcaggagcaggctattccctctggctgttggggccagctcaggtgtgagaagagctggctgtaaggaaagggccaggttcttcccaacaggccaccctccagaaagccctgcccagatttctttggatggtctttggagtcctctgcagggactggtgcccttcagttctgaaagtacatacattgggccagggaaagctgtgggttcttcatcctcagtcagccctcccaagggaggagaggagaggttccaaaattatttcaggccagatatggtggcccactcctgtaatcctaacactgggaggccaaggcaggaggatcacttgagcccaggagtttgagaccagcctgagcaacatagtgagacccctgtcgctataaaaagttaaaaaattagccagtgtagccgggcgcggtggcttatgcctgtaatcacagcatgttgggaggccgaggcgggcagatcacgaggtcaggagatcgagaccatcttggctaacacggtgaaaccctgtctctactaacaatataaaagattagccgggtgtggtggcaggtgctgaggcaggagaatggcatgaacccgggaggcagagtttgcagtgagccgagattgcgccactgcactccagcctgggcgacagagcgagactgtctcaaaaaaaaaaaaaaaaaggttagtagtgcacgcctgtagtccctgctagtcaggaggctgaggtgggaggatcacttgaatctgagaggtcgaggctgcagtgagccatgatggtgccactgcatccagcctgggcgacagacggaaaccctgtctctaaaaaataaaatggccgggcgcggtggctcacacccgtaatcccagcactttgggaggctgaggcgggtggatcacgaggtcaggagatcgagaccatcctggctaacacagtgaaaccccatctctactaaaaatacaaaaaattagccgggcgtggtggcgggcacctgtagtcccagctacgccggaggctgaggcaggagaatgacgtgaacccgggaggtggagcttgcagtgagccaagatcgtgccactgcactccagcctgggcgacagagtgagactccgtctcaaaaaataaataaataataaaatgctgctggaaaaccccagaacaaattcgtggttaaatctaaaggtggcctcttctgtgctgagttacccccaagaggaaaacaaatcctgtctcaaatcctagagtgtgcactttacctggcttccctgggtcacacctccggtccccagcccctgccaggtttatataccagaggggatgcgggctgggtggacctgggcttaaggcctgtgaaacaacactcaaaaccctctgagacagttgtttggatctgtgatcttgtgggcactgtgtcccacgtttgtgtaatttgctcttccttggtggtgggtttacagatggtctaaagtttatggacagagtttaagcctagggcacacaggaagtgcttgtctgaggttcagatgttgccacgtttttgtttttgttttttttccgagacggaatctctctctgtcgcccaagttggagtgcagtggagtggtcttggctcactgcaacctccacctcttggattcaagcaattctgcctcagctttctgagtagctgggactacaggcatgcgccaccacgccaaactaattttttgtatttttagtagagacagggttttaccatgttggccaggctggtcttgaactcctgacctcagatgatctgcccccctcagcctcccaaagtgccgtgagccaccgcgcctggccagatgttgccacttttgccaggtggtttccctgggtcacacctctggtctccagcccctgccaggtttgtgtaccggaggggatgcatccactggtaattttcactgtgtggaaacttgtggtgtggggaaacatctgtcgttacctgacaaaggtcggggagacagcaggtgtagaaagcaccccttctggctgaccaacagcaagccagccatggggccccactgccctggatctctgactgactctggtcttggggcaagagccagttccttggactgcatctccactggagaaagttctccggccctctgggtgggagcactgttggctgtactgcacctttagctgtggtgttgcataacgatgtggatggcgtcacataaacggagcggcccctgcctctgtgcccctttccaccctgcctgtggatccctgcttggcctttttttttagacggagtttcaatcttgttgcccaggctggagtacaatggcatgatctcggctcactgcaacctctgcgtcctgggttcaagatattctcctgcctcagcctcccgagtagctgagattacaggcatgcaccaccatgcctggctaattttgtatttttattagagacggggtttctccatgttggtcaggctggtctcgaactcccaaccttaggtgatccgcccgcctcggcctcccaaagtgctgggattgcaggcatgagccaccgcacccggcccctgcctggcctcttgcacctcccctcagagaaccttagggagcccagggacagtcacattccctctcttggcctgtcccttcttgacgtcactccttcatcacggagcctcatgacaaagttcaagatacagcattagggatttccttacttggcagaggaggaaattcctttaagaagaggcagcttggctgggctcagtggctcacgcctgtaatcccagcactttgggaggccaaggcaggcagatcacctgaggtcgggagtttgagaccagcctgaccaacacggagaaatcccatctctactaaaaatacaaaattagctgggtgtggtggcacatgcctgtaatcccagctactcaggaggctgaggcaggagaatcacttgaacctgggaggtggaggttgtggcgagccgagatcacgccattgtactctagtctgggcaacaagagtgaaactcagtctcaaaaaaaaaaaaaaaaaaaggcagcttgtgaaagcttcattctttccagtttgcaagaaacaagctgctggggtgggtggattgtacagagctctgagctccagaagataacagatcaacctcaaagacttccttgtgagacctgggcaaggtcacctgctagatgcagtcagctgtcacacacgggccaaggtgaccttgggagagaggagaccttaggctagagccacctcattgctgctggtggccctgtcactgtgagaagaagacacgggccacatccttggggttctgatatgtgtctgatgttatgcagctgggtggggacaggtgagtgtgaaggtgttactaagtactgggcacatgggctgagtgaatgccagatctttctgattttccaaggaagctgtgaaggcagatttgtacgtgaagtctccctacatttatgtgtcaattaacagagttggccaaaggcagtggctcatgcctataatcttagcactttcggaggccaaggctggcagatccgttgagccaacaagtttgagaccaggctgggcaacatggtgaaaccccgtctaccaaaaatataaaaattagccgggcatggtggtgcacgcctgtaatcccagctactcggtaggctgaggcaggagaattgcttgaaccagggatgcagaagctgcagtgagctgggatcacaccactgcactccagcctgggtgacagagtgagattctgtctaaacaaagaaaagaaaaacaaacaaaaaaagaggccgggtgcagtggttcacgtctgtcatcccagcactttaggaggccgaggcgggcagatcacctgagttcaggagttcgagaccagtctgaccaatatgatgaaactccgtctctactaaaaatacaaaaattagccaggcatggtggcagacgcctgtaatcccagctactcgggaggctgaggcaggagaatcgcttgaacctgggagatggaggctgcagtgaactgggcttgcaccaccgcactccagcctgggtgacacagtgagactccgtctcaaaaagaaaataaagggaatagagtgcagggcaaagtctcacctctgaccctgttctcccaaggcaagcaccagtgtgtgagcctctgagatggcacaggcagcacgcgagcaaacgcaagtgcagccagcaccactccgcattctttccccctcccctcatgcacttcccccacttttttacgcaaatgggaatgtgatctccacttagctcctccccgggatattcttcccagtgccctgcagagcagccttggggatccgctccgtagttaagcgcagcacacccagcacatgaagggccaccaccacggtggccaggcctggactgctgggcctgaggtggtctctgctgctctgctgcccgctggcctcagggcatgtgtgtgcatttgcatacctctgtagaacacagttctaggagcaggtttctccatccaaggatacaggcatattttattttattttatttattttaatttatttatttatttatttattttatattttattttattttattattttattttatttattttatttttgagacagagtctcactctgttgcccagactggagtgcaatggcactatcctggctcactgcaacctacgcctcctgggttcaagtgattctcctgcctcagcctcccgagtagctgggattacaggcgcctgccaccatgcccggctaatttttgtatttttagtagagatggagtttcatcatgttggtcagactggtctcgaattcctgaactcaggcgatccgcctgccttggactcctaaagtgctgggatgacagacgtgaaccactgcagctggcctcttttttttttctttttcttttctttttttagatagaatctcactctgtcacccaggctggagtgcagtgctgcgatcccagctcactgcagcttctgcatccctggttcaagcgattctcctgcatcagcctaccgagtagctggggattacaggcgtgcaccaccacgcccggctaatttttgtatttttggtagacggggtttcaccatgttggccaggctggtctcgaactcctgacctcaaatgatccacccgccttggactcccatgcccagtgtattttaactatctcattcattgcagtagttattcctttgtccctcttgcaggtgggcgcctcatctggcttcttcactgccatgaacccagtgttaaaaatagtgttgaaggctgggcacagtggctcacgcctgtaatcccagcattttgggaggccaaggtgggtggatcacctgagatcaggagttcgagaccagcctggccaacatggtgaaaccccatctctactaacaatacaaaaattagctgggcgtagtggcacgtgcttgtaatcccagcaactcgggaggctgagacaggagaatcacttgaacctgggtagcggaggttgcagtgagccaagatcaagccattgtaccagcctgcgtgacagagccagactctgtctcaaaatataataataataggcctggcgtggtggcttacgcctataatcccagcactttgggaggcagaggcgggtgcatcacttgaggtcaggagttcaagaccagcctgatcatcatggtgaaaccctgtctctactaaaaatacaaaaaattagctgggtgtggtggtaggtgcctgtaatcccagctactcaggaggctgaggcaggagaatgacttggacacaggaggcggatgttgcagtgaaccgagatcgcgccattgcactccagcctgggagacaagagcaaaactctgtctcaaaataataataataataataataaataaataagtaaataaaataaaaaatggtgtctaggccgggcacggtggcttaagtccgtaatcccaacactttgggaggtgaggtgggaggatcactgaagccaggagttcatgaccagcctggccaacatagtgaaaccccgtctctactaaaaatacaaaaattagccaggcgtggtggtgcacacctgtaataccagctactccggaggctgaggcaggagaatcacttgaactcgggaggcggaggttgcatggagccaagatcacaccattgcactccagcctgggtgacagagtgagaccctgtctcaaagaacaaaacaacaacaacaacaaacagtgtccagcacaaagtctgactgtgtaaactgaatgaatgaatcactcctcagggctgggcctggccttcctctcttggtgggtcacatggacctgtgaggccattggcagtgacaagggaggggtcccagtggccccgtggggcctcctgttccctctgccctgcatgcagggaagctgggtggctgggtcagggggcaacagatggactggctcagaagcctggccttccctggcaggaattttgagaatcagatctgagcaagtcccccttacacccattgccagccatgaaagagagcagacgggggttccacgacccagggttgtccatggtgggcaggaagctaagatggaagccactgctttctgattggccagggaaggcctgtgcctcagattcttcagggtcaccagcagaatccagagaaagcacaggccacagtggcttggaggatcctggagaggccacccaccttcttcagaagctgatggcaccttcattccctaggcctggccctggggctggcttcatcttggggttcccagtgggagattctagtgcccctgccaggaaccaggggaactgatgtggcatgccaaggacattgattaatataacagtgatgtcaatacctcaccctcagtccaggatgctgtctgataggtgacaactgatactggttgggtaggtgtggtgatatgagatttcccaccacccccccttttttttttttgagatggagtctcgctctgtggcccaggccagagtgcagtggcgcgatctcggctcactgcagcctctgcctcccatgttcaagcgattctcccacctcagcctcccaagtagctgggactacaggtgcgcaacaccatgcccggctaatttttatatttttagtagagacagagtttcaccatgccgaaattcccttttaaaaatacccttcggcaggcgggcacggtggctcatgcctgtaatcccagcacttagggaggcccaggtgggcagatcacttgaggtcaaggagtttgagaccagcctggccaacatggtgaaaccccgactctactaaaaatacaaaaattagctggccatggtggtgcgtgcctgtaatcccagctactagggaggctgaggcaggagaatcacttgaatctggaagacggaggttgcagtgagccgagattgtgccactgcactccagcctgggagacagagtgagactgcatctcaaaaaacaaacaaacaacaaaaaaaacccagcaactttgtcttggcacagtggttcatgcctgtaatcccagcactctgggaagccaaggtgggcagatcacttgagtccaggagtttgagaccagcctgggcaacacggcaaaaccccctctctacaaaaaatacaaaaattagctgggcatggtgttgcacacctgtagtcccagctactcgggaggctgaggtgggaggatcgcttgagcccaagaggtggaggttgcagtgggccgtgattgtgccactgcactccagcctgggcaacacggcgagactctgtctcaataaataaataaacatatacatagatatagatatagatatagatatacacatatatatatacacttaagtaaaaaccaattatctaggagcaaatgtcaagtaaaagtacaggtagggctcagatgcggcaaaaaatcatgttggggtaggagcctgagtaacatcagcgagcgcatacaggtttatcctttggcctctggcccagctgttaatgatatattcatgtttattatctgccccctcccacccccactaaaatgtcagcttcaagagggtagggatgaggccaattgtgttcacggctgtgttcctgccatctcacacaatgttgggcatacagtaggtgttcagtgaatacttgtgaatgggtgaatggctggctggaaggccatgcatgagtgaatgagcggaggtgacaccttcacatcctctctccgcctcggtggatgccagtgcaggcccaggagtcagccgtttccactaccagctgtgtggccccgggagggctccttaacctctctgtgcgtttccgttgccatttcgccgggttattctaaggattacgtgtggttttacatggtgtgggcttcttgcagtcctcggcacggagcacccctccgtaaatgttatttcgctattgttctttcctttcctttcggtgtattctgcttatgtattcgctattgctcttccccatctcaccgaccagaagagtgaagctcctccccgctctcctggcgcccggcttccccgttctggctcgggcctgcacgcccgcccttggccagcagagggcgctagcgctctagggaccaacgctccggctgggccgggccacgcgtcatctctcagccgacccgaggctggggctggaggaggggacaggcgtgaccgccggggcaggggtggaccaccggacatctgggtgtgtgcctttggcacagcgggagcctgctggaggctcccaaagcggagtgggcaagctttttcccccagtgcgcttccaaccctttttctttctttctttctttcttttttttttttttttttgcgacagggtctcttgtcgcccaggctggagtgcagtgatgcgatcacgggtcactgcagcctccaactcctggcctcaagcgattctc

SEQ ID NO: 751 - DNA, 2403 bp, Homo sapiens
tatcacacggcacgacttcatcgagaccaacggggacaactgcctggtgacactgctgccgctgctaaacatggcctacaagttccgcacccacagccctgaagccctggagcagctatacccctgggagtgcttcgtcttctgcctgatcatcttcggcaccttcaccaaccagatccacaagtggtcgcacacgtactttgggctgccacgctgggtcaccctcctgcaggactggcatgtcatcctgccacgtaaacaccatcgcatccaccacgtctcaccccacgagacctacttctgcatcaccacaggagtaaaagtccctcgcaatttccgactgttggaagaactcgaagaaggccagaaaggagtaggagatggcacagttagctggggtctagaagatgacgaagacatgacacttacaagatggacagggatgataattgggcctccaagaacaatttatgaaaaccgaatatacagccttaaaatagaatgtggacctaaatacccagaagcacccccctttgtaagatttgtaacaaaaattaatatgaatggagtaaatagttctaatggagtggtggacccaagagccatatcagtgctagcaaaatggcagaattcatatagcatcaaagttgtcctgcaagagcttcggcgcctaatgatgtctaaagaaaatatgaaactccctcagccgcccgaaggacagtgttacagcaattaatcaaaaagaaaaaccacaggcccttccccttccccccaattcgatttaatcagtcttcattttccacagtagtaaattttctagatacgtcttgtagacctcaaagtaccggaaaggaagctcccattcaaaggaaatttatcttaagatactgtaaatgatactaattttttgtccatttgaaatatataagttgtgctataacaaatcatcctgtcaagtgtaaccactgtccacgtagttgaacttctgggatcaagaaagtctatttaaattgattcccatcataactggtggggcacatctaactcaactgtgaaaagacacatcacacaatcaccttgctgctgattacacggcctggggtctctgccttctccccttaccctcccgcctcccaccctccctgcaacaacagccctctagcctggggggcttgttagagtagatgtgaaggtttcaggtcgcagcctgtgggactactgctaggtgtgtggggtgtttcgcctgcacccctggtttctttaagtcttaagtgatgccccttccaaaccatcatcctgtccccacgctcctccactcccgcccttggccgaagcatagattgtaacccctccactcccctctgagattggccttcggtgaggaattcagggctttccccatatcttctctcccccacctttatcgaggggtgctgctttttctccctcctcctcaagttcctttttgcaccgtcaccacccaacaccttccatgacacttccttgctttggccagaagccatcaggtaaggttggaaagagcctctgacctcccttgtttagttttggaaccatactcactcactctccaccagcctgggaaatgaatattgggtcctcagccctgccaccctctgctgtcatcagctgatgcattgtttttagctcaggttttgataaggtgaaaagaatagtcaccagggttactcagacctgccagctctcggagtccttggtggttgaacttggagaaagaccgcatgaagatacttgtaagcacacatgatccctctgaattgttttactttcctgtaactgcttttgcttttaaaaattgaagaagttttaaacagggctttcatttggtcatccttgcaatccattggggtctagtttggaatctgacaactggaacaaaaagaaccttgaatccggtgcatgccttggttttggtgctgctgctgcttcccaagatcctcagcagggattaagaaggaacccggtgtgcacagcagatccccgaaattggtgggcttgacctcctggcaaattgctgcgtctttccacttgctgttcaggaccactaaatgctgaaatgtggatgcataccgaaataaaagcaattcattgtgtactaaaggtttttttttttttttttaatttagtatttgtgtaaaaccaccttttgaagcagcaactatcaagtctgaaaagcaattgatgtttccattaatctttttctggggggaaaaccttagttctaaggatttaacatcctgtaagtgaagtttaacataacagtattccataagcagcctttttattgtcagaccattgcctgattttaatataataaaaaaaaagtgtgcgttaatatttaacaggctgtacttttcttcctct

SEQ ID NO: 752 - protein, 217 aa, Homo sapiens
MAYKFRTHSPEALEQLYPWECFVFCLIIFGTFTNQIHKWSHTYFGLPRWVTLLQDWHVILPRKHHRIHHVSFTYFCITTGVKVPRNFRLLEELEEGQKGVGDGTVSWGLEDDEDMTLTRWTGMIIGPPRTIYENRIYSLKIECGPKYPEAPPFVRFVTKINMNGVNSSNGVVDPRAISVLAKWQNSYSIKVVLQELRRLMMSKENMKLPQPPEGQCN

SEQ ID NO: 753 - DNA, 52312 bp, Mus musculus
  misc_feature (1)...(52312): n = A,T,C or G
catcaaacccagagatctgcctggttttgactcccaagtgctgtgattaaagatgtgcaccactaccctctggctaggaactgggttatgttttgagatctcctaagccagttcccattattgtgcccaagtggtttctcctctgcttaagttcctttagttttagtctctccatcctttctttgtgtttctttttgtgatgctagaagttgaacccagaaccttgtggatgctgggcaactgttctgcccccaagttccccctccacccaccctcttgtcctaaagagaaatgccttatttttttcatggctatagccttaatatgcactttataagaattaaggtcttgtggaaatacataatttagtgaatgcctcgtgcagccagctgtctaagagatattgtgtgtggatggatggactttctctctctctctctctctctctcatacacacacacacacaccatccttttacagaggtgaatggccctgggaaccataactatgaactgggtacttcgacttgcctcagttaatcttgactctggtatgaggctcctattttaccagtcagtagacttgaggtttctggatagctggtgatatgtcaccgatgcttgctttgtaaacactgatggatgcacctacttcaggttcttgtctggttatctttgtgtgataaatgtccacattgagaatcacttggccaagaagtgctcattgaaagctggggttgcaaatgatagaacatttacctagcatgcttgaggtcctgggtaccgtcctctgcattatcataagtataagctggtcatgggggcacataccttgatctcagcaccctggaggaggctgaggcaggaggagtgccacagatctgaagcccactgttctgcacaatcagcttcaggttagccagggctatgtagtaagattctatttcaaagcaaaaagtaacaaaaattcaagatttgcttgaacctttcatttatcttctagtaagtgttattagcaagaggaacgatttaggaaacaggacagtcctttcaaagacaagccgtgttccctctccatacactgctggtccagcaccactcctcttactgatcagctgtttacgtttgaatgcagccatcctgcatatggacctaacaaccaccatttttcttgcttcagagtgagacaatgcctagttctaaaaacaaagcagcttttagaggtagctagttttcccaaatggactcattggctatgctgttggtgagttaaagctgcagaagtttctgcatgccttttgttgcagcccacctttctcccatgtggcatgcggtgagctccaggggcctctgtaatcctgcactgactgcttctgctctgcagtcggtggggaatgcttctgctgtgtgtttggcacggctgtatggttacatatttgtagatcacttctgaaaacctttatcctcctacacaactgtgtcataagaaatgttctttgtgtaggtcttgagctgggcacgacagcattatagcagtgcagaatatgctgattatagtcattcagatactgttggcagtttatgggatctttggaaactattaaagaatgtgcatggattgagattcatgatccaagccttaaaggaaatattatgtatttcaaacccatagataaatgaattaaaagtcacatgctcttgaaatgtgatttctttttataatctttagaagctcggcaactcaagttagacatcctgagggcaacacgtgttgggggacctgggggtggcgtggggagggaatgtgtttgttgaaattgtccaggagcaaagctcggctcacttgaaacccagagatttgtcatccaaatatgtgcagattgctgatgctataaatagtttgaactcaagtaaacagcctcttcccctagctgctgtttggctattattcacatgccagaacaggctgggagcagtctgtacctcggtgctttgcacccaaatcctgccctgtctgctggtggagtctccagcttctgtgagctttaagtgactggatcaggtgtttgcccatttacctgcactcatgggacttgactccgggccctccggttgtgaggctctgtcaccctactcaactgctctagaccagccctagccaagattattggcagaatttaaaagccctggaccgcgtggctggaataaagcagatttgggaggcgcaggtggtgtctttcagagcagagacatgcatgtttcttttagaacccaacaaaagtggcatcagttatgagaagaactctgagctctctgtaccagctgtctgagctgggtcaggttctggctgctggcatttccagagccccttgaagactcatacagaatgctgacagagcaaccgaggacattccatgcttgattactctgcttcctttgtggtgggctctcttctccatagtctctgcctgctcttatctctcttcagcggtattcatttactgcggctgccagtcaaaggcttgtggcagatgagaaggtctggtagaaagagcgatagataggggtcaggaatctgaatttttgagcaaatacattacttacctttttactcttcatttttcaaatgaggatagtcctggacaccccacccccttccattttcatggatatgatgagaaaatttacatgaaattgctttctggtttctacccaagtagcagaatgtgaaggagagtatgactgggtcctgggggtcgtcgagacagttaggactaagaatgcacacagtgaggtgtcagggacagcagcgggttcattactgtcccttaggtgattgagggttccaaccttggagttacattgggcgtagagatggtgaccttaacacaaggaccagctgaaatgaaagctgatgtaaatgctcttgaaatgctaaaaggtaaaaatttaaagtacaggtaagacacaactgagagaatgggtgagttgttgcttttgaaacagaggctcattatgtagccttggctagcctagaacttgttgtgagctggccttgagctccaaattgctcatattaaacctttgtgcctttgtgcctggccaagaccaatttaaaagacaaaacaaaatacgaggccaaaacggcctcattctcctgtgtcctctcactctgagtcaactatttatgttagtgtcactggcctttaattttatgtagtctcctatagtgtaggctgggcccaaactcactatacagctaaagactgacataaatttcttttcttttctttctttctttctttctttctttctttctttctttctttcttttttttttttttggttttgttttgtttgtttttggtttttgaagacagggcttctctgtgtagccctggctgacctggaactcactctgtagacgaggctggcctcaaactcacaaatccacctgcctctgcctacgaagtactagaattaaaggcgtgtgccaccactgcctggctgacttaaatttctgatcctcctgcctttatcatagtgcttagatggcaactatgttctaccatgcatggcctgtttgtttatatctgatgcctggattaaagccagggcctcacagcagctaggcaagccttctatcaatcactgagctaccacacaccaaataaccccacaaacaacaaaaacacacagtttttttatgtttagtatctcacatgcaataattaacaaagatctccccttcacttacatattcacttttctagtcagagttaaacaagaccttatatttctatattactctttatcaaaaacgcttcactatatagcccaagttgtccttgaactcaacatccttctgcctcaccttcccaagtgttgggatttcagacccgggcaagattaagtggctgtcaaccatgcactctactctcttcttgagcttgaagactgtcttcctccatctcttgaatcttctaaaattttttttttttttttttttgtggtttttcgagacagggttttctctgtgtagccctggctgtcctggaactcactttgtagaccaggctgacctcgaactcagaaatccgcctgcctctgcctcccaagggctgggattaaaggaatgcgctaccgccgcccagcctcaatttttaaggatactttcctatcttctccttttttgccctttctttcctggaattcctaattagtggcatgttgaacttctgggattgttctaaaatcaagatcccttttgccttgtgtctccctctccattgtcttttcctgtgtgtggtgtgtgtgtgtgtgtgtagtgagagttgtttgaggcacttggaatgactatatcagagatgttttggtctttccactctggtaggagaacacagcaggcatctgctaagaggaatgaactaacctagacactagtgtggatgccaagaattgcatgctgaaaggagcctgatatggctgtctcctgagaggccctgccagagccttacaaatatagaggcagatgcttgcagccaaccaatggactgagtgcagggtcaccaatagcggagttagagaaaggactgaaggagctgaaggggtttgcaatccaataggaagaacaacaatatcaaccaaccagaccccccagagctcccagggagtaagccatcaaccaaggagtactcatggctccagctgcatatggagcagaggatggccttgtcagccatcaatggaaggagaggtccttggttctatgaaggctcgatagatgccccagtataggggaatcgagggcagggaggtgggagtgggtgggtggttggcggaacaccctcatagaagcagggggagggaggatgggataggagggttttaggagggggggaaatcggaaaacatttgaaatgtaaataaagaaaatatccagtttaaaaaaaaaaagcgaaataagctaagagcatggagctaatgtgactccaacaaggcctcctcaagaaagtggcatttcatgtaggatctgattaatcagaaccagagggtaggtaagacccaaagcagacaacctgcatcctgttaacctgtaggttgtgcagccccaggagaaccttctgccttctggaaggacactaccaggtggcttagtaaagtgcttgctccagctgtgaggacctgggttcaatatccagaagtcatttaaaaagcaggggtggtggcatgtgtcctactagccacagggagaagattgagccttggaaagtcaagggctagcatggcctatgtacagagttcaagtagatctactgaaagtgtctttgtgactcttgtggggttgactgcactgcttcccaaatgattcaaatttctgattccaaacctgattttgagatctatatgctgtacactaggaggctctctggttagggctgcatgctaggctgacagttttcttgccttttttccctgttcttctatagattaccattttttacataagcagttgttataattgagaatataatggcaagaagctctccttgcagttgtaaatctcggtatgtttttctgttgtctagaaaaaaggcgttgcctttgtagctttgtggcacaaagaacaagtaagctgtaatctgcagcctgcctttgatagggcacaggctgtacaaggtgcagtttttcttttttaagcatgcacaactgggtgtagtctagcacaccattaatcccagcactgtcaggctgtctctgtgtatttaaggcctgaattctcagtaaattcacagacagccagagctagtgagattctgtctcaaaacaaacaaaacagcatgcggtttacagcagttctgtgcatcaagaaagtgaatagtgatagccagaatctattcatgtatacattcctgctaagagataactgtggtcagctgtggtggcacatgccgataatcacaacatttggaagcctgaggcaggagggttgccacagtttaggctagtcaggattacagaatgaaacccagtctaaaacattaggagacccccacaccacaccaccaccgccagccctcaacacacatacacaccaagacagacatacagacagtcctcaagtgccaaacaaagaaaaaagaaacaccagtgtattgttaactaaacagatggcccagttgacctgtgtaagtggagggaagagtcctgctgcctgcctcacatgagctctgtggggattggggagctaatatatacagaaatatagactgtcacctgcatactataaacattcgacaaatgtttttgtttatgagttttcttatgctactagggggtctcataatccatacaaaatattactcagaaacagatcttttccttaagactctagcaaaggagtagtactcacctgggaataaaagctgctcagaggagaagaggctaaggcagcactgaggatgttgaaagggcagggtcaagggcagcttcattgtgaagggctgtgtgagcctcagtctgcaccgctttcctcccctccatcctcacatggggctgatactctgtctgcagagaggcccttcagaggcaatggcatgaggtgtgagagcatcaggcctggccctggagatccatccctgagccagagcacagcctgggcggcttccttcctgggcttttgagaaactcgccgccccccctccccccatcagcatgcttgtcctactgagtactcatgagagcccctgtctgaccatttgatcatcactcagatgatgtgagatgacatgtgtgtgaggcttggctgtgcgtgatcctggtttatatgtgtgttctactgttgtcagctgtgagacagcgtgagtgtgccatgcctgtaggttggtggtgttagcattctctcttcatgcactctgccacagatccacaaggcaagtgccaggggcagcatgctgaagaaattgatgttttgtgaatgagctcctattatttttgttccaagccagagagggtagtgtcagtaaagtgaactttcttacaaagcagccttatttcctgatgccccttgtgcttgtgggataaaggcacagctaaacaatgggttagtcttcagcccctccagacagagcactcctcccatcccccagcagctctcagaagacctttgtgcaggactcagtctgacattctggagaagtccagtgccttcctcccaattcctctcactcagcaccagggcggagaaccaccacgaaacagttagaattagaaaattgtgtctttactattaagacattgggcgttgttgttgttgttgtgacaaatatttttgtacttatagtatgtgtcagtcacttaatcctcacaagaaactagaagggtctgggagatgcctcagtcagtacgatgcctgccgtgacggcatgaggaccctagcacccacataggagtgaggcatggctgcatgcatctgttccccagtgcctagccaaatcagtgagctccagcttcagtgagagcccctacctcagaaactaatgtggagggcggaagagattgctcggtggtcagagcacttgctgctcttacagagaacccaggttaggttctcagcaccctcactgtggctcacagccaaccataaactccagttctaggggatccaaagtcctcatctgacatatgcatgcaggtaccaccaacacacatagaacacacatatgcatgtaggcaaagcacttatatacatgaaataaaataaatctaaaaagaaataaggtggaaagtgattgaggaagatacccggcatgcatctctggtttccatatacgtgtgtacatttttacacacacacccacacaaacatgtactcacatacagcacacacaaagaacttattgggggaagttatgatctcatcctccattggacagccaaggcacagacggatctctgtaggttatccacagtagcaagaaggcagagcctgtagacctcacatctctcccctcctctcaagctggaggtttttattccatcacagttcaccaacttgtccaaagccttctggttggcaaatacactcccaagaagagcttgtttgcttgagttctgataaacatcagagttttctgagaactaattaaaattcctgttaagttacaaagggccacagcctcccccatctaccataaagagctgtgaccagcagagttccagccctaacttccacccccatggaagtagctatacacaggtctgctctgcccctttggggagaggcagttaaaaccacctagtattttggttacaaggtcagtaggccctccctctgatctggtaagtacgtcccttatcagctgggtggggcgttctataagaatagcattggcagtgtgtgatgctcatctgacttaggaggtaagagcttcagttctttctagttctgaaccaccccccccccctttttttttttcccaagacagggtttctctgtgtagccctgtctgtcctggaactcactttgtagaccaggctggcctcgaactcagaaatccgcctgcctctgcctcctgagtgctgggattaaaggagtgcgccaccacacccttttgttttcaagctgtgtaactttaagctaatcatataacatctgcttcattttcttattgaggaaagagagtaataataattctcctaggggtgtcgtgagaatcaaaatagatgatgtatcacaatgagaaccatcatctgtccatgagctagcatacttggtctgtactgacggctgtctctgtccctctttgagtgtttcttctcataatcctaaaagccactagcatctcatttaagttaggaaaactaagaggtggagactggggtctagggagtgggggtatgtgtcatgtcggacccaggttctgtccctgactcttcctggtgttcacagtccctgcctaggtctccctgcttatcacaggcaagagagagaggtttgccacatcttccttggtggagcacactgcacatgcaacattcttgttatctagcctagtggttgctgggtttgtccctaaggacagttaaattctcttactgtttatcttatctagtagtttttgttgtatttcatgccctctgggactccttcactaaattcttttgggttttctcacagagaaatgttttagttcccctataaaggggaccccgggagtccacaaggccaggcatcttgggccagggtttcttcctgctcaggcatgtggctgttagcctggaatagaacactccaagattcatttgataagaagctctgcacacactggcttccagtggaatttcaggcaggaaagacacccatgttaccattttactgatgaaaccaaagacctgtgacttgcttaaagcagggcccaagacctgaagccagttctccagtcaacagagcagtgttgtgtcccagcctttcctgtgtatattcataagaacagaaggacacatgcacgtactgtgcccagcacactcctaggaagccagagtgatgaaacagtttggaggactgggcagagggcagagatggagagacacagagagggcttctgcctggttagcacatcataccccaaagaaatgaatggaagcacagccacacgcaggcagccgccgtcctcccagggactaagaggcagatttatgtggggaatcctggccactgacccactacataggaagccttttgtcactgaggccgcagcattgaaaattgaaggaaggatgtttgacaaatgtgacgggcctgggatgcagttacagccctctggctcattgtccaaaggaaatggatctctcttgtggacagagaggtggaaactgagcaagtggggtgagtggttgacatcatcagaccgggaattggattacaacaaatggagacttacttggccagagactgggaacacccactaaaacctcgaagtgcttttcatttaggagacacagggagagggaaagggcaggagcgagctagctgccccagcctgcactgcccttctgagtcctggcttcttgttctaccttcccatctgacctaggatccctggccttggagacttggctcctgtgagtactatcttgccttctgtcaccctagcctgctgcccacaaaggtctatttctatcttccgacgcatggacgattgcttccgacattacagccttccctgcagctgtccaaggctgtagaatgtgagcctcattctcacaggctggctccatcctcactggagattttctccacatagtttcagtagtctctacagccttcagagcacccacttgcccacatacaggctaaaaagccaagtcaaaccttagaaattgcggtccgtaaaattttaatggttatctgattacagagggtttttaaaattccaattaaaaacgttttacaaattctagaaagacttgtctcacatatataaaattggtatattaaaactccctgtcttcctgcctctacctctcaagtgctggtaatatgttaaatgccagtttgcttaggttgtgaagttacctcccatatgttgtagcaattgtgtggagaactctaggctctgaaggagtgatgtttagccttggctttgtggtcttttccttgcttccttttaaaactttgtgtctagaaagtaaacagacatgtaagcccttaggctttcttgctcttggagcctgttttcagaactttcaacaaggccagccactttgagcagggggtggtggtgggggcttgttccctctaggtccctgtgcagggggtaggggggcttgttccctctaggtccctttggtggatctcagctgaggtcctcagaattggtttagagttggtgctagagttggtttatggcatgctgtggcccatctccacagttaggttgaatatacttaatatattttaaattatatattatatagtttatgtgtataaatgtttatgtgtataatgtgtgccagaaatgggcacagaatcccctgaaacttgagatacagataggtttgagccaagcaggttaaatatatttgagaagttatagctaggagggaaatgttccagccttggaaggcaaaaagcagagatggaataggtggagcccaggtggagcacttgccaccgaatacatggcctttctggtttctgtctccagcatcacaaaacgataaattcaccatgtagaaaagtcacccaaggaaagtatgtggccttgggcagcatctcatacacttggacctgaggtttctttttttttttggtttttcgagacagggtttctctgtgtagccctggctgtcctggaactcactttgtagaccaggctggtctcgaactcagaaatccgcctgcttctgcctcccaagtgctgggattaaaggcatgcgccaccacacctggcctctgagttttcttatttgtaccgaaatgagggaacaagagcagacaaacttgtggatacttcttttctttgaggctgaccattacagcctttgggcaaagtgccctaggtttttagtatttcaacatggctaaaaactagccaggtgggaaaatcaagaggacactgggcaagaggcatggctccgtggataaagtgcttgcttgtttaaaagcacaaagacctgaattcagatcctagcttatatgaaagttgggtgtaatggtaagtgcatttgtaatgccagagttgggggcatggagacagattgctctcaagagctcaccaacaaacagcttagcccacttaactccaggtttaatgaaagaccctgcctggaagaagaagagtgggatagaggaggtccttgaggctggcttctggcttgcatactcatgcacacagagatacaggcagacggatacagttctggcttgcatactcatgcacacagagatacaggcagacggacacaggtgaatgcccctcctacacatgaacatgcatacacaacacatacacaggcagtattaagttgcttgtgaatttttacggttttctacagatttggtgtgcctgaaagaggggaaaagttggtgtctacaagcatttgtatttaagaggggcttagaaaaaatgacttttagtcaacaccctgtcagtggtcaaccctttaccatagtcgatggttactgtgaatcccctgcccatctttgcagagggtaaatatttccatattcttctgaactccttccttaagtcagctgagctccttgtacgtaattattggctaacttcaattcctgtgtctccattagcctgtcactgtgatctgcaatctgtagaaagtctgacacataggtgaaggagataattctgttttcatttaaatttacttttactaatgcaactgtgtatgtgtgcctgtatgactctgagccccacgtacccttagagaccagagggtgttgataggatcccctgggaccagagttagaggtgtttctgagtagttacctgatgtgggcactgggaatcaaatctggtcctatggaagaggggaccatgctcttaactgcagagctgtttctccagcctgaacaattccacttccacttaaaacctaccactctagtttttagtttgtcaggagagatgagcggaggaagggggaagtgcccctgtacttgcctatgtgccctttctcttaacctagtgtcctggccaccactgcacagaaaagggacgtccacagctaggatggagacaaaagccaaagtcagctgtgttccaggtcttgttaagtctttgtctttaaggccaccagagcccctaatcctcaggaggatgtattgtttggaaactctttgaagtaaggtcagggttagagggagttctcagaggcccttggcatatcttaaagctgcagacttccccagtggctgtgtaaggtgaacctgtagctaccctgtagcaaggacagtgggaggcctagatatttttctgtgcctcccccccccccccagcctggtcccaagcattggtgactctggacagaagccatccttctttctaaggtggtaatgaggccatgctgctctgaaagggtggagtttgggctgccgggtccctgcatggaaactggggtggaaagaggtggcatgtcttcttcatatgcaaggtgagggtggctttagtttcttgtttgtgctaccatagtgccattacaaggctttcttgacgtgttccaccctggaggcgagtttacagcatcttaggaatagaggtgggcaaagctgggaccacattcagatcaatcccacagggtgttgtgggggtagatgaaatacagtaaattagcacctatatattagtaccaaactcagatgggcatggcaattcacacctgtagtcctagcacttgatgctaaggcaggaggatagccatgagtttcaggctattctgaaccacaagcctatatagaatgagttccaggccaacctgggctgtgaaaccttgtcacccaaacaaacaaataaacaacaagataaaaacaaaacacaacacttgggaggcagaggcaggcgaatttctgagttcgaggccagcctggtctacagagtgagttccagggctatacagagaaaccctgtctcaaaaaaactaaaaaaaaaaaaacccaaaaaacaaaaaccacaaggccataaaggtggcttagagggtgaaagagcttgctgcacacatctgtccatctgagttcaggtctcagaataatgaggaaggagagaactgacacggcagggtgtgcttgtgtgcacacacacaccaccaccaccagcaacaagacaacaaagtaaaatcaaactgtatgctctggactgctgctgtaccacaggagggagagtgctggtgtgtgcactcacagggcagtgtgtctgtgaggacctcaggaatgcctcttggctctacaagccaggcttcagggctgctttctgtcacccggaccccaaatgttcaacttgaagttagccatcaacacagaggccgaaagaagtggtgcttctctcgcggggggggggggggnnnnnnnnnnnnnnnnnnnnnnnnnnnnnnnnnnnnnnnnnnnnnnnnnnnnnnnnnnnnnnnnnnnnaaaaacgggggggggccgagggccctggcctggcagctgcagggagacgctgctgagcacccccagtctcctcagctgagggagaggcgccagaagtgattcctacagagacagaggtgggaacgcttggaaacagttattactcatggcccacagctgtgctcaccatcgcccggaaatgcttcaacactggcctggcttcctctaaaaggcatggtttctccgagcgctgcactcagctctgaagtgcacattagaacttagcactctgtggagccaacatttcccagtgtaagagctttgtcgatattcgaaaaaatgactgcttccatttggctctttggacaggataaggaccttcagagccccaaagaaaggaagtgtctggtagttcatgcacacttatgtcccaggctctaggtcagctctgtgtacttcagagatgcagcctctaccatttggtaaatttgtgctcagggctcccctgctgttggggagtttgaatccactggcaaagaccaaagacttagactcaattcaaatttagatgaactgaatttattcttactgccagcaggatggcagccttagagccaaagggtgctaaaggaagggttcataatggtgggcatcacagttacctcctgctcattggaatccacagctgggcaagaaaattgcttcatggccctcagttcttctcagctccattgtacagcagtaaagagaccatttcatcctgcccacagctaaggtgggtttacaaaagccacagcacggagttagttcacagcagcaacaccatcttcaggcccctaggatctctcatgcatctcaggacaaaaaggtcaatgactacttaaggggtgcccggtacagccttaagttccttagccaccataggggagtcatgtatacattgtcatacaaactaaaccaccccgggaaaatggaaagaagtgacattaatgactgggatggaatggtttctccctgggcaagcaataacacagtgccatcaggtcgggctggccgtcacattcccacaatattaagcactaacgcaaggaccatagacacagcttttgttgtgtcctatcctccacccactttatttctgagacaggatcttatctagtccaggctgactcacactcactaaatagctgaggcttgcctttaccatgcgtctttcctctgcctctgtcatgctataaattagaggtgtatgataccaggcctgggtcaaaattccacatgatttctgggttgttggtggttgtttttttgtttgtttgtattgtttgttttaaacaaagcattgatgtttaagccaagttcatgtcaggcaaacactccacagtggggtacctcccaagccctgtgatccagggaagacagcaggggagtgaacagttactgcgtgtgccaagtggagcaagagaagtgtgtggcagggctatgatgtgctaagtcagtggatccagcagagactctgagttcggccgctctcttagcacgtgcttgctccctccagttcctgtacttacagctttgcagcgctagtgctggaagcaactggaagctgcagccaccgcaaggcactttctcatttaccttcctgtctcccacgcttcagaggactggaaggaacccttcctcacaaagtgcagtgcccccccccaccagggatagcctggattggggaccccaactaaagggatgggtgacttggagtctaaagtcatcagtgatgttctgatgatttgtttctatagtgtgcattgtgatgttccctttcctccaattacagtccatgttctggactgcatgacagacagacatgagctaccatctgagagaggaggggctgccacctccattggtcttgacctctagtcaaaactgtgggtgttagggctcctgcatggtgttgtggtaggaatttgaagggggatattatgacctttaaaaattttttttaaagatttatttattatataaatagctgtcttcaaacaccccagaagaggggcatcagatctcattatggttggttgtaagccatcatgtggttgctggaatttgaactcaggacctttggaagagcagcagtcagtcctcttaaccactgagccatctctccagcccccaaccttttaaatttttatttattttggtttatttgttttgagacagaatcttactgtgtagccctggcttggccagaacttgatgtgtagactaggctatccccaaactcagatctgcctgcttttgccttactagtgccgagattaaaggtatgcattacccttcttgtccctggccaagatatatatattttttaaagtcaccagccaagatggtagctagcaaccatacagttactgaacatttttgaattgtgacctagaaagtgcatggacgatagcatcataacgcccctctctgtttctgtctttctctcattctgtgtggatgacagcatcaactccctgtctctgtctctcagtctcacacaacattgacgcacacataggtacacacaggaaatgtgaacacagggacacatttaaaaaaaagatatcaaactaaatgtgtaataaaataacagaacaagaaattaaaagcaaacatcctccccaccccaccccccaaggaaaaaaaactttcttgggattaaagaaataaaaggaagccaggcgtggcatgatacacacacctttaatcccatcactcacaaaggcagaggcagatggaactctgttttggaggcaggcctggtgtaggtagtgatttccagggctatgtagagagaccctatcacagctaagtaaatgaatagaaaaaaaattaatgtaaacataaatataattaacgtagagtaaagcaaacatatttatacatatatacatgcacacaccacacacataacgtgtgtgtgtgtgtgtgtgtgtgtgtgtgtgtgtgtgtaggtgcccatggaggtcagatcccttggagctagagttacaggcatataggcatttgtgagctagctggtatgtactccaggatctgaacataacttctaagccagcctcccaggaataagacttttaattacacagtctgatagaggaataagtgttcagttacaaaaaaactttgtcccaacaaaacaaacctgttgtcctgtgtcctgagagaggccccagagagtggtggcaagcctaaaaggcattgaagccacaacacctttagttcatgttgggagcattttcatgtggtcagccaagattcattcatcacctgtactgggcgaagtgacggatgcatgatataaaagaaaagaggaaaaagtgcctcggggcctggggatgtgggcctatggttcacagtgccttggggcctggggatgtgggcctatggttcacagtgccttggggcctggggatgtgggcctatggtttgcagtgcctggggatgtgggcctatggttcacagtgcctcagggcctggagatgtgggcctatggttcgaagtgcctcggggcctggggacgtgagcctatggttcacagtgcctcggggcctggggatgtgggcctatggttcacagtgcctcagggcctggggatgtgggcctatggttcacagtgcctcggggcctggggatgtgggcctatggttcacagtgcctcagggcctggggatgtgggcctatggttcacagtgcctcagggcctggggacgtgggcctatggttctcagggccttgggatgtgggcctatggttctcagggcctggagatgtgggcctatggttcacagtgcctcggggcctggggacgtgggcctatggttctcagggcctggggatgtgggcctatggttctcagggcctggagatgtgggcctatggttcacagtgcctcagggcctggggatgtgggcctatggttcgcagtgcctcggggcctggggatgtgggcctatggttctcagggcctggggatgtgggcctatggttcacagtgcctcagggcctggggatgtgggcctatggttcgcagtgcctcggggcctggggacgtgggcctatggttctcagggcctggggatgtgggcctatggttcacagtgcctcagggcctggggatgtgggcctatggttctcagggcctcagggcctggggatgtgggcctatggttcacagtgcctcagggcctggagatgtgggcctatggttcacagtgccacagggcctggggatgtgggcctatggttcgcagcgcctcggggcctggggatgtgggcctatggttcgcagtgcctcagggcctggggatgtaggcctatggttcgcagtgccacaggacctggggatgtgggcctatggttcacagtgcttcagggcatggggatgtgggcctacatggtggtcactgccatgaagaagtgtacagggcaaaaagattgaatgcagtgagaggcaaagcaaaatatgcttttaggatatgtagagatggaggcgttactgctctttcattggaatctttatcaatggagcaaaagcttgaagcgaggcgcctccaggggactgacaggctacagcacctgttgtgagtgctcggcctctttcacttcactgtcgcatttcctctgtcctctccttctggctaaacggttcaaaaagtgttcacatttctcttctctggcctcctgctctcacgtctatggaagccagggcatctgctgggtgcagctcccagtgagcagagattcagtggtttgaagcagccagttcccagcagccagccactcccagggctggattgcgggggtttctgttttagactttttttctatttttcactttgtggccttggctgacctaggttcatagaaacctgcatgccaacacaaagaattccagctagccagcagcctgtctgaaaaaccagaacaggaaaatggattggaagacagacctgttctgttttgattctccccctcccaaaacaacctaagccaaatgcagcttaccgtcccatatgtagcagtgtgtagggtcatccgcctgtcgcctgccttagcactgagggggagattgtgaggctagttggtactacataggaagactgtcccccacagaaaagcagaagtaatacatgcaatttcacaatattcttttaagcaacaaagcctatctttccgtgtgagtattttatactctgaaatggctgtgtagcatcttggcatgctgatccccaagaacttaactccattccctatctagacagttaattccacgaggtgccttttcctcgcttgagtgtatctgtggaatcaattcccggacattgggtccacttgaaggttgtactcatggcatagtaacagatgctgcaaactagtctccagaggttaggttagtttacagcccagagtgattctggctctaatcttgttttcttttcttctggttccttagactttctgcactggctaatcaagagtgaaaaacctgaagagatgcaggcaggaaaacggaattaaactaggtgggtagctgtgtggctcacacctctgtgcctctcatcacatttgcctacacacccttttccttttttcttttctttctttctttttttttctctgcttgaagaaaagaaagccaatagaatagattctaaatgaagttcgagggggaattttagtcacctaaagaaaaggcagggtgactcttagcagcagttatgtaatgtcatgctgcagagccacaggcctgattcccatccaggcaattttcatagcactggaaagacagcttccttccggtgccttagcaggtttttcagccatgtacccaaacagagggagtcttacatagctgattagcaacattgggtgtgactccaattttttctgcatgtatcagttataaaggagtatttacaacaacaagggcatgttatgggaattgtcgttttaagactagttaccaaatgggcccagcctagcgggcctgttagaagggatggggcaggccccttctatctggagacacactgtgcacacagtgtaagtgggctgcctagtggtgtgcagcctagggtcagtgctcagtttttgtgatagccaggtgttctggcatagaggtgtagcagtgcgtagtctaaaagagccagcatgattgttggttctctctctccctcttcctctacccagccttccctccttcccccttccccttccctcaacccctcctcccccctccctctcccactccctctctttctctctccaagccataccattttattctggctggcctctgcctccaagtgttggcaggagatgtgagcatcaccttcccacacctggcttttcatctaaaacagatctacaattcctgtgactcacagcaaattgtcaggttgggagtatgtggtccacagacatctgcctacccatgaatttgtccttgtaaagggagtaagaaacaaaggtcacctgtgcccagctgacccatttctaccaggtctgagccacaaccagagtggtcagaaaggatgtgggagcctggtggtgagttcatctctttctgaagagctcattggactgttgtgctttcgttgctcaaccagggatgtgtgaggagggtggtcttgtaggaagcgtgcagctctaatgaagttcagcttagagtcactcaggagattaccttttatctcagcttatcagcaagggtgaggtggatactggataccacggcagaaatagcggacatggccttgccttcagaagcttcagggtctggtcactagatgcagaggcaggtgaggaatggtctggagaggagtgtgccaaacaggctgcaggtctcgggccttctggagcagcacggggaaggcccagaggctccagagggctctgcgcgcccctgtggagacaagctgtgcttgggcttggtagtgtagagcaggtgtcagggctggagcttgcaaatggcttcgagtcagtccaggctttctcctgttgcttctaagcagaaagtcactgagtgatcttccaggagccatgtgagttagacatagaaatttctggaaagtgggccatgttaattttcttaccctctccatctgctatcataacctctcctcagggcctgtggtcctcctgctcgtggaccctgatgaggagcggtgacagagtctgggagaaacatctccttggagagaatgaggaggcgggtcattcagtgtacagcactgaagtagccttacagaggcccttcatccctgtgagcacggctgttgtctactaaagggtgatggactctctctctctctcctgtccccttcctctgtggacattttacgtgcccaattagggcttcagcagaatcctgtttgtcacgtcatgtactattgaaatcctcacagggatgttagggtttcactagctgctatatgtcctatgtcaagggcttttctcccatgatgtcacttttagggaggaacaaacaaatgctgactgaagactaggtatgtgcttggccatggcacaacagaaggcttttagaactagtaagcctatggtaaacacagccatcctttgttgtgtgtccatggttgttctagaactcactctgtagaccaggctaccctcaaaatcagagatctgcttgcctctgcctcctgagtgctgggatcaaaggtatgcaccaccatccctgaattactttagtacatcttaatctcatttagtttaatcttgtgaagtatccaaatattacagataagggaactgagctcaaaaaggtgacagttcttacctttggcgatgcaaggtgaagttgaagagcccatctctgaccacagttgacttgccattctgtacgtattcctgtagacagttcagacatgacagaggccatggagaaacagagacacagctcctttgttctttccaaaattgtaagttcttagcaaggccactggtgactaacatgagctttagacctgagctctggcgtggcttgtccagttagtgttttcctaagaccttcctccacgtgcattgaggccacctctgtgcccgtaggtcacttccctagcagctgggagtgtctctgtttacttcttccctggacagttttcttttggtttatagccatgctcacagaaatggcattattactcccatgagagaaagagcagtggcttgctttaacccagtatgcacactgaaggcgcctttcccttcatcttatgaggagccatggctgccagggcagttcctttgagaggagtcactaaagcgtggagaggggctcgggtgggaattctgtttgcccaggaccgtttgtatgctaagctgtctaaagataaggatttaagtagaatatattagactcatacattagacttttataactccgtaacaaaacaacaagcagaaaaaacaacagcatcgtatgcagcctgcattggcttcatgctcccgccatagctaagggcctcctcttttttttttttttctgagacagggtttctctgtgtagccctggctgtcctggaactcactttgtagaccaggctggccttgaactcagaaattcgcctgcctctgcctcccaagtgctgggattaaaggcgtgtgccaccacgcctggccaccttaattactcatcttctgcctcctgcttccaaatagtggcactagtcatgtgctatacacatgtctcttatacctggcctttaaaattttccttttttgctttcttgagacagggctttatgttagcccaggctagcctttaatcacagtgctcttgcctttacgaccctagagctggaactacaagtttgtgctgctccacccaataattagttttcttaggataacatacaaatggctgacagacgtcagcctacagtcatcagagaaatgcaacttaaagtgagcgaattagctccttcatatgtgttcagagcactgttgtaaaaggctcagaaactcagagtgcttgttccttattgttggcatgtaaattagcatagctgttatagagaactggagaggttctcaaaaaattaaaagtagccaggtttggtggttcacacctataatgctaacattccggagactgagggaggagagttgctgtgaggttgaggcttggcttgagatagtgagactatctcaaaaataaaataacaccccagattaataatagaactaccacaggatctagaaactcccgtgtatttctctaagaaaataaagttggtctcctaagtagatgtctgcagtccatgttcaccacagcatcatggttcacagtagcagggtgtggaagcagctaagtgtccagtgatagatgaatgggtaaagaaaagtgtgtgtgtgtgtgtgtgtgtgtgtgtgtgtgtgagagagagagagagagagagagagacagagacagagacagagacagagacagagagagacagagacagagattgcgtttgtgtcatgtgtcgtatatacatgcatattacttaaaatggaaggatagactgtaggttgtaacaaggatggacatggaagatgtaattatcttgggtaaaacaagccaagcagaggaaaagaagtaccacgtgcttccttttctctgtggagtttaaagaactcagagaaacagagtgaggggccaaggaatgagatggtgttggccaaaggctccaaacttgcagttataaaatgaatgacaataacaaggctaatatacagaatgacaactgttgttagtaataaagtgttgggttcttgccaattgctaagagaacaggtcttaggtgcctcttcacaaaagtgaggtgatagatatacaattagctgaatgtggtaagcatttaggcaatttaatatttaaatatgtatgttttacttttgaattttaacaccataatgctggaaaggtttaaatatccatccagttcattggaagccatcattcaaccctgttgagctgtttgccatctagaaaatgtttacactttagcacagaaataagagtgcatcatgggccatgttcttcctgacatcttactcagctactcacgttattatctgtggtttacggagtgggaaccctaggcttctagaaatcacagcatttggccaacgatcaaaagccagaaagtagcctggcgtggtggtgcacgcctttgatcccagcactcgggaggcagaggcaggcggatttctgagttcgaggccagcctggtctacaaagtgagttccaggacagtcaagactgcacagagaaaccctgtcttggaaaaaaacaaaacaaaacaaaacaaacaaacacaaaaagtggcacagaaagtggcacaagcaagatttcatttcattccagctctatgcctttcatttttcaactactcaaaagtggattttacttcactttttggatgaaagtaactcctgccttgaacgtcttatctgagccaagcactatccactcactatttttaggttctagttgagccacgtggggaagttgttatccccatttcacaggcaaagaattcggggtttgaagaggttcagagtctccccgaactgtatagtaagaccaggctttgaactcttggcagagaaaactgccaattctcaccctgtactcctgtcctgtgcttctccacagccgtagaagtaaaggacttagagaaagtagcgcccattttctttactttggcagcagtcctccatggggactgtttttacaggtaaagaacccacgactcagagatggtctgtgctttgctccctcggcatcatgtaaagtggagctcgtgactcggcttcttccccacagcccccccccccccacctcctctcagcaccatcttcttgcaaccagggcggaatctactgcctttttttctcttctgctttctagtaatcccaggatttgggggatttccacctcccagcccctctgctgagactcttctctgcttgcagagccagggtctctagtgggaagcccccatgagaatagagctctcctgcttatcatcctgcataccctgcctgccagctgcttcccaggaccccaggctgtgtcctcttctgacccagggcctctgggaatccctagatgcatatttacagcggcttggttgcaactgttagttcccagaatgtttttccacccaacaagtttaagagggttagcctctgctccagcagcttttagaacactgagggcctgagccccgtgcaccttacactgctgagctttgtgggaagagcaaggacaccagggttcctagagtcgtgggcacaccttgatgtttacagatacacattttcttgggatatgcccatagttttctttttgctatggctcctagcttccaacacttgtgacattttaaaggtttatatatgatatcctgaaatattcctaaactcttcccccttaccaggtatatagagtgtcatgcctcccatcagtaaaatgtcaacaagggctactgttgtaccagtgccccaccctgcctgtcatttgcagacctactgagggagtttgaaagcacacccagtgcttctagcaatcctactgtgtgcctcttgtgctataatttgtgaagagttaaggtattttcagtcagtctctctcgctagaccttcagcttctttaaggccatattttttaaaatatttatttatttatttatttatttattatatgtaagtacactatagtgtatcttcagacactccagaagagaatatcagatttcattatgcatggttgtgagccaccatgtggttgctgggatttgaactcaggacctttggaaaagcagttggcgttcttaaccactgagccagctcaccagcccccgtaaggccatacttgtgtctggctgttctgtgtacacagcatgtagtcacaaatctggtactcagtgagtggtcggtgagttttttggatgaatggatgactataagagagatgataatatcttgtttcttttcaccctcctcagtgtattttggggtgactttgacaggactcttagaggagctggagaaaaaacctaaaccggaagcgactcctttgtgctaactctgcagtgttgcgtgacacatcacctcgatgcccacaagttcggcagcggtagtaacttactttctcgcttggctgctgcaggcaggacttgggacagtgtgcgtctggcacacatagctagtgcctggagttggattaacaaggggtgtgcaggagtcactgactgacagctgcatcgccacccatgcagctctggcttcttcatgtgttcacttcccagagtgtgggttcctcatggtgtggcagcctctggtttcctgtatttcttaactgctggagacaggtatcctaggagagccaggtggatgctgtatgaggtcccctaacttcatcctagagtcagacaccatccttcattttacgttagacatcagatactagggtatggctcagtgataaatgggaggccctaagctgaatccccagcacctcccaaaaatgaaagaggaggaaacggaagaaaaggaagaaaagaagttctaaagccagctcacaacgcatccaaaaggatttaaattaagcctcacatccccttctgtattttcttgatggtactgaaacttcagcccaggactgtgttatgctaggccagtggtttgtcacccagttacactcccagctttttagatgtcagtgtgttaggcagagtgccaaacaacttgtagatacgttgcagaattactacagagataggtggctgctttcccttttgtttgcacatgggacccctaaggttggggaactgtccccagaggcacccacctgataccaacagagctagagcttagcccagcctgggaccttggcaagcctgcctggaagtgatttcactttcccttcctgcccctccctccataggagagggaggctgcccctttctggaagttctgcttcgaagctgagcccccaactaagcttagaaatgacacaaatggcaaaagagctggggagaagcgtgcctggcctctaagagatctatcaagacttctgcttcttcccagtggccccttagaaccacggatggtagcccctacccacagaagtcacagtatgctgggtagagcatagtcgctaagagggtggggctttaaaattgatatcccaaattgttggtttttttcctattgctgtggattaggaattttgaggtaggtggggtaaggaggggctgatatttgggatgtaaagtgaattgaataaattaaaaatttttgaggcaaattcatagactcaaccaaacatcagcgaaaagactgaagaatttgatctccagcacaaaatccaatgaagaggattagcacgagggaggctgaggcaggagaatcagaggtttgaggccagcctgggatacattatgagactttgactcgaaaccagaaactacaagtgagaaaattcagcagagaactttgcttaagcgtggtgagtgcatctggtgtttgtgttggcgagcacagtagaatattttcatgcgccttccctgtttcctgctctactttttgaaattctttctttgaggctaagactggggtggctgggtgggcaggggaccaaaaaaaaaggacaaaggaaagagactcttcaaaaactcttattagacactagtgcccattgtaggtcatttctatcatttccatgtgttagcccagttacagacattacagactagctcctgttccacatacgccgtgtgaccttggacaagctatggacctctctgaacctcccctgtctgtagcaaaataaccacaataatgatttctttgtcttagacttgatatacagtcagagagagaccacctggacctctgctgtcagctttgagaatcccacagccacattcaaggcagtattagcacccatgtttcttggttgtcccttggtcaggtaaattggccaacaccataaagggccacactggggacaaacattagcctccaaaaccctagttatgtccactgtgttagcctccaggcaccaggccttattgacttagacagtgagacaggaaccctggtggttttgagtctgcagacctcaaagcagtaacctttaagaactccaggcccgggtgccacctgtctaccgtgtacaggagctgagagtgtccaagagtgcttcaggcaaagggaagaggcttagaaaggtcaggaattacattggatttgagcattagagggtccagcgtgacagagcgaaaatagaccatgaagaaagtagaagggaaggacagaggggtgaggtcagagtgggattgacagcaggattgacaggggaggttagggttatgttgaatggagcagaggaatcccacaacccagtttctgtttcaagaacaactctaaatggaaaattgttttggggtcgagggcctctgcatagatagcacttagcgggtaggcagttggcacactgcaactgttttgcaagcagaaacgatggaacctggtgacaaactgcaggtagcagaggaggatgatcaagaaaggctcccagctctcagctccagccacgtgtgaacaggggaggctggcaaggggaaggcagctgggaggggtgagctgatagcttgcacatgaggttcactgtgttgatgaggaagcccagtgtgatacacaaagtgggcagatccacacgttctaagcgagtttgacacgttttggaggctctcagcagagtatttaaaggaaggtcacaggactgaggtttggggggagaagctctaacattggtccaggtggaagcaggaggcccagagggtgtggtgtcaggacacgctgtgggaaacatgactggagaagtaagaaaagtgcccgtccctagcagtgcagaagtcaccgatggccttgtctgcacagcaccctaccctttcctcccattgcaccatttctgaccagcagagtctgggctctccatgtgcctctgatcaaagcctcgcccaggggtgctctctgcacggatactaagcactgtggggctcggcactgcatgtgccctagggcattagggagcactttgatgccagccctggtggcctgtctgcttccagcttcctttacagagatgattggagaactgctggtttagtagatcctggcctttctgttaggtgtctaagctcattctggccttagagatgctgggcagttttgtccactctaagaaacaggatttcatactcttgtaccccatgttctctgtttaaaaaaaaaaaaaagtctgattgctttttctgtaacttctgcaaaatatttcatctttttaaaaaggaaaaaaaaaaacaggaaatgacctttcaaatgtatttggaaagcagttaggagttgtaatggaatctgccctagcaatggggactaagctgcaggcttaaacagactgtagctcttggcacagcccagggcctcttccgtctacatagcccaggaaagcagcagagagacctgagggagatgccatcctgtggggacaagagcaagcacctacagcgagtttggtttctctcttctagcctgggtattcaaggtcaggttccctgtaagcatccaggtcccacagagttccccagactcccagggtaaggcagggaacttggtgtccggcagcccatggagcacaggctgagacagaagctattagacacattggctgttggctctgcctggacgactactcctcctcctcctcctcctcctccttttcctcctcctcctcctcctcctcctcctcttcgtcgtcgtcttcttcttcttcttcttcttcttcttcttcttcctcttcttcttcttcttcttcttcttcttcttctttcctccttctttcttctttcttcttttcttcttcttcgtcgtctttgtctgagtgctctgctgcatatatatccacagaccagaagagggcattagacccctttgttgatggttgtgagcaccacgtggatgctggggattgaactcaggacctctggaagagcagccattgctgttaaccgctgagcctctctccaaccctgccaccttcattttgtgtgagggagggttgttagtttggtcatctggtttctgagacagggtcttcctatgtaactctatgtgtagaccaggctggccatgaacatctgggagtgttcatgcctctttcaaggtttaggattatagtcagatgtctccacgcctggctctccaccttttccctcctttctttcttttcaaagaaaagcttcttctctgaccgtcccaccttttgttttgttttgttttgttttgttttttgttattttcaagagagggtttctctgtgtagccctggctgtcctggaactcactttgtagaccaggctggactcaaactcagaaatccgcctgcctctgcctcccaagtgctgggattaaaggcgagcgccaccacggcccggcgaccttcccacctttaactgaaccacatataccactggagagagcctttcctctccttccatagccagtattagaatctgccatggtcgattaacatacccatgcagtgctttttcttgtgtcagattgtaaatcttgtctccagtgtgcacctcacatctgacaaggtgcctggcatctctggcgccatagacaatgaaatgtccaggctggaagagacttagagatcagactccattattgttcagatggaaaaaaggaagctaggagaggaggggggttctgggagtctgaggaccgtgagggtagggtcagacttttagcgctattgtggcacagggtccatcccttgttccctctaccctagagtctagagcagttcagcagcctctgagctaggtctcacaggtaaatagtgcccatgctggccaggatgccaactggtgggattcctgttcacctagcagcgaaagcacaggaggaggggtagggttttggctctctgcagcaccattaaacagagagtagccaggcagtggtcacacatgcctttaatcccagcacttgggaggcagaggcaggtggatttctgagtttgaggccagcctggtctacagagtgagttccaggacagccagggctacacagagaaaccctgtctcaaaaaacaaaacgaaagagagagagagagagagagagagagagagagagagagagagagagtaaacaaaggagccaagtgaaatgtcagaagggaaggtttactgatagctcagccacagtggggcacagtaatggtttattaattggtgcttctcatgtctcatggaactttccagcccttctgagcccatatgctcacctcatcttcacttcagcccatgaacttcagggtgctttggttattcccaagtgcaggggcaaagggtgatggccagtgtgtcccaggcggtaagaggggaggctggcttgacagaggcattagatgagttgccctacagcacacctgcagtccctgaactggtgatgtcaccagggactggtgatagcagtgagttctgcactaggcaatagggcctgtggagtctagaaccttgggtggtggtagtggtggtggtgatgttactacttatgatcaggtcttactatgtcaccctggctggtctggaactctgtgtaggccaggctggcctccgactcacagaaatccacctacctctgcctcctggaattgaaggtgaccctctagcaatctttgagctttagtttttccaagtaacaacagtcttttctagatggactctctctctggagagcctctcagtttaactctccataactttttgttaattgttgagcacctgctatggaccaggccctgtcatttcctgagtgcatccaaactgcttctctgctggagatgtgcagtgggccagggccgagcaacacagacccccatgttggtgacggtttatcaagaacattcttgtgtcagttgatatgagcagatcagtgtgcgtgtcgcactttatgggtctcctgtggcccgggttggctttgaatttactgtatagtcaagaatgcccttacacttttgatcctcctgcctccatctcctgagtgctaggattgcaggcacgcacagtcacactcagctttgctttactctctcattgaacggttctgagtcaggtgccgccacaagcctgactactttcctgagtgtccctcttgccaacagaggaggacctgagggggagccagaggtagagttaggccagcttgtgtgggaaaagggcaggtttaggagaccagggtgcttaggcctatgcacccaagtgagtcctgtgagagaggaaactaaggggaggccagagctgagggccatagagttttctctcaggcaacaattgaggttgctccttgcccaggaaggaagatgctgctgctgttcctaatggtgtcacccaggtgtctcacctctgcacgagagagtcgatgctgagcgagtggatgggcaggccatgggacagagaggtggagagtgtgaaggacagcgtgggtgccggccagctgagaggaacggggatgagctgagaagtcactccactccccagcttcaatttcctcatttctcaagtggaggctagaggacttgtgtgcacagtgtgctgtcagtgatccagcctggccactcaggaggaggacttaggctattaatagttagttttaattcagtaagtatgaagtacccactgcgtgcaggcactggaacagccttgagggtacaaagacaagagcaatggtgttcactctcggtgaaggagactacagaagaatgaaagtggtctttaaactcttgaatctgtataataaggtctgtcttgtgcggctgagcgtggtccactcaagtcttgatttagcagcacaaggtggcttgaaatgggagggaagataaaagagcctctggactgagagcacagagcctttgatgtggccgctctgcttttaagggaagaaactccaggtctttggggagggtaattaaatcagtctgcagctgtgcctgcccgcagaggatcctgcagctgctaacggcagctgaaggctgggtggactttggatatgtttgtagtgttttgatataatcgttgcacagagtttcagggtaatttggatttgtttttaagacatatgcttggatgaagaaaagcaagatgaaaaagaaaaagttttggccagtcatgatagtgcatgcctataatctgagcatctgcaaagctgaggcaggaggattgctgtgagttggaggcccacctagggtatatagtgagttccagcccagccctggtccacagtgtgagaccctttctcaaaaagaaaaggagagatgcccagcaaaatggtttagtgggggaaaggctcttgcgtcgcaggcctgacaacctgagttcagaccctagagtgcacagaaaggttccccaaagaggtcctctgatctccatagaagcatcgtgctccacacacatgccatggacacacagtaatagatgaagaaatggacaaacgagaaatttctttacaaaagacataagaaagaagggaggggttttgtgtatcacacagacatttctggaaggacccaagatatagtgtgctgagggagagtgtctggagtaggtggagacacccaggccttgcatctttccatttgtaccttttgagttttatttctcatccacacataattgataacttatgggctagagtgtagttgaatgatagaacagttgcctagcatgcagaaggccttgggtcacatctccagcactaataataataataataataaaaacaaagccatttcccaaaagaagattgaaaaggtaagtcaggtatggtacatattatctcagcagttgggaaatagaggctggaagatcaggagtttaaggccagccttgtttatgttttgagttcaaagccagcttgggttgcatgagacccagtctcaaaaatgtagagtaatattatatatatatatgtatatatatatacacacttaaaaatcaatcttgctggctctggtggcctggtgcacactggtaggatttgttggaggatgtggaggcaggaggatcctgagtttgaggaaagccagactgtagtagctcatacctttaatcccagcacctgggaggcagaggcaggtggatctctaagtttgaggccagcctggtctacagagtgagttccaggacagccagggctacacagagaagaagttttgaaaaacaaacaaacaaacaaacaaacaaacaaaaaagttactcatatatgactatatgattttatttcacttccagcataaatgaacattttctcatgcttgtctgtctgtctgttgggatggcatcttgctatgtacctcaggctagccggacccaaggtcatcctcccttggcatcaagtagctgtaattctaggcctaggctaccatagtgtgaagaatacagtcatggaagacagtaaatttgagtgtttgtgtgttgagctggaaactccccagagctgtgtttggagccatggtccctaaggatgaatgaagatgggtgctttccaggattgggtttgggacttggcagtgccaacagcatcagctttctgccagggtggctcaaaggtcagacatagcaagagcaagtttaaagccctagggagtctgtcctagtgagaggccagcaggtggcttagcaggtaattcatcttctggtgtcagatcctggagagagcaacaacggtggagcactccggcagtcagagccttccctgcagtccctggggtcactctgtcatcccacagatagggaatggaggagaggatgggtgggtgggcaggtgggcgggtgaaaagctgtgtgatccaggtgtatttatagcgcactcctctgtagcaggtgccgagcccagcatcttggaaggaagcagcagagtgggtttggctcagctgccaagatcaggcctctcagtctggtgcagtgacaatccagacacaaatctcttttcatggaactgacgttctcgatggaaaagagctgagcaaagaggctacagcagatggtgtgggctacccagggtttgacccaccccatgggcagctggtgtcacctggggaaacatctgagcctaggaagcacatggactggcctgagacctttccaagtcaagttataaagttacacacacacagtgcttatctacagggtggggccattgagagtgatggacgtgagcaagtgcctggtgactgtcctcaccactctttgtgctgcagtctcatcattgtagagtgtcatcaccattgcaacaggctctgccgaggctttgaacagtttccccagaggaaggggaggcagtgtgagcagcagaaggaaccacctccaggagttcgctctggtctccccacacactaagaaagacaggcagggagcgccatctgctgggtgcagagggcacttccttacacagaattttgcttctgcctcatttggaaacccaaagaggggcagggtctttgcttgagagaattggctatgaaatctaatgtatggtctggtccctggataattaccgagttccttccttagaatcatggttctcttcactctagactattgtcccccacagggacattcctggtctcacgcctttgttccctctccagcctcttccatgtgccctccccaccatcccattggagggctcatgggagcttgaagccagcagggacttaatgaacccttgaatggttgctttccatccatctggcgtcccaaatgcttccctctgggtcccatttcaatagccacacctcctcttaccacctgacttaagtcagaaaccaaaactccctgtcagacagaagctgcccacatatttgttttccaggttgtgtctaggatccagctaggtgtctgcttggtccctgttgcgttctcacctctgacctccccagaagcctaacctaacccatccacagctgtcttcatggtcttacctaaacccctccagggtgtgtcttccctgccactgtccctcatgtgtgtcctttctgctctgctccaccccatcttccttcctcagagcctcagtacccgcctgttcccttccttagggcctccttgtacccccattccttcttcctgcctttttttttctttttataatttttgcctctcttcattttataattttacttgagacatggtctcattcttttatcccagagctcactattcaactgtgtagctcagactggcctcgagctcacaacagtcctcctgcctgagtctcttcagtgctggagcttcaggtggaagctaccatgcccagattctttccgtacatccttgcctattggctgatgtgctgctttccatcttgggtcctggccatccctctagcgcccttgaagccctgaacacgcagtcatgagctaagtgacccagtgtgcagtgaactctaagctctgtgaggtgggagcgatgccggcttgctgtgctcccatgtggggcaagctgctcaggagctggactttgaatcaagatggaatgcatggtcttacatgttttcacatttatcttgctgtatgtgtgtgtgtgtgtttacacaaggtacacagtgcaggtgtgaaggtcataaaagaatgtgcaggagttcattctgtcaggcacatggtgtctggggcttagtggcaagcacctttacccactgagccatcttcctgaccctcttgcatgtcttatctctctgtcctccctcctttccgctctccctcctctcctccctcccccccccccttttttttttgtttcttaattttaaaaataaaacagggtctctctatgcagccttcgctgtcctataactgattaggtagaccaggctagcctagagccacagagctctgtctcccaagtgctaagattaaagtcatgtaccaccatgcctgacttcatgttcgttctgtaagacgtgagtagaagttgtctaactgtggcgttacaaaggacgtcagtgtctcacttctgctcctatcccaacaggcctgaggagcgatgagacaggcatgatggaagtcgagtcctcctactcggacttcatctcctgcgaccggacaggccgtcggaatgcagtccctgacatccagggtgactcggaggccgtgagtgtgcggaagctcgctggagacatgggcgagctcgcacttgagggagcaggtcagagctagtgcccccacatcctggtgggcagctggggaggtagtttgccagctctggtgagcctccagaccctacaccttcctcagggaagcagctgcatctaaattggggctgtttgcgactgttggcagagcccagccaatgtctaagatagagagtgccagtgtcctggttctaagggctctgatgagtagctggggcctttccccttttccctgccccaactccaacaaatcctgttagatctctgtaatggatcctaactcccagtgctccatgccttagcttctccacatctgcacagccaccatgtttacctgctgttcacttggacttcatgcccttcctgcacagcagacagcaggattagttagcctgtcctgtcctgtcagccttctgccccagactctatggtaacatctcagagccaagctactcttcagtgctccccaggagtcatgccctgctggctagcctgcctggccttggggtccatccacaccctacccactttccccccactcgcccatctctgtctgcttctctataaagggtcagggcctccttgtggggccttcactgcactcactgttacctctgtctacaaccacagatgctcccagaggcctcctcagctagtgtgccccaggccacatcactctcagaggcctctgctcagcttaggtccacagttagccttccctaccacttctctgctgcaggctcagagccgtgcttgctgtatcacttcccatggtgcactgcagcttcctctgtgctactccaggagcggatccttgctgggccaaagcattgtctttgcctgtgcggccccagtctagagttctcagtccttattgcccagaaatgacttaggaacacggaacagggacaatgttggggacagggacccagtttctcatgtaatagatttaactgaggtcaagggaaactggagtcttcttaggctcgcccagccaatgaccatcattggtatgacagtctctatgcctcgggagaataccctgccccttacctccatagcctcacaaagtttcccaggctgaggccctttggccttccttgtgttggtccctgctttctgttcaagtacggaacctgcacaatgctccccaccccctccgcagccccaactcttattccccactttttcctttctctttgcagctggaacaaaggcctgcgggccctgcttctggcggttgcttctcattgtggtgcttttagtgctaaggccttcccagaccacagcttgtctctgacagaggcgcccctttctccccatctccatggccctatgaactgagctgttccagcacaggctgtctcatgccctctgtgactaacagtgtttggcacgtgacgggtacctactcaacggctgctcactgtccaaccgaatgagcagtggacccagctggcacaccgggcacagtgccaaggggctcttcaaggctcctgtgctctgctcagctctcatcagctttgtttgctgcctgccttcatccttagccatcactagtcccctcatgtaggcctttacaacaccgtttgccttactgagagtctttgtgtatttgggtcctcccagtacatgatgcttgctagccaccatgactgatgtctgaaagggaggcataaggacagaatgtgcttgatgctggggactggaatgcctttgatagaatcaaggcaaggtggccagctatgagaagccatcacagtaaagtgtccccaggcatttctgagcccagcagactctcatatgctgaggacagagccttaatcctatcccccagattctgacccacaggccaaggccccagagttttctctgccacgcctttcaagggctgatgcatagactgagtagaacaggactgtggccccgtagggtatgggcaggcagaagtgtcctagctacctagtctccccaagcctgtggcctgctggatctatcagtgtcctccagcatgtagtgcacacatctgtctgtgcctgccatcttctcagacagggagcacacatttgctttactctcttaagaggaagagaagccagaggccagccatggagatgagggtacactgaccctgggcagcagtttcttttctcccaaggactgatgggataggaccttctccccaactaagggagggttggggctggtacagaggaagtatgattgctagagaggacttagggtcacagcctacgttccatcaagccagattaagacatcagttctcaataagccaattaaaagagccaaattaggagctggtggttaagttcagtggttaagaccacttcatagcagcttacaacatctgtagctccagtttcaggagatacagtaccatctgacttccagatgtgccacagatgcatgtggttcacaaacatacatgcaagcaaaacactcatgtacataaagaaaaaaattaaaaagccaaattaaaatgaagaacaacaaaaggcaatttattcagcatggccacattgggaagagggacagagaggtcagatgatccctccaagttcatcttttgggctctgccatgagggtaggtttaagtagaggccagcgttgtgcacacccaggctgtcctcacaaggtgtggtctgcccatcactgctccttcattgtccagggcccactatcctcagtcactggcaagtcacagaaccccttcctggagaaaagtccccgtggttggctcaggctcaggcttttcttcttcagcaggagatccttgggaatatataatttcttgggggcccaatgtttcaatagtctgacagccaaggtgaaggacagagtctcttcaggatatcttcatccctgccaggttggttactataaagtgccttgcctgtagtctcgagcagtggagtgaacagcagagacaatgggggatttaaagggtctcagttcacgggggcttcacaaatgaacctagtacctcaggggtgttaggcctccagagaccaggagaactttgtggctgaatcttggttcagcccccatcctcagaggaggccgcttcaggacaggcaggctcagattggcacatacttgagccacagtaccaagttctgtccacactatttacttccatgagcactcagagccaaagactgctgtgtagggcaatgggaggccgtcctgccaacatgcctctatgaatgcaggagaatgcagcttagaggaagaagtggggctcagcagtaagcaggctctcccctttggttgcaggtatcttgcccctctaagcttgtttccttatgggtgtcatgaccttaaccacaccttcaggttgctgtgtggattgtttgacagaattccagacccagagctcaacatagacttaaagacaggcctaatggcagaatgacatgcaccttcagtggcaccaagatccctggggcttgagactgcattgctggttgagttttgtccataaccagcatctgtggaggatgctggccctgagagggctgaataacaatacaagctgctagcaagtgggtggggcagaagctgctggtcccaccttccatcagggcttcagagaagcttcgagtgaggaccagatcaggtagggacttggaggccaggccaggtggctccccagcctgctgctgtcccttattccagcccatgtttctggctggctggaatagagcagggctggatgctgccagtggtattcagagtcaggtatcctctaccttaggatgtgcaggccacagtgggcacgcatgagctgcccactggtttcagctcctatatggtgtttgaggaaactcccatttgctaagcacatacgtcctgctgggaacttaacattctccctctagagaggacatgctgatcagcaggtctgtagtcctgacctgtactgagttttagtataccagcagccctggcagccttcccatggtaaaaggagacctgagagcaggttaaatgtctctccggccttggccacgccctccctaacgaacccattagcctacttccaaggctggccccggtcatcagtgtggctgctccttccaggccccctgtgcttctcacatgtaaatgggtgaaagaagaaaatgcactcttcttttcccctgcagaaggacaggcagagggaagtacccccgacaaggaagccagcagccagcctgagagcagtgatgcgaacacctcatcctgagtctgcctgtggtcgcaaggctggaagagacctgctgtacctctcggactggagccctggccagccaggcggactgagagcctcatggagtcctctgtggcccccactccagccaagtcctccacccacagcacaggctccacccttccccacctccccacggtgcccaggttcactctgaagacaccagcaccatgagatgttatttattcagctaggcggggctcgagccaggccctgcccctaggtgagcagccgccacctggacagggactgtcctgtcaccactcaccctccagccagcctgtctgtcaggaagatcttcctagcccttttttaaagcctcttttacattttttaaaaacataactttttcagagagagaggggagctgacaatcacttttcttctgttttggtttttggttttggttttgttttgaaagccgtttaaagctcagttctgatgatctatgcagctctaagtttcctcatggagcctcacagatccagttttgggaaaggatttggactcaaaactaactgaccaattctttgccctttgtaccaagagactgatacttaggcccaggaaataaatgctggtggtttgtgtgactggcttatgatcttttcttttaactatcaactgcacagctgggctctgcatccccacatcctcaccctgcagggccccactgctgccctctatcctgtggtgaccagcacaacccctcatgtggcatctcatgagtccttcctcacctcacccacccacagcccacacctgccacagcctgaaaagggcctgtgagatgctcagtgggtagagacttactacccagcctggcagcctgagttcatccctggggctgacagggtaggaagagagagtcggctctcacttgctgtccactggtgggcacatgggcacatggtgggttagaactacctaaattccagtaccaggggaggtggtacccttttctgacctctggcaccaggcacacatgatgcatatacatacaagcaggcaaaacacccatatacataaacataattaaatatttaaaaataataaaaataaatccaaaggactggttaaaggggcggagagttcaggagcatctgctccaacagcccctctgggaaagaatcgcttctgcaggaaagagaccctggctccccagcctgacactcagcgtagggcccagggctcctcctttcttagcatcctagccagcagccccgagaccatattcaccatgtgctgcaagataccagtcaccagctgctttattgaacaccataattttagctttagaaggaaggttttcaattcatgtgcatgattgtcaagtcccctgggacctagccaggatatccaatcagaggacagacctggcctctccaaggtctggaaggaatgaaggtcaatatgtcagagttgtaaagactttatccacaggatgaggctcagagaagtggccttgccatcttcaggggacccgccctgctggtcaagtcagagaaatagaaaggtcaggtctcatgacatgtaaggcatggtagaaagcacagaaatccgggccagagagtaataacttccttccatagacagcaagacgggcttcaagcaagggaatgtgtggcttgccaaggccataaggaaataaagggactcatggaactgggactgggccaactgctgttcaagtcacactccaggctgcccgagcctatcctgcataatgatcaggaaatagccaccctgacaagaagctgagcactgtgcccagaagccagacagtctccattttttcagggctgtccctactctgggaaagatttctgctacaagccacacagaaagttgtggagggacagcatagggtggtggctgtaaccctgcagaggtgtgctcctgcccaaggacttctgccacaatcgcacagagttaaggagggacagtgtggtggggtggttattgcgccctgcacaagcgtaccgtcagtctgtggtggctattggtattctctgtagagccgttccagaagttccttcttctcttcctctgggaggaagcttgacttcgctgcgttgatgttctagaagggggaaacatggagtcaggacaaggaaggaagcagccctgttagcaagggcaagggcatcatagtgggggaaacaggtccttgcagggactcactcaggacatcagaacccaagaccaaggtctgagcctacaaccaacctaaatgtcacaaaaacgtccacagtcagacctgtcttgggagaggggtcttctaaggggctcaacccaagcaaaggctagttgcctggtccctcagccagcatgctactgccaaggcatctctgtggaaggcttttggtactaggctgagcttggcatgtcaggccaacccattcttggtctccagaggttctaggcaatgtacacacaatatatgcacacgcacacacacacacacacacacacacacacacacacacacacacacacacacacacacacacacacgcatgagcacacacacacctgggccagtgtcaggctcatagctcacacatactcaccagtcgcttgaactcctcctcagtgaagcccatgtctttcttggtcatctggtagtcagtgtctagagtagacttgaagatgagggggtcgtctgtgttgagtgagtagttggccttatcattcttgaagctgggggaggggccaggcaggaagaaaagagagagagagagagagagagagcctcttcactccaagaaccatcactgcccgtccaccacctccctcttccatctttatacaaccttagacaacacaaagggttgcattctcgtattaaagaggaaacatttatagaactctgggaaaagccagctcagaggcagaggcagaacagcctgaggtgacagacagggagacggtgacagccttaagctaccatgctctctagccttcctcctctcagtcgtggagcatggctagcatcctaccctcctctcctagtcagtcctcagtcccttgccacaaggctcttccaacacagcacggaaacttcctggcacaaccctgccctccatcttgttgaacttgactggtttctggcagctccaaccttccttgctcggagagcagttttcaacgctttcaaattcttatttatttaagcatgccatggggcatgagattggaggtcaaaggacaatttatggccgtcgctttcctgtttctaccatataggttcctgggatcaaactcaggttgtcacgctctgaggaaagcacctttacctactgagccatctcaccagtcccagaatttgacacttgacttttctcaaagcattatacctggatatctctgaccccatactttttaaaaaagtcatttgcaactttggtttttgtggtttttgtgtgtgtgttcaggagtgcatggagctggaggaagacattgggtgtctttctctgatagtcctcaccttacttctttgagatagggactctcatggaacctgaagctcactattttgaggccagcaatcctcctgtctccactcccctccctagtgctaaggtcacaggtgtgcacggccatgcctggctttttatgtgggtgctagcagtctgaaccctggtctcacgcttgcacggcaagctcccttatccactgaggtgtctcccagccctgggcaccttgacaggtctttggctttccttctgtttctgcctgtcactgttacaggttctcttccctcctcatcttgatccaccatctcccagagtctttgctcttcaacctttgtatttgcgcagatgattcgacccttccccagcctgtgtgcaataggcttgtgtgcctcctagagtgaccattgagccattccacaggcaccatgcacactaagaaagcccacgagcctcttgttataagagcacagtccttccatctgtgtaagtgtagctgacagaccagtgctgtcctggccattggcagcccacctctatcctgccttgggaaaagacaactttgttctcctcctgaagcctgataaggtcattggccaggaaggccttgtttttagttgctgatgggagtcaggtagcatgggcaaggtgctctagggaaaagctttcaagctggccttcaggggacacctggctgcatcaataagagtgaacatccagacagatgagacgcatcttcccgcagcccaaaagtcagagtcgagtaacaagaaggtagacactcatggccgatgggcaatggggcccagctctgttagtcagtgggtgaggagtcaggttggcacatctgagcttcacggtcctcagttgttggacaaggacagcaatgcctgcttcccagccagtcagagtgactccatgactaagaaccaggatggtcaggtccccatcccctccccttcctttccagatcaaaaccaaatgggtcccaggaaccagatctcaccgaacaaccgcatgcgtcgttttgggatcccaggcgcctgtgaggtagctggaccaggggcagacctgcaaggggcaggtgtgtggctggcatagtgggcccggggccagactggtcagggctgagccacctgctgaggttctattctggatagctttagtgcttcattgcctcaagccccacgaaacctccaccatgtggccactcccactcagcctgcctgtcctgcctctgtctgaaaggcacggggtagccagagctcactctctctgccttggcgtctcacctcaaagtgcatgttttctttcagtagtctgttgtagagagcttcatcctcgatggtgtgataaccatgtcccaccctctctgtcttgaggatgtccacagcctgtggagaagcagagaggaggtgagtccagggacaggaacagaatcaggaagaagaggcccggggtcactggctccttacctcacgcacaacctcaggagagcccacctcgccagcgtggacggtccgatgaatgccattctttactgcgccctggaaggggaagagacagtttgggcgtggctctgagaggaccctagcgagctctgtctctgccacatttaggggtctgacttttggcaagtgtcactgtccccagaatcaggctaggctacttgaagaagtgtataggacagtgtggtctagtttcccaagtcaggagtagagtggaaacgttttactctgtagcttctgtgcactgatgctgtttgaagggtttaaacacattgtctaatagtccaaagcaaatgctattacactgctttagggcggagctcaagaaagccaagttaacatgaccaaggcctaacaagaagtttagaatcaaggcaatgaggtccagataaaaagcagccctgtccaaggtcacacaggaatacataggcagatgcagactcaaacataactctcccaacacctagtggggctttaggtaatgtcctgttttaagtccagagccccaaccaagacatatctaaggattcagaagaccccaagcttactacccaagctcccccagggccaccctccccttctcaggcccacctcataggcttccacgtggcctgggaagaggctacttccttcaatggtctcatccccagccaagtccatagccaccacggtcttctgattgtacttcttacacagctccaacacctcaagggaccagcctgcaagagaggtccaacggggccacatcaaacagggatggagtagggcctgccagccacccactggctgccctaattcctcatctgaggccagagaagatataagatccagtgtcttgtcttcatatcctgactgctgtgtcctcctcacccatgcctcagagtgccctttcccagagggacaccaccaaccactgcacaaggtcatggcgagtgtctgctgacgtgggctgggttcagtaagtgatggacaggctagaccagtggcgcttaccaactcccatggcatacttaccccactgagaagataggaaatcagagcctaacatttagcctagaatataattcatgggaatattcgtttatttctaatgcatcatgcacttttatattaggagcctcataaagttattatgatgtgggccaacaagatggctcagcagttaaagccctaagcctaatgacctgagttcagtccccaggctacactgagggttaatgaagagacagacaggccatgccctattataacagaccctgtaacctaacatcagcccggggctttggttcccactaatccttagggtgggggcaagaagtgagtgtgaccatcaccagacactgtgtgaaagagctcacgaggggtgatgtgacctgccctgggtcacagaaagggctctgcaggttgagccttggagacttgaccggtagtgggggaggacccccggatacctcagaaatcagacccatcaagagtctttatggcccagataaggcagggccagaccataagtcttaaatggtattacacgttttcctattgtttaggttcctttggctgtgagcttcctgtggatcacgtggctgtcaagtcccagatttcctgttaaggagactcaccagagtcaccaaaagttcacaggtgttttttagaaaactctagaaatacgaggtgggggacgctgggatagtcggtccagccttgttctaggccaggcagccagcagggtgcggcggtactcactgggctggtggcgcatgcagcacagaatggaccggaccttgatgccaaatgcttgctctccctcctgcaggccctggttcacaagatccacaacgtcatcaggggtgacgtcccctctgtgtggagagaggaagagggaggactttaggccaagggaagaccatgggcagccatggaactggagcagggatgtagtgatgtcacacagccctttctatttctagatggagaggggattgaatttgggcctgttcaattcccacttcccatgtggtgtatcagaatcatggctcagagggaaggaatagggggttcaagagacttaaaggtgcaaggggtcgaccagaagaccgcaacgggccagactcattcattgagcaaatgactttggaagtcaccggctaagccaggcagagtcatggcaactagctagtattcacttaggggagagacacagcctcaagcagaggaatagggatcgtgcacttaggactgagctgagtcgctctgagtccatggaccaggccagggctctaagcactccatcctcagctcagagccccgctcagcacagccccctccagtgatgtcactcactcagtctggttccagggcattgggtccaccttggaattggccagcaggtgtgggctatagcgcacttccacatagaccacgccctcctttgccttcatctccacaaactcgtaggcgatcctcttgatggcctctctgcagcccctgggaagggaagaacacaggttggcaaccttcctcagctccttgggagctctagtagccaacgaggtaactacaactgtcctccgagccagcctgtttccagctcacaggctctcaatgcctgggcacctgcccatgagagccaagcctcccgggaagctgtacgtttgaactacaaactcattctgacccccttacccttgtgtgaccactttgcctctaacaggcatgtcgaccagtttgtcccaaagtactccactctccacaaagcagtgagagtgatttaaaaaatggtgtgtgtgtgtgtgtgtgtgtgtgtgtgtgtgtgtgtgtgtgtgtgaaaccaaagttcattcttctcttctgagcccccatgcctgccagttgtatagctctgactccatgccagcccaaatgtcacagtcaccagcttccttggcgccttgtgctgcactgcacagtcttcctctggccaaggacccttgagcttgtccctcccacctcaggactttgggtcgtggtctcccctttgctccagcctcctgcactccacctgcccccacctaatgccagcttaaggccctctgcccgggcctcctcaaaccacctcccctcagcatcctttccccacgcctcaatccccacttgacattagatgccacatgctttttttaggggctatatcacatctccccttggctcctatgagacaaggatctctttgtctatcttgtcatggctgtgatacctcagccaagggaagtgcctaggacacagtagccatatattagatgaataatggacggaaggctggcagggaagctaaatggtgaatccagagggacgctgggatgggaggacttggtctccagtcatggactcactatgaagtctgtgtgatcctggctagtcaattaccctttgatgagggttactgtaagggaagggagcatccgaaacctcacccaggccggcagttggacaggcagacaaatgctacccttggtctcagccaaaaggccaagaagtgatcagacacagcccggaagggttttaattgctgttgctgtcgagtgtggactccatgagcaaggcacaagttacctgtgaaggcctctgtggcagtgatcaaatgctagtggatgggcctagttaggactccctccaatgtagagaaggcaagcaagtgcccccgacagcccttgggggagaagagagggcctgtctctgaggcagtggagtcactcctaggagtgggttccatgggtgagggaggatcgggtctcagctctgccatagcggggagcttgctcactgtctttcctagctccatccccccacagctctcacatagctatctacagtctgatccgtccttcaagtgggtattgagccctcatgctgggccaagactcctactagacagtgaacaggagctaggatccctgcctttccattgcctcgtgacagggaagccaggtgtaaatagggggaaaacatacaatctgtgacataggaatgctaccgatacaggtaaagctaggaggccatgtggcctgccacagcacggccagaaagaccccacctgcagaagacaaaccgtgggcttttagagaacagtggtgcaggttgagagaacagggacagaggatctgaggtgggggtggggtggggtgggggaggagtcagcacccatgaaagcaggagctcaaagttgtagggcttgtacacctgtcctgtggattttggtgtttgctctgagagatgtggagaaaggttggtttatttgggtcagaaggctggcttagatttccagtcatgagtcctttctctggcactctctagtgaccattcctgggccttctcagagactagtaatggtcttcactcacccagtgactcaagacatcaaagaaagacccaactccacttccatgtcccactccagggtctcccttccaaagctctagcctggggaatgagggacctggcttagacccttccctgttctgcacccatgcctcagtttaccttaagactagggctctttctatgagatctggaatggtggcatgggtctaaagagcagtgaattctgaacaggacatcctagatagcccggccagcacggggcttcagcaagcagagcctcctctgccctgagacagaagccacctctggacggaatgagatcaggagcccaaaggcacaggagaggtcggctcatgtgcacactatggtaagaagcagggttagaggtgcagagtgccttgtacagcagcagctcaggcctgaccttggttatagggatggatgctactgtggggcacaagggttggggagcaacttacgcaatcacaggcatgtagtagtcaaacttggccaggaagcctgggagcgagaggggcttgtccatgccgataatgttgcgcagctcctccactgtatctgccgggagggcgatgcctctcttcctaaaaataaagtcaagggtgaggggctgcaccagggcttggtgggtaagagcacactggctgttcttgcagaagacgagacccacatggaggcccatgaccagctgtaactctaattccaggggatccaatgccttcaggcctcctttgctggcatcaggcatgtgtgtgttacacatatacttgggggcaaaacactagcaacacataaaatgaattttttaaaatacatgcatttaaaaacaaaaccaaaaacaaatgaaaacagtgagatgccagggcgggatccagcctggccccccagggcagcatggaacagactggaagccccagtaagaaacaggggatccttccatctacctcctcccatgggatgggtgcggactccgaactccaaggcatagagaacagagcagagctccccccaccgccaaaaacttctaaccagaagccatgaaaaaaaaaaaaagtcactcatctcccatccaagaacaaccaggcccagctctgcttgacttccaggattaaatgcatttggggtggaatagccagacaagtcacttcatctcaagggactaacagggtgagtaccggggcaagcccgtgacttcctcatcaggtccaggggcaggcagaggcagttggacata

SEQ ID NO: 754 - DNA, 1061 bp, Mus musculus
gggagagggaaagggcaggagcgagctagctgccccagcctgcactgcccttctgagtcctggcttcttgttctaccttcccatctgacctaggatccctggccttggagacttggctcctactttctgcactggctaatcaagagtgaaaaacctgaagagatgcaggcaggaaaacggaattaaactaggcctgaggagcgatgagacaggcatgatggaagtcgagtcctcctactcggacttcatctcctgcgaccggacaggccgtcggaatgcagtccctgacatccagggtgactcggaggccgtgagtgtgcggaagctcgctggagacatgggcgagctcgcacttgagggagcagaaggacaggcagagggaagtacccccgacaaggaagccagcagccagcctgagagcagtgatgcgaacacctcatcctgagtctgcctgtggtcgcaaggctggaagagacctgctgtacctctcggactggagccctggccagccaggcggactgagagcctcatggagtcctctgtggcccccactccagccaagtcctccacccacagcacaggctccacccttccccacctccccacggtgcccaggttcactctgaagacaccagcaccatgagatgttatttattcagctaggcggggctcgagccaggccctgcccctaggtgagcagccgccacctggacagggactgtcctgtcaccactcaccctccagccagcctgtctgtcaggaagatcttcctagcccttttttaaagcctcttttacattttttaaaaacataactttttcagagagagaggggagctgacaatcacttttcttctgttttggtttttggttttggttttgttttgaaagccgtttaaagctcagttctgatgatctatgcagctctaagtttcctcatggagcctcacagatccagttttgggaaaggatttggactcaaaactaactgaccaattctttgccctttgtaccaagagactgatacttaggcccaggaaataaatgctggtggtttgtgtg

SEQ ID NO: 755 - protein, 103 aa, Mus musculus
VCGSSLETWASSHLREQKDRQREVPPTRKPAASLRAVMRTPHPESACGRKAGRDLLYLSDWSPGQPGGLRASWSPLWPPLQPSPPPTAQAPPFPTSPRCPGSL

SEQ ID NO: 756 - DNA, 107036 bp, Homo sapiens
ggtggtaactgccagctgaggtgactccccagaaacatgacggtttctcaggccggaaacgcagccttccacagacgcacggatgcgtcacggcgtggccccgcccaccgtccgcgaccggagcggcagaggggggcgcctgtcattggctgagggggaaggtggggctaaaccatcctggggttgcaggaactgtgaaggtgtcattccttacatcatttgtattcattgtgcaaagatctggaagttacagaagtgtacagagaggcacagtacgctcagaatttattctctagttaataggagatctgacaacataaatgcaccgtgccccaatgtaatgaatacgatgaagtagtatgggggaataggctttcaataaaggtgtatttagtgcctcctattgtaaggggaaagtaatttagctgggcagtagtcttggaaggcttctctgaaggatttattttttaatctgcgaactaaaggatgagtccaaattaacctagaaacgatggaaatcgtatcctaaaatgtgggatgcaccccatttgggaaaaatgaatggctctaagggtgcatgaaggacattaagcgatattaaacagcagagtgagaacgtcccatttcaaaccaacaggctagttgtttgaggccagtatggtatttaacatttttctagtatttatctccctttctaacagagtaaagccttcattttccagatctctcaaacaggcaaccatgcctgcagttttaaaatattgttttgttttgaggtgtgtgttagcaataaccttttcatttcttccgagcaatgctgatttcccatttaagcagtgatgtaaatattcctttcaaaatacatgtcaaatttgagagttcacttaaagaagaaaatgaaaacattttttacttacacatataatagtttaggtggaatgtggcaaacaatgatgatgtccggacaacaaggtgtcacacttcaatatcttctcctgtggtgtgttaatcttccctgatagataaaactctctggaaggggattcataattgaattccttctggattgtcagcctttagtctgataagggaaattcatgaaaagcccctctctccatgtgctgttccccaagcaatcatcataccagtgtggcatatttggggatgttatttcctggattccttgaaaatgtattccaaattcatcttttacagaaatggaatgaggctcaaagtttgcccaaggccatgaaaagggctgatgaaagaagaaagagaactactcacatttaataattcctacctctcttttcccagatccctctcctcaccacacatacacaaataccagctcaagtcaagttgcttcaggaccactgaactttccaggtagtccttaacattcttgcttcttcctgtctgagtattgctggtctggacttaagagagctgactgtgataaattttacagatcgaattctaccagaaacatacctgtagtcaaaaagaattaggtttatttagcttgttcagaaagggagaacacatatcagagaaaatataaggtgtcttggtaagaggtgactggggagaacttattttaggatttgggtttatgctgggtaactaaatctaaggagagtttaaggaggaggagaacagttttggattggacacagtcaaggagtagaggcaattcagtgattaggtatcttacaaatttttatccagaaggaagaaggattaaaacaaggctagattagtccttggaaaagtgtgataccctaccttgtcttaacctgaattgactctctcttagctgagggagacagacaaactccattttggctccttcacttgccgctccttacccatcccacttcctcaaggatttaacttgtgcaagctgactcccagcacatcaaagaatgcaattaactgataagatactgtggcaagcgatagctgcagtttccaggaattcacccggttgatagtaccctaagcccctgcatttttgtccggttgatggtacccaaagcccccacatctatcaccttgtgatggatttaaagcccctgcacctggaactatttgttttcctgtaaccatttgtctttttaacttttttgcctgttttacttctgtaagattgcctcagctaggctccccctcccctttctaaaccaaagtataaaagaaaatctagccccttcttcggggccgagagaattttaagcactagccatctctcagttgccggctaataaaggactcctgaattcgtctcagagtgtggcgtttctctataattcgctcggttacaaaaaaagaagcaaaatccactcatttattagtcagaattggaagatgttgagtcctatctgcggtaccagagtggctttgtctgtatcttgatccaactacatggtggtcttgtctgatctttgtttatattctgtgatcactgtttttgttcagttagaaacattaggtctagctgtcagctgaacagtttttcattttcttacctgtaagcatttgtcctcccacatgtaggatccccccatctcttagtgtttctggccctaactggttgagtgtgtcacttctacttggccaaagcgaggacagcagatctttgtgatcatctactccaatttcccgcctcaggcagaaaccccttagcaacatctcttctagggtagggggctcactgccacccaaggcagctcctcccatctttacacatccattgtcaaacctgtcaggcctctgagcccaagctaagccatcataaccccgtgaccttcacatacacatccagatggcctgttcctgccttaactgatgacattccaccacgaaagaagtgaaaatgccctgttcctgccttaactgatgacattaccttgtgaaattccttctcctggctcatcctggctcaaaagctcccccactgagcaccttgtgacccccgcccctgaccatcagagaacaaccctctttgactgtaactttcctttacctacccaaatcctataaaacggccccacccctatctcccttcgctgactctcttttcggactcagcccgcctgcacccaggtgaaataaacagccctgttgctcacacaaagcctgtttggtggtctcttcacacggacgcgagtaaaaaaacctaggttatttccccccatatgttgttgaaaagataacacatgtacttggttataacatactgcataaaggagcacacggtgaaaatgaagtgtccttcccacccttcccccacccccatctcccagatctcctttcagagttcctacaggaatatgcatatgccagcattatggcacttttttttttttttttttttttgagacagagtctcgctctgtcgcccaggctggagtgcagtggcacaatcttggctcactgcaacgtccgcctcctgagttcaagcgattctcctgcctcagcctcctgagtagctaggattacaggtgcccaccaccatgcctggctaatttttttttgtatttatagtagagacagggtttcaccatgttggccaggctcgtcttgaactcctgacctcaggtgatccacccgccgcttttttttcacttaacttattagttcattcgataaatatttaccatgctattactatgtgtcaggcactgttgccagtgataagaaaatagtagagaacaaaacaaagtgcccacccttaaaagaccttatgctgtagggaaaaaagacaagcagcaaacacacacgtatataatataacactcagacactgacaagagctgtgaaaaaagagaaaggagaatacagagttggtgggggtccattattttcttttcttttatttatttatttttttttttttgagacagggtctcactctgtcacccaggctggagtgcagtggcatgatctcacctcgctgcaacctcagcctcttgggttgaagcaatactcatgcttcagcctccccagtagctggaattacaggcacataccaccatgcctggccaatttttgtatttttagtagagacagggtttcgccatgttagccaggctggtcttgaacacctgacctcaagtgatccgcgcacctaggcctcccaaagtgctgggattacaggaacgagccactgcgcccggccctactattttcaagagtagtctgggcaggtcttttagagggcttgacactggagcacagacatgagggaaccgaggaagcaagccataaagatacctggaggaagagcaggagaaaatgccctgagatgaaagcatgctttaaggcaggaaaacagagtctggagtcggggaacaaaaggctgattcacacttcagctatgacaggaaatatcctctccatagggtgtaggccaagtaaatgactttgtaactttacttcatccttttcatttacatagggcgtgtcccaagtagagggtatttaaactcccaaaaattctgtaacaggggcccttgagctcctatgcttgggccccctcccacactgcggagtgaattggtgagatggagtcttgctctgtggcccgggctggagtacactggctcaaactcggctcactgcaacctccacctcccaggttcaagcaattctcctgcctcagcctcctgagtagctaggattacaggtgtgcaccaccatgcccagccactttttgtatttttagtggagacggggtttcaccatgttggccaggctggtctcgaactcctgacctcgtgatccgcgcgcctcggcctcccaaagtgctgggattacaggcgtgaaccaccgcgcccagcccatactttcattttcaataaattccttcattccttcttgctttgtgtgttgtgtccaattctttgttcaagatgccaagaacctggacaccctccaatggtgacagctgagagggaaaatggtgagagatgaggctggacaagtattcagggggcagttcacttccagccttgttgatggtgacaacaactctacatcttattctaaatgtaatggggaaacagttgaaagcttttgagcaggtgagggacatggtcatgcttacttttttttttttaagctggagtttcaaaaaaaagccttcagccaccgcgccaatcatgtttacattttattttatttattgttttgagacggagtctcactctgtcaccaggctggagtgcagtggcgtgatctcggctcactgcaacctcggcctcccaggttcaagcaattctcctgcctcagcctcccgagtagctggactacaggcgcacgccaccacgcccagctaatttttgtatttttagtggagacatggtttcactatgttggccaggatggtcttgtactcttgacctcgtgatccacgtgccttggcctcccaaagtgttgggattacaggcataagccactgcgcccggccgtgtttacctttcaaaaggatcattctggctgctggttggaataaagactggagcagggatgggttagggttgagggttatagtagaagcaatggcgggactagttcggagactgttgccgtatacatagctgaaactgcctttgcaaaattatgacggagacagtgaaaaagatctaacttcatcttcgttctaacctttaacctgtccttgttccttcctgggtgtaggctgaactaactttgggaggaacttagtttatagtttaaaacaaagatgataacagccccttcccaaaacaaaccttcctcttgcctgggtactagactgcctttgtaggactaacaaattagccacaagattagaaattatggcttaggagtcatgcagctggaggctacaagattctgaccctccctgaacttctgctaagatcagcgcttgagatattttccagaccctgaacttgatggatcagctggcaccacacagattgataaagtggctcatctgatcttgtggcccgcacccaggaactcagtgcaagaggacagcttcagcttcccatgatttcatctcctacctgaccaatcagcactccttgctcactggcttccccccacccaccaagttaaccttaaaaactctgatccccagcctggagcggtggctcatgcctgtaatcctggtaccttgggaggctgaggcgggtggatcacttgaggccaggagttctagtccagcctggccaatatggtgaaacccccgtctgtactaaaaaaaatacaaaaaattagccaggcatggtggtgcatgccttgtagtcccagctactctggagactgaggcaggagaatcacttgaactggggaggcagaggctgcagggagtggagattgtgccattgcactccagcctgggcaacagactccgtctcaaaacaaacaaacaaacaaacaaaaaactctgatccccaaatgctcagggaggctgatttgagcaataataaagctccggtctcccacacagccggctctgtgtgaattactctttctctgttgcaactcccctgtcttgataagtcagctctgtctaggtagcaggcgaggtaaaccccctggctggttacacagcttgaagacagctctgtatctaaactgtatctacgtctatatctaccttggtccctcttaattcttgctacggtaatctattttattttatggatgtatcataatttatttcctcagttccctaaggatagactttttttttcgtttgagacagagtctcgctctgtcgtccaggctggggtgcaggggcgtgatctccgctcactgcagcctctgcctctcgggtttaagcaattctcctgcctcagcctcccaagtagctgggactacaggagcgcgctgccacgtctggctaatttttgtatttttagtagagatggtgtttcaccacgttggccaggacggtcttggtctcctgacctcatgatccgcctgcctcggcctcccaaagtgctgggattacaggcgtgagccaccgtggctggcttttttttttttttttgagacagggtgtccctctgtcactcaggctggagtgcaatggcacagtctctgctgacttcaacctccgcctgtcgggctcaagggatcctcccacctcagcctcctgagtagctgggactacatacaggtgcacaccaccacacctggctaattttttaattttttgtagaagtgaggtctcactatgttgcccaggctggtcttgaactcctgggctcaagcaatctgcctgcctcagcctaccaaagtgctggactgcccaaggggttcaccttgcacgctgcctagacagagctgattaatcaagaagggggaattgcgacagagaaagtaattcacacaaagcctgctgtgcgggagcccagagttttgttattactcaaatcatcctcccgaaaactcaaggatcagagtttttaaggataatttggtgggtagggggccaatgaattgggagtgctgattgcttggctgggggatgaaattgcagagagtcgctgggcgcggtggctcatgcctgtaatcccagcactttgggaggccgaggcgggtggatcacgaggtcaggagatggagaccatcctggctaacacggtgaaacctcatctctactaaaaatacaaaaaaactagctgggcgtggtggcgggtgcctgtagtcccagctactcgggaggctgaggcaagagaatggcgtgaccccaggaggtggagcttgcagtgagccaagatcgcgccactgcactccagcctgggtgacagagcgagattccttctcaaaaaaacaaaacaaacaaacaaaaaaaccagaaattgcagagagtcaaagctgttttcttctgctgagtcagttcctggatgagggccacagaactggttggcaggtccagtggggccatctggttgttagaaatgcaaaaacctgaaaagacatctcaaaaggctgatcttaggttcacaatagcgattttacctcaagagtaattgggggccaggcacagtggcttacgtctgtgatcccagcactttgggaagctgaggcaggcagatcacttgaggtcaggagttcaagaccagcctggccaacatggcaaaaccccgtctctactaaaaatacaaaaattagctggcgtggtggcaggtccctgtaatcccagctactgtggaggctgaggcatgataattgcttgaacctgtgaggcagaggttgcaataagccaagattgtgccactgcactccagcctgggtgacagagcaagactctgtctcaaaaaaacaaaacaaaaaaatcttatgacctctagaataagaataatggtgggtactatttagaactccagcccttctcatcttggcttggtggctggtggcctgtggcctttcatttgttttacaagaacagtttagctttctggaaagggctattgtttaaatgatacactaaattccttcccaaggctagtttggcctggcttggcatggtggctcacacctacaatcccagcactttgggaggccgaggcgggaggatcacctgaccaacatggagaaaccctgtctctactaaaaatacaaaaaattagctgggcgtggtggtgcatgcctgtaatcccagctactcaggaggctgaggcaggagaatcacttgaactcaggaggcggacattgtggtgagccaagttggcgccattgcactccagcctgggcaacaagagcgaaactccgtctcaaaaaaaaaaacaaaaaacaaaaaaacaaaaaaaactggtttagcctatacccaggaatgaacaggacactttagaggttagaagcaagatggggtcagttaggtctgatatctcagttatgattttttgcaaaggtggtttcaggatgacaggtgtgagccattgcgcccagcccctgatagatatttagactggtcgcaacccttttgcttttacaaaaatgaattaatgaatatatcctttgtgctcaggtttcagcatatctgcagagttattccaagaagtgtagttgctagacacaaggaaaaataaattattcctcatattgaaattaaatctggtgatctaattctccatcaaagaaaccaatttattcactctttgccacaccaccccttcagagactataaaagagaggaatctgccacccttcccacatcagttttcttgtctttaaatattcccagtcttggcagggagtggtggctcacgcctgtaatcccaccatgctggtaggcccaggcggatggatcagctgaggtcggagttcgagaccagcctggtcaacatggcgaaacctcgtctctactaaaaatacaaaaattagccaggcgtggtggcaccttccggtaatcccagctactcgggaggctgaggcatgagaatcgctcaaacccagggggcagaggttgcagtgaaccgagattgcgccactgcactccagcctgggcgacagagtgagattctgtctcaaaacaaaaacaaaaacaaaataacaaaaacccagtctaccaagccaccacctgaggccctgtctcctcctcgcacggtccccatttgaggttacagagagataaactgaggcacaagcagcacccgcggcccaagacctccccttggcctcactgtccccctttccgtatcttccccgggccaagttccaacccggatccctccttcgcagctcagccctcgactcccacttcgtccctcctctgccccctccgcggctgcggaaggggacgcgaaccgtcctggtcccatccgagccgccgtagcgcgagtgccgcgggagttcggcagcccaggtcgccaaggcaacgggctccgctgcgggttgcgggctgcgggcgctaggctgccccggggaggcgctgcggaccggcggcccaggcacggagaggcggcgagaccgcaggtgagcaggagccgggcggccggttgcggccccaacgctccgggcctggcgtcgacacgtcgcagggggcgaggggctgagccgccggggatcccggggagggaggctgcggcccgatctttgtccctcagccgcgccggggacggcgcccccgacgccctttgaccccgccccgcgttcagggagagtccgttttcggctgtttattatatttgtagccattggtcgacctcattcgaaagtttcttaaaaaaaaaatcccttcttgtttgggggccagaaaataactcaaaactgtgcagaaaatttatttgtgtgtgtgactcttctggggccagagaggattgacttctttgtgcgtcagttttatcgtctgcaaaatgggaatcatggtagcacctgtctgatgacgttattacaaggtaaatttatatttaaaattcgtggaggtaagccctcaatacatgggagcttttattattactactactacaaggaggaccatcactgagcatttattgtgagccacggcccgggctgatagccagggtaaaaaagtgaacgagagacatcgtgtcctgagggaactccacagttttccggaggagacagactcgtaaacaagaattcacagtgattccggttatgattttggacatacaggggggctgtgaatgcacagagaaaacagttaacctggatttctggaggtgaggttagtgtggatgatcagggagagatgccaaaagaaggtgacttccaaaatgagacatgaaggctgtctttatgttggccagaagatgaggctggtggagtgtaccttgctgtgggtagataaagcaggtagagaaagtaggtagagaaaagccttggggagagagtgcagacttcttgggaatctgcaaggatttcaggctagctggagagcagattatgagagttggagggggtctggctagatggtgtttgagagacaagcaggtgctcctcctgaaagactgtaagtgtggaggagtttgggctttgtgttgggggcagtgggaagccatcaaagggttttaagccggaggtgtgtgtctttgatcagaggtatagtttcagaaagatcagttttttgtgtttctctcttggtcttatcattcctcccatctgtttttcactttgcaggcattcatttgtggtgattcatatatatgtgtgtgtgtgacagtgtgtgcgtgtatgtatttattgttgagatgaggtctcactatgttgcccaggctggtctcagattcctgggctcaagtgatcctcctgtctcagcctcccaagcagctgggactgcaggtgcacaccactgcacctggctaattcaaaaaatatttaatgagcatcttcttctatgtgcaaggcactgtgtaggtagtaaggaagcaggtccctgccctcaaggagatcacagattggtggagaaaatattcatcaaacaagtgattataattgtgatgagaattgtgaaagggggcgcatgttaagatcaatctagcatagtttggagattcaggtagagttttgataaaatgtatggagggtgtagtctgagttagctatcgtggggatgttccaaacattttcaaaagtacattcatggagccaaaagcagtccactacaactggaacttaaagatcaatattgaaagagatccatccagagaggttgacaaaaaaaaaaaggctgagattattcagggctactgcattgcatactcttggaagaatgagccatgcacttagtctacactaaaagaaatggctagagaaacaggaacaggagagaaaccagcaaagtatagtaatgaaggccaaagggagaggttggttggcctttgtagatgttgctgagatgtcgagtaatacaagttaaaaattaaaatgtgtccttttgggtaaataaatatggaggtcggttgggacctcattgagcagatttggtgaaatggttggggcggaatctataatatcagcagctttcaaaggttcaatataatatatcagtgggatgagttaagagtgggatgtgagaaagacaaagtgtaggcagctcagagaagtttggctgcgaagggaggtagagagaaggctgaggagcgattggggaataggtgaagtttttttgagcatgagagagattaaatgctgttggcaaagagccagtggagagagagaaaggctgagaagacacaggatatgaaagggagaattgatagtataactttcctgagaaggtgggagtggaggagctccacagtacagatccttcaataggagtctgatgcctgttactttttggagacgtgggaagccaggttattcctgaaaggagtgcaccagtgtaatgcaacaaaaataaataaaggtataagtgtggaaggaaagtcacaattttcattgtcggcagatagcaggcatttattgaactagtattgtgttaagtacttttcatgcaccattcttttttttttttttgggacagggtatcactctgtcgcccatgctggagtgtagtggtgcaatcttggctcactgcagcctctgcctcctgtgctcaagcgatccacctgcctcagccccccaagtagctgggaatacaggtgcgagccaccacactcagctaatttttgtatttttagtagagatgaggttttgccatgttgaccaggctggtctcgaactccagacctcaagtgatccacccgcatcggcctcccaagatgctaggattacaggcatgagccactgcgcccggcctcatgcaccgttcttaatgaataatgtgatgtttacaacaaccctgtgagataggccctctaataattgcaaatttatggataaagaaactgaggtaacatgctcactcagggtcacacagtatttgaatctaggtttacctgaacccagagcttttactcttaaccactacctggatgatataaatctctacctgtgatatgattgtctgctgagaaaattcaagagaattaaactaaaaatacttagatataataaggctaagtgaacagcagttataagatagacaaaaagcaatagctttatgcaaacaaaaatagaaaatgtaattgtaggagaactgacaatagcaacatgaaaaataaatacttagaaataaacttaaaaatacatgtacccagcttagccacacagagtaagagttggctgggcatggggatgggatgacaggatgagtaaggtaaagtagttttcccatgggaacatcagagtattgatactggagaaggggtaggttaaaaaaaaaacaggtgtctatcataagacatcatgagatattgactatcatgtttttataaaattgaaaaattggcctggcacggtggcttacgcctgtaatcccagcactttgggaggccaaggcgggcagattatctgaggtgaggagtttgagactagcctggtcaacatggtgaaaccccatctctgctaaaaatacaaaaattagctgggtgtagtggtgcacgcctgtagtcccagctacttgggaaactgaggcaggagattctcttcaacctgggaggcagaggttgcagtgagctgagattgtaccattgcactccagcctgggtgacaagagcaaaactccatctcaaaaaaaaggacagttaggtgggagctatatatattagaaagatgtttacattatgtggttaggtgtaaaaagcagattacggtacagtatgttactgttttcttaaatgtatacatgtttataataaaaatgtctggaaatactagttctttttaaaaatgttaaatctttaattgtgataaaatttaccatcttaacgatttttaagtttacagttttgtagtattaagtgtattcatgctgtgcaaccaatctgcatgactttttcatcttgcaaaagtgcaaaagccaaactatacctttaataggtttagctccccatttccgcctccccaccagcccttggcagcacccattctacttttgttttctatgtgtttggttactctggatacatcgtgttagtggaatcttgcattatttgtctttctgtgacgggcttatttcactagcatagtgtcctcaaggttcatccttgttgtgtagcatgtgtcagaatttcattctttttgtaaggctgaataatattccattgcatgtttataccgcactttgtttatccattcatcgatggtcactttgagttgcttccatcttttggctattgtgaataatactgcagtgaaacataagtgtactagaaaggtaagctgtttatgagatcatggggaaacttttattctgttcctcattgccctaattttccttttttatgagcatgaattgccttcataatcagaaaaaaaatgaggaagtatcttctttaggaggctggggaaataagggtaaaaaagggcagtggcagcggaaagggaaaggagagggcagatttgagagacatttcagaaggagaatcaacaggacttgaccaacaagaggtaagggagagaggagtggaagatgaagctttcctggcctctggtgggaaggggcatcagtcctggtggggctttgactaggggaggagggaggaaataaggctggagagccacccaagcctttgtttagcagtttggacttctagaaggtggagagaaaccattgaaaggaagtgaaatgacttgatctgatttgcacatagagagatgacactggctctttccaaccattctttaaactgaaggcagatagtgccaggtatccctttgtgttgcttatacttgaacttctgttaatttccttttatttgagatgaacctttagtactgaagtacacatatctattattctaaaagcacctggaatattttaaacaatgttttagtgtgtgtttttttgttttttgtttttttgtgtgtgttttttgagacggagtctcgctctgttgtgcaggctggagtgcaatggcaccatctcagttcactgcagcctccgcctcccaggttcaagcaattctcctgcctcagcctcccaagtagctgggattacaagcacttgccattatgcccggctaatttttgtattattattattttttttgagatggagtttcactcttatcgcccaggctggagtacaatggtacgatcttggctcaccgcaactgccacctcctgggttcaagcgattctcatgcctcagcctcctgagtagctgggattacaggcacgcgccaccacgcccggctaattttgtatttttagtagagacagcattctccatgttggtcaggctggtcttgaactcccaacctcaggtgatccactcgccttggcctcccaaagtgctgtgattacaggtgtgagccactgctcctggcatttttgtatttttatagaaatggggtttcaccatgttggccaggctggtcttgactcctgacctcaagtgatctgcctgcctcggcctcccaaagtgctgggattacaggcgtgagccaccgtgccctgcctgtgttcagttttatctcaataacacagtctcctgtaaatatacttacttttttttttttttgagacagagtctcactctgtccctcaggctggagtgcagtggtgcgattttggctcactgcacccttcgcctttgaggttcaagtgattctcctgcctcagcgtcccaagtagctgggattacaggcacacaccaccacaccggctattttttttttttttttcatttttagtagagacagggtttcaccatattggccaggctggtctcaaactcctgaactcagatgatccacccatcttggcctcccaaagtgctgggattataggtgtgagccactgcacccagccatcctgtaaatatactttctgactttagtaggagaagtatgaataattgggaaaataaatgaaacaaaaataattcaaggtagagtatgtcacaattctgttaaaattttaaaatttaaaatttttcacattttactgaattctgacagcctccttttgagagaaaaaggacaatataaggtatacagtgtcatattaaggaactcttacaaaatgaaaatttggagggtccagatggattcagcccgtcacttagctccactcccacaaacctgtagtctctgtctacttccagagcattacagacagagggagctaactgttgtgctaacatttgtaaatagctctgcagtttagaagagctggatttccaaaagatgtaaatccatgatatcattttagtcctcctaacaattctgtggggtagggattatcattcccattttcaaatgagaaaattgaagatcagaggatgtgacagatccctctcagatactatatctaataagtcctggagtttgaatccaggttttattttcttcttatattttagcattttattatggaaaagtttaaacatacaaaagtagaaaagataataaaagacacctaatatactgagctttagcaattgccaacatatggtcacttttattttatctatactgcctacttccatcccaccttaaattatcataaagcaaatcctagtcatcatatttcatccatgaatactgtacttcaatatacacatctaagagagaaggattttttcctcctcctttcccccctgtagtcacagtttcattattacacctaaggaaataaacagtagtcagtcctaaatattacataatatccatttggtattcagtttcctcaacaattttataaatgtctttctaaaaaaatgtttttttcaagatggagtctcgctatgttgctcatgctgtacttgaactcctaggttcaagtgatcctcctatctcagcctcatcagtatctggaaatacagatgtgtgtcagtgtacctagctttttttttttctttctttttgacacagagcctcactcttttgcccaggctggaatgcagtggcgtgatctccactcactcactgcaacctctgcctcctgggttcaagcaattatcctgcttcagccacctgagaagctgagattacaggcacgtaccaccataccccactaatttttgtatttttagtagagacagggtttcactattttggccgggctggtctcgaactcctgacctcaggtgatctgcccgcccacctcagcctcccaaagtgttgggattactacaggcgtgagccatcatgcccggcctgcccaactttcataaatgtctttttacagttggtctgtgttcactgggatccaaacaaggtgcctgtattagacctgattgatgatctcttaaatcaagcttgtccaatccgcagcctgtgggccaaatgcagcccaggacagctttgaatgaggcccaacacaaatttgtaaactttctttctttgttttttttttttttgaacgaagttttgctcttgttgcccaggctggagcgcagtggcgtgatctcggctcactgcaaccttgcctcccatgttcaagcgattcttctgcctcagcctcctgagtagctgggattacaggcgcccaccaccacgcccggctgatttttgtatatttagtagtaacagggtttcaccatgttgaccaggctggtcttgaacttctgacctcaggtgatccacctgcctcggcctcccaaagtgctgggattacaggcatgagccaccatgcccagcctcaaatttgtaaactttcttaaaacattatgagattttttgtgtgtgtgattttttttcttcttccaatgtggcccagggaagccaaaagaatggatacccctgtttaaaatcttcttaatctatagccatttctcctcttcttttttccccctttgccatttatttgtttaaaaaagtcatatcatttgccctatacaacttctcatattctgcatttgactgattacatctatttatttatttatttacttttcttagatggagtctcgttctgttgcccaggctgctggagtgcagtggtgtgatcttggctcactgcaacgtccacctccagggttcaagctattctcctgcctcagcctcctgagtagctgggactacaggcgcatgccaccacgcctggctaattttcgtatttttagtagagatggggtttcaccatgttggccaggctggtcttgaactcctgacctccagtgatcaacctgcctcagcctcccaaagtgctgggattacaggcatgagccactgtgcctggcccagtttttccaatatttaaacaaccaacctgtgctatagcaagtttcccagtcaaggattcatttatgttcaagcatgctacttataaaataatacagtatattgatccatttataaaattatgcaatatattgattcattttagaatttcctttaaaggctttcttgggtgactaccaattaaccaaaattaattacgttatcccaatgaccaaattaatcccctggtcaaattgaactggatacatgagttatgtgaaaaaccttccaggggttttcacatgtactgatgtttttgttttgtttttttttgtttttgtttttgtttgagatggagtctcaaacaaaactccagtttcccaggctggaatgcaatggcatgatgtcgactcactgcaacctctacctcctgggttcaaagattctcctgcctcggcctcctgagtagctgggattacagctgcccaccaccatacccggctaatttttaaaaatatttttagtagagacaggatttcaccatgttggccaggctgatcttgaactcttgacctcaggtgatccacctgcctcggcctccccaagtactgggattacaggcatgagccactgcgcctggccgtactgatgtttttgattctctggttatacttgaggtagagtaaatgattctaaccagcactggaaccattaaaggaatgtagggcctcgtcagtattagttggttggagaggggaaggaagttaggaccaggcaggaatgagtgggtggagaaactgactcagccgtttggttggcttctaggcatgggaattcagcggagggagccagacctcctatgcatatgatggtagcaagagtagccctcattttattcctgccctttctaatcaggataggcttaggacatgagcagtgggatgtttagtgacatcggcaatgaaggactaggaaatacagactttgatttattttttaagtgattctccatcagctgtgtgcttttaagactagactatgggtttttttgttttgttttgtttttgagactgggtctcattctgtcacccaggctggagttactgtggtgcaaccatagttcattgccacttcaaactctgggactcaagtgatcctctcacctcagcctcttgagtagctgggactacaggtgtgtgccaccacatccagctaattttaaaattttttgtggatacgggatctctgtatgttggcctggctggtagactgtgtttttatttgaatatttgtaccaaaacttaacattctgctgcttattgattatattttactacctaagaaaataaatatgtattatttttaattggcttatataaaacataatacctgttttcttgtagcttttaagtaaaatttgaagcattagatttttaagtgtaggttctttaggttctttttttttttttttgagacggggttttgctcttgttactcaggctggagtgcaatggatcacggctcactgcagcctcgcctcccaggttcaagcgattctcctgcctcagcctcccgagtagctgggactacagaggtgtgccaccatgcccggctaatttttgcatttttagtagagacagagtttcaccatgttggtcaggctggtcttgaactcttgacctcaaatgatccacccccctcggcttcccaaagtgctgggattataggcataagccaccactcccggccaagtatagcttattttcttatttgtaatttattaaagccaaagacaccaagattgaaagcaactgaaaatgaaaatgatatttccggggaggctaataacttacggagctttcctgtggcctcagggtcattgttctctgttagccaatccttagaaattgctagaactcataggaatgcagagttgtatgatgagaagaacaagaacttgggtttcagggagatcagggtaaccttgggcaaggtctctgagtctaggttcccttatctgtaaaatgtctcatgaagtcatgtgagagttaattgttataaagcttggccactcgaaggggcttaatgaatgtgagttatcttcctttctcccagtcctgattttgcaaacctacctactccgtgtttctgctaatcaccagaatgaaacttaaaaaaaaaaagaaaaagctgatggtttaatcttgattttcagtgtcagttaagcataaaataattctattgttttcttatgtgcataaggcttaactttcattggtttttgatgatctctgcatgttatatatggtacatattaaatatagtggccatatttttttttaatttcttttataatatttttttcgagatggagtctagctctgtctcccaggctggagtgcagtggcgtaatcttggctcactgcagcctcagcctccgcctcctgggttcaagcaattctcctgcctcagcctccccagtatctgggactacaggcatgcgccacaatacccagctaatttttgtatttttagtagagacagggtttcaccacgttggccagactggtctcgaactcctgacctcaagtgataggcccacctcaccctcccaaagtgctgggattacaggcgtgagccactgtgcccagcagctatattttataaaccaaaaaattgggacttgtggtgtgataagtatagtatacttaggaaggttaggagaacagaatattttgaagaagtgcactctcagagaaatggtcgctgtgcttttatgtattcataaggaagcagtacaaagttgtggttaggaatgaggccctagagtcctttggacatgaattcacatcttggcccaggcactttctacttactgcacaatatacttaacctttctaagcttcagagcttcctcacttgtaaagtggatattatgagagttccttgtttcttgtgaggattgcatgaaataaagggctcagcacagtcttggcagatagaacttaacatgtaaatgtcagctgttatgtttattactgtaaagcctttgatacgtgcacacttatacagtaaactttttttttttttgcaaaaacctgttcaaaaagcacttctaaaataactcaatatttgcaaacttactctatagtaagttctttatcaggcctcgtacagaaagggcacagaaatattttgaagaccgcatgccctgtcttgcatgcccactgggaagacctgacttactttggccttctcaaaatatttgcataactctcagcacctactccattgcttctgagatgacctctgcaacgtgtatatgttttggctgatacagccaaacttgtcctggacagacttcaaggttcacttaatctactgtcacaggcttctttccctaagattttcttggttgtgccctccctagagtattggcttcttcctcaggctagcagcaaaatagctgcagtaggcctaggccccagatttatgtatggcacccacctaaggaatagaaagattgtcttggctgggcgcggtggcttacacccgtaaaatacctgtaatcccagcactgtgggaagccgaggcgggtggatcacctgaggtcaggaattcgagaccagcctgaccaacatggtgaaaccccgtctctactaaaaatacaaaaaattagccgtgtgtgatggtagacgcctgtagtcccagctactcgggaggctgaggcaggagaatcgcttgaacctgggaggtggaggttgcagtgagctgaggtcacaccactgcactccgacctgggcaacaagagcaaaactccgcctcaaaaaaaaaaaaaaaaaagattgttccttagagtgagaatttttctcagaagcctccagagaactaccctagaatctcattggcctggactgggtcatatgctcattcctgagccaatttttgttagtagggcaatgtgatgccctgatgggcttaggcctggttcttgaacaagccatttacaagagggatgaaattatctctagaccattcagaaacagaattgtgtttctgttaggaaaatttttttttttctatgagtaggtgaatggacgctgagtagattggtcgaagaggaattgtgttggctgctgataacagtgctttaaagaagacaggttatttttctctcaaaaaatattaagtccaaagtagatagtctgttcctggcatggcagttccacagtgccatcaggcagcctagatctttctctctttctgtttcaccatgcttatcacacagcttgcagtcaccaagtggtcgcacgtgttggctctggctctctagccaaacggtctttgaggcaggaagaagtaggaaaggggagggcagaggacaccctttaaagtaccctaagtcccaaccaccatgttcagtttacatctcattgtccattcttacttgtgaagaaggctggtaaatgcagtttcttagctgtacacattgccattccccaaaacagggattctgcagctgtggaagaatgagaaatagatacaagcctggaagtgggcagtgcccaccacaggaggcggccaacaatgtcagctataccctgtatttggagaaaattgcagtttttacattgactttcctctttcttttcttttcttttctttctttctttccttccttctttcttttttttttttttttttttttttttttgagatggaatcttgctctgtggcctgagctggagtacggtggcacaatcttggttcactacaacctccacctcctgggttcaagcaattcccctgcctcagcttctggagtagctaggattacaggcgtgccccaccatgcccagctaatttttgtatttttagtagagacagggttttgccatgttggccaggccagtctcgaactcctgacctcaggtgatccacccaccttggcctcccaaagtgctggggttacaggtgtgagccactgcgcctgcaatgcccggcctgcattataaatatttgttcataatgtgttgctaacagtgacaatcaataagaatcaactgggtttgttccccagcctgtttagttttattattgtgattacaaaataattaaatattatgttaaccaatgaaatgtaaagggaaaaaggaaaaaagatactgcttttatgaaaaataagttgaatgtgcttacctgataaaggcaaatggctaagaaaaaatatttttgtcaaattaggggtggaagagacctctgaaaagattgaagaaaaaaattataaaaatatggagattctgacagatagggtaactctcacctgtaatcctagcactgggaggctgaggcaggaagattacttgaggccaggagtttgagaccaatctgggcaacagtgagaccccgtctctacaaaaagaaaattagccagatgtggtggtgtgtccctgtagtcctagctacttgggaggctgaagtgggaggatcacttaagcccaggagtttgaagttacagtgaactatcatcacgccactgtacttactccagcctgggacacagagtaagaccctgtctccaaaacatatatatacatatatgtttctgccttcagaacacttcacaagtatcattccagtaaaaactgaaaatcatagatgtacatcatgagtgtagttcatgcagaaactttaattgcttgaacttactctcaagaaaaggccttcactgggcacagtggctcatgtctataatcccagcactttgggaggctgaggcaggtggattacttgagtccaggagttcgagacacaagcctgggaaatacagcaaaaccctgtctctacaaaaaatacaaaaattagcaggttgtggtggtgcatgcctgtactcccaactactcggaggctgaggtgggagaatcacctgagcccagggaggttgaggctgcagtgagccatgatcatgccattgcagtccagcatgggtgacagggagagaccctgtctcagagaagagaaggagaggagagaggagaggagaggctttcatcccttagccagtatttggaaaataaacatgcatttttaatgattcctctctttaactgtattttttaaaaaatgagttataccattattagttctgattccatcaaggagagaacttctactttgtttcttaagttgttatgtatgggttactgtgtatcaattgaaatgaatatcaccaggccttattgttggtcattataaattgtgccctggtgaacttctttccagagacatcttctctagtatattttttgtttttttgagttcttttttttttgagacagagtcttactttgttgcttatgctggagtgcaatggtacaatcttggatcactgtagcctctaccttcccagttcaggcgattctcctgcctcagccccccgggtagctgggactacaggcatgcaccaccactcccggctaatttttgtatttttagtagaaacggggtttcaccatgttgaccaggttggtctcgagctcctgacctcaggtaatccacccgtctcagcgtcccaaagtgctgggattacagatatgagccactgcacccaggcccctcactgattttaaataatgtgaagtttggaatgtctcagggagttcaatgtaatggaatttgtcctgatgttatttctttttccaaatcacatagcacttcaaacttttctttttataacatttctcataaatagtcctcctccataattacctttgtgtttattttgtgtctgctactaaactcttagcttgttgaggacaggagtccttccttggacctctgtacatcctaacatacaatgggtgctcaatttatgttcatggaatgagagaatgaatcaatgtcactgtcttctattattgcatagacatcttcagtaacacttcctttgaattcattgtcagtggagctagtcttgtagccttttcaatagcttacattccgtgttggagcaaaaaatgttaaatgtttataaggtaatttcaaatataagcaaaagtagagagaatggtataaagaaacctccattatctataatcaagcttcaacaattaccagcattttagagcaaattttgatttaggataagggtagagagaatatgatgacatcaggatgctgattttgattttgtggggagagaagcaggccatgtgtggtgagcagggtagagaaagaggaggctggtggcccaaatacaaacctgcctcataggagttgtcttgaggatcacttgagttgacataggaaagtgggaagaacaatgcctcacacatggtgagtacagcctaagtgctcccaccaccattactatcactcctgcgtagtttgtgggagctgaatgtgggagctgtggcacttactaacttggtgactttggacaccgacctttctgagctgcagtttcttcgtcggaaaaaatgggaatagtaataacatcttaaacatagcattggcggggcgcggttgctcattcctgtaatcccagcagtttgggaggccaaggtgggcggatcatttcaattcaggaatttgagaccagcctaaccaacatggtgttggttttaatggagaaccctgttctccattaaaaataggctgggcatggtggctcatgacttgtaattccagcactttgagaggctgaggcaggcggatcactggagatcaggagttcgagatcagcctggccaacatggtgaaacctcgtctctactaaaaatacaaaaaattagccgggtgtggtgttgtgcacctgtaatcccagctactcaggatgctggggcaggagaattacttgaacttgggaggtggaggttgcagtgagccgagatcgcacaactgcactccagcctggatgatagagcaagactgtctagaaaaacaaaaaaacccaaaaaaggtagcatcttatcccacacaggcagtggaataatatatgtaaatatgttctgggttaattaacattaatcacaattttccagagtggttttctagtctggagggagggaccatgtttctggaggttttttcgggagtcaagccaattccttctgtgtattctcattctgagacttcataatattcgtggcagagtcatttgtcagcctagcaaataaacattacaggacaataggctttgtttccgtttgcaaaatgttttttaaataatgaaaacaattttactttatgtagcttgtccatatatgcactgaaaatgaaatacttatcaaccaagttgataaagggataaaaatagttttcctaaggaaaactatttgctggggatttgtgttggacaagttttgtagcagtctgtttccccgtctttgaaatataaacagcatctttatttgtctagattttgcttataacaatttgctcaactcctaattaaagatagctctgtcatccacacatcacttagctactttcctaaagccagaatttctttagaaaatcagttttcttttaagacttcaaaacactttgccttctccttagtactataaagaattctaattatgtaggacattcatccagccactcctcccaccacacacacacacacacacacacacacacacacacacacacacatatatctgtctgagataataattagatactgtgggaagagaaatgaaatatccctgatggttttaataattttctgcagtgtttgtttggacaagaaaatcagctgtcacatcccctgggtatgagagttatataaacccagatcagaaagtcaatgctgcagacttaaattctcaggaagttttaaaacttttaaaactaccacttgccttttggatttgactttttaaaagtttgatttttgctttttcagatactaaacttttggcattcttagtatttgtgatttatagcatcttgtacttttatagacttacttattcaaacaaactaaacccccactctatgcccagataacaaaaaaacacgtacaagatacagttttatctcaaaatgagcaatatcctgaagctatcatttggtcccagtgacatatgaactgttcgtttttttccccatatactgttctgtgtaaatgttctattacacagtctttttttctggattatttttctggagatttcgttatactttgttgatgtttcttttcaaaagctcccgcacaaatcatctccagtagtcatccagccagtgttgtactagaagatgtgttacttctaatttaaacttccatttaaggcttgacgctgtggctcacacctataatcgcagcactttgggaggccaaggcaggaggatcacttgagcccaggagttcaagaccagcctgggcaacaaagtaaaaccccatctctacgaaaaatggaaaaaaatagctgacatggtatcacatgcttgtagtctcagctacttgggaggctgaggtgcgaagatggcttgagcccgggaggtagaagctgcagtgagctgtgtttgccccactgcaccccagcctgggtaacagcatgagatcttttctcaaaagaaaacaaacttccatttgagaaagtgacagaaaagttttggatttttgtaattataggaattctttacttttctttgataatattatatctctttcagtgaaaagggagttaggaagagatctaaatgtactctttgatcttccttgttaatcatttaaaaatggaattcggagctaattttaacttctgaaggacctgggggaattttatctagcacctgaggtataccttagttttttatgtattgaatctttaggaccagttttattctttcatttaaatatgtagtgagcatctagtatgtgcttaccattgtgctgtgtgtttatatatattatctcatttaattctcacacaagcgttgttagatacataaaaggggacttcaaaaaattcatggaaaaaattgaattaaaagataaaaatgaaaaatataaactttatttctcaatataaactccatcaagttcaaggcaatattgtagtgatgataccggccatttagcccgtccctaaagaactgagggttctggaaatttagccatattaatgcagtcttttttacattattaactgaaaaaaaaaatggattccctttaaagatttcttaagattaggaaacaaaaagaagtcagaaagagccaaatcaggactgtaaggtggatgcataatgatttctgtgcacagtgatttcccattgaaatctcgcaaaaattgcccttgtttgataaaaggaatgagcaggaggagtgttgtcatggtggagaaggactctggtgaagctttcccaggcgtttttgtgctaaagctttggccactgtgcccagccacaactttcattttgttaagtcatctaatccttacaactgctccatgaaataggtactattattatccttatgttacagatggagaaactgaggcagagagcgggacagtaacctgcctaaggtcccagagctctagagtcagtggtcttaacctctattatgacctctcacttaatgagggccagatttcccctctagctttttattatgaaaaatttcaaatgtggaaaaaaattaacaagagtacaatgagcacctgtatcaaaaacctagcccaaacaattgttaacattttgctgcatatagtttatctgcatgtgtgtatttcaattttttgctgaactatttgaaaatatattatggacattataattcactccttaaatacaaaacaaagcaacattttcctgttttttttttgagacggagtcttgctctgtcgcccaggctggagtgcagtgatgctcactgcaagcttcgcctcccgggttcacaccactctcctgcctcagcctccccagcagctgggactacaggcacacgccgccacgcctggctaatttttttgtatttttagtagagacggggtttcaccgtgttagccaggatagtcttgatctcctgaccttgtgatctgcccacctcggcctcccaaagtgctgggattacaggcgtgagccaccgcgcccggcccaacattttccttttacttggtaaatgcattcttggaaaatacattgcctctaaaatcatgcaaaagtactttgctacagacaaaaaggagtggagttctaggttcagataactgtaaagagctttacatgagtatcttgatatttaaaaatcaagcagagtaaagggacaatttttgtttctataagacagcccctcaatttgctggatgtttaacatcttggtctctacctactaaatgcccatttgaatgaggagacaattgactgttgtgtcaaccaaaaaatgcctcccatcccctccgtttccagaaagtcctctagccagctgtgcctgttgagtgtcattgacttgactggtcttctgctgaaggagctataggttaaattaaaataaaatgtgctgtcacagaatccttatcatcatgattcagagttgaggtaataaaggtggtagaacttatctgtaattctcctttagttctacaaccacatatgctctagatttgtaaacaaatattcatttattctgttgtattctaccaccaccactttgttccacaaaaggttatacagcagatttttatttatttaaccattaagagtgtctccccgtgtattggaatcggctaggaaatattcgtaattgctacacttttctatataaaaagggacttgaagcagactcagggccaacacaatgtagaatctgtttcttctagctttatttctccctgtgctgctagaggtaccaaagggtttgtctcaactgttactacccctgacatattccattgatctctttacttttctctgttgtctgtcagtctgtttgtcagacttatctcaaatgccacgttgtttgcgcgtatttctcaaagccatccatcaggatacaatctaaatcatcacagcacattctgtcttgtgacactaagcacagactgcctgtgttacatttgattgtgtgtttcccttttcttccacatatgtttcagtagtaatttcctgggcaacttatgtgtggcgggccttgtttgggatcttggaaatagagagatgaagctctcctacatagtctcatttacttccaattttgctttcttgataattggagtagccttttctagcttgtatcccctgcagtacctgatgcattgccttgctcagggtaattcatatatatttctgaattcagtttggaatgaaaggagacaagcaggcacttttgaatcaaatctggtgctgccactatgcaactgtatataaatctaacccaacccctgtgcgccaggttccttatctgtaaaacatggataataacaaccatcttacaggattgttgtaaagtttaaagatgaattgtatgaagcctagcagagttattggcacgtagtaggtgctcatgaagtagttgttattgtaagggaggttcagtcattcctttaggtcacttgagtgggcagtggaagcatttaggatcttaattgtctttagggaaatgcttacttagtctgggggcttctccgagaagcaggctctggggaaggtctggctcattgctgattaactgttccctttttagagtcaatgatctgagtctgtgttttggaaccacttatataatgtataccacctgttatttgtgtatttttagaagtgggagtcgggtaatcctagtcctgtcagtaaaagagcaaactgtttaccagaagcagagcttttttcttaacactgactcacactgactcatctttctcatttttcttcccaccgcctcataacaaccttgcaagagagagaatttttagggaatcagttgacttacttttttgtgattttccaaagttgaaagcttgaaggtatcaggtcattaattccatcccaggaaaggctaaagtttatgctgcctcggagtgccagtatgaccaacgccatgtagtgaatatctcacataaacccttgtctagacaaaccacttctgttggctgagaggttagacaagtgcctgaagtgtacatgttaagagtaaacacattttgctctttgaaaatggttgccttaagttgaacctggaaagtttgctcttctgagataggaaacccaagcagtattagagtcagagctgtggtagcttcacagatggatttcagataacagagaggccagacagcacattagatcagcaaaatggtgaaggaagctttatagatcagaatgactgatatctttgtgccttcatttaacattcattaaatgaacatttactgatcatctgtgatatacttggtgctagggttatgacagtgactaataaaaacatagtgcctgctgtcatggaccttatactctaatgctcgtttatagtaaatgctaagggaacagagagatgccttggcctgcatatgtgaacatgttcctgtgcacacgggtgaggggaggaaggaaggctccttggaggaaaaggcacccaagctgagtctggtggggtgagtaggcattaactaggagaaaagggttagttaggggaatgtggggttggctgaagagtattacatgctgaaatgagctatgagtcttggggtcgagagaagagcttgcccttggagaagctgaaaaaagtgaccaaaggacagtgagagggaagtttggcacaaaataaattcagagaagctaacagtgacagcagagcattgtagaccagtttattaatttaaaaaaaaatttttttttttttgagacagaatcttgctctgtcgcccaggctggagtgctgtgatatgatctcaatctcagttcactgcaacctctgcctcgcaggctcaagcaattctcgtgcctcagccttcccagtacctgggattacaggcacacaccaccacgcctggctaattttttttttgtatttttagtagagacagggtttcaccatgttggtcaggctggtctcgaactccggcctcaagtgattcacccacctcagcctcccaaagtgctaggattataagtgtgagccactgtgcaaggcctaaaaaattttttaatccagataaatttaacatatagtgaaatgctcatgacaaatgcatatacctatgtaaccaacaccccattttgagtaggaacttttaacttggtagtcagagcaaggggaaggatgggtttttgagcagggtccagacttgatgctaattgctagctaagaactgggacaagggtgagggggtgagggggtggcaagtaccagtggggacagagctggaataggcagtagtttgctggtgggcaggagcttccagcttgggggcaaaaaacagattcttggttttcctaacttgtttttagcagaggacaaacctctaagtgctttgtaagatccaaagtgtctatgcagaagacaacagactgtgttttttcaaagattttctgggaagacttccaggctacctgcagtttgaagaaagtcttctgaaaagggcagggggcgtgggggcacctacagagacaggatttcccccaactcgataagatacaggaaaataatcatcttattgatttacttttgttctatagtaatgtgacattttttcttttctgagagtagggtattaaaaattgttacggttttgggttttacagatttgttgaagcttaatatcatttaagtgtcctattttaatatctgttttaatatctgtatttttgacagactgccagaaatcatttaacatgttactgtgctatttttgttgatgttgtcattattatttttgttgatgttattcttaaagaaaaaagaaaagatactatcgatagaattatcgtcagtattagaaattaagaaatgttttaatttcaattgaaaacaaacaagtaaacaaacatgaaaatgtattgagagatgtgtgtattctctacctttgttttattccttttacaaaaactataaggaatagtgcttaacagtgtactgtcaaaacactgacatctatttacaggaagttcatttctgaccagaattgtttgtttgtctctccaaagcttgccaaattctataggttttatgtaagtttataaatattcttgtaaacattggctttaaactaaatccttctaaatatccaaactaccatgtatctttctgtgtctaaattcagagataccatcctgttggctttagataagttacagagtagtttaggcccacatgatttaagctcacccacagttctttgttgatacttgaggatttcatctgaaaagcatcctgttcatactctgaaaatatttctttcatcttagtactcccactcattttgtgtgtgtatatgtgtatagattattttattgttccacatatatgtatatttattttttgtccacttgctagggaacctcattttttttaacaagaaaatacttgtgtgataaggtcataaaacccaagagttgggaggaatattagagacctactttatttattttattttattttatttttttgagacggagtctcgctgtgtcacccaggctggaatagtgcaatggcgtgatctctgctcacggcaacttctgcctcccaggttcaggcgattctcctgcctcagcctcccaagtagctgggactacaggtgcgtgccaccatgcctggctaatttttgtatttttagtagaggcagggtttcaccctgttagccaggatggtctcgatctcctgaactcatgattcacccgccttggcctcccaaagtgctgggattacaggcatgagccaccacacccagcctagagacctaatttaaagtttattgctgctttattactctgaacaactacatcatttattacctaaaataatctttttattttctgttctcatttagctgaatctctgagcttaaaaaaagtgtgtttggcttatatatcacattatcccacatatgttacaaccaaaacttaattattagccataatagtgtcttttggctaatattagtagtaagatttttgtttgtttgtttgttttttgagatggagtctggttctgtcacccaggctggaatgcagtggcgcgatctcggctcactgcaacctctgcctcctgggttcaagtgattctcctgtctcagccttctgagtagctgggattacaagcgtgtgccaccatgcctggctaatttttgtatttttagtagagacggggtttcaccatgttggccacgctggtcttgaactcctgacctcaggtgatctgccccccttgtcctctcaaagtgctgggattacaggcatgagccaccgcgcctggccaatagtagtaagttaatgaagatctgtactaaatttggattccaagtgaaacatttctttttttcttttttatttatggcagagtagagggttgatagatatttgttggctttattagttttctcaaattggtatgtaaaaataatactagatatataggtttaagtctccttcataagattttctttcttctaaacctttggaatatgccatgcttttcaaaaagccccactcattatttttatgatagtggaataaaagtctccaatttgtcaagctcattattcaagccttccaggattgtttgcagttttaaaataaactgctgggggttttatgcatcttgcaatatgagtacttaattaaaattaaaaagggggccatgcatctatctattctattaaggtcgtatataaataaatgattttattgggattttcagtgtatttagagtaatctatacttaatgagagggacttgtacttttcatttctttgtactatttttcagcctttcctgaacagtaaatgttttaaaaaaaactatacccttattccttggtctctaagaactgtggtgggctgggcgcggtggctcacccctgtaatcccagcacttcgggaggcaaaggaaggtgggtcacttgacaaggtcaggagttggagaccagcctggccaacgtggtggaacctcgtctccactaaaaagacaaaaattagctggtgtggtggcgagcgcctgtagtcccagctactcgggaggttgctgcaggggaattgcgtgaacctgggaggcagaggttgctgtgagccgagatcgcaccactgcactccagctgggtgacaggtgacaggtgacaaaaaaaaaaaaaaaaaaggccaggtgcggtggcttacgcctgtaatcccaacactttgggaggctgaggtgggtggatcacaaggtcaggagatagagaccatcctggctaacacaatgaaacactgtctctactaaaaaaaaaaaaaaaaaattagccagccgtggtggcgggcacctgtagtcccagctgctcaggaggctgaggcaggagaatggcgtgaacctggcaggtggagcttgcagtgagtgaagatcacgccactgcactccagcctgggtggcagagcaagactccatctcaaaaaataaaaaataataaaaaaaaaagctgtggtggagtatatggtacaaacatgagacttggtgctcttttggattcctaaggcttttccatgtctgagaactcaggaggcagcctttgcatagcagagggactaggaacctcactatttctccaaagttgactagctttctataagataacccccataaaatcactagtcattagtaataaaactttgtctttaaatgactataatatttttaaaaaggacaatgaatatgtactctatgccatccctttccatactgtaaatgtgtttctgaaaggtatgctatttagatatacttgagtcctattctaatatacggagaggttgctttttaaattgtcctcatcattgtggtagtaatagtaatattagtagtactggtagttaacatttatggaacacttcatatattttacatacatagcttcctttaacccttataataatcctatgagttaggcattttattctctccattttgtgggtgggagaactgagacttgatatgtggactatatgattgatcgattggttgattttggtaaagttcagatatcttttgtcctgtgcttgacactctaaaatagtaagtatttgggtaacaaataattgtaagagagagaaaatcatcttatcttttggactattcccttctattccattcctactgccaacactccagtccaacctcacatttctttttctttctttttttcttttttctttctttctttctttctttctttctttctttctttctttctcattctttctttttcattctttctttttttctttctccttccttccttcctctctctctttctttctttctctttttctctctcttctctttctttcttcccttctttcccttccttcccttccttcctttcttttcattttctttctttctttcttacagggtcttgctctgttgcccaggctggagtgcagtggcatgatgacagctcactgcagcctccacctccacagctcaagtgatgctcctgcctcagtctcccaagtagctgggactataaatgcgtgccactgtgcccagctaataaagctccttctgctgaagttatgcctaaacccttctttgcacatgtcattccttatcacttatcacctaaagaatgacagggggctttggctttgaatggccctcagtatgtataagcacctaaagatttcagtttatctcagcttcagagcagtccatctcatctgcctgtttttcttcttaaaataaacttttaaaaaataattaaagtttttaaaaggtgcagaatatttaagtaagatttcttctcccctttcccctaaatctccattctcatttcgtagaagtaaaccattcttaacaatttcctggataattcttccagaaattatgcatgtccaaacataaatataaaatctattggttgcttaaaaaatctataaatgagatcatattatacaaactattctactgctattgttcacatagatacattttattcttttaaatgacttcatggttgtatcacttacaaaccttttggctttgagtaacagaagcagggaatgtacagaaggggtgtcagacaaggcttccaaattatcagaaccaaggcaggccagggaatcatcatcctgttttagctgaagcagccaggccagtatgttgccatcactgcccttggacactgtcaggaataaattccaactgttcctttgtcatagtgtcattttttaaggttcagagtcccagtgagactatgcacaatggggaagtacccccaaatagaaagaagtgactggatgttggaaaacttaaaaaatgatacatttccattacattggtattctattgtataaacatgccataatttatgtattaataactagccacttcttggtgaatattcagattgtcatattcaattttttactagcaaaaaccactgctgcaaagaaaattatttatgtctttgtgcatttttgtaagtatatctgtgagattaatttcaagaagactgtgctggatcagagagtatgtatatttaacattttgatgtagcgccgggcatggtggctcatgcctgtaattccaaaactgagaggctgaggtgggcggatcacttgagctcatgagttccagaccagcctgggcaacatttttttcatgggcaaaacccggagaagaaaatatgaaaaaaatacaaaaaaaaaaagaaagaaggaaagaaaaaagaaaattagctgggcatggtgttgcacacctgtagttccagctactcaggaggctgaggtgggaggatggtttgagctggggaggcggaggttgcagtgaccagagattgtgccactgcacaggagcctaggtgatagagccagaccttgtctctaaataaataaataaataaataaataaataaataccattgtgatgtatattgtaattcatgcttagaagctttcactggtttacactcccatctacaaagtgaactggcttttaacttacaagatacaaagttatttatggccatatattcagcaaaagccacaaagtgtcacaccaggtgaaaagggaagtccaagtttctgaggtatagagtttcagtatttatcaggtaagcatagctaccaaagccatttttgttctggaagcatttgctgatcccgagaaagcattttttaggttaagctgtatttttggtgtcttcatatatgaggacagaattcttagcttgttgtccgtcaaggatggggaatcagataaaccacttttttagtttgaatggaacccctaagggcataagagggaacttgaactaagccaaccctcacaatagccttgccaccaagcttctaggtgtagggaatgtagaccaagatctttcatcattatggttctcaagtaataatgccatcaggcagctggcagaagcaaatgcaaattttctctcgaggaagatgttatcatcccggacatcaaaatagtcctctaaataattttttatgtaatcactagcacatgggattaaaaccaggttcacaaagaaataagataccatgaaaagaattagcaaaagccatatacaacaaaagtatcaaagccatgagatactggaatttcagatgcagaatgtaaaacactgtatttactatgcaaaaagaaatagaagccaagataaaaacgtcacaatgggccgggtgtgatggctcacgcctgtaatcccagccctttgggaggcctaggcaggtggatcaccaggtcaggaattcaagaccagcctgaccaacatagtgaaaccccatctctactaaaaatacaaaaaattagctggatgtggtggcgggcgcctgtgatctcagctacttgagaggctgaggcaggagaatcgcttgaacccgggaggcagaagttgcagtgagccgagatcgcaccagtgtattccagcctgggtgacagtgcgagactccgtctcaaaaaaaaaaagtcagtaagtagacactgtcaaaagtgacagcagatttgaaaaaatccaaatagacattctagaaccaaaacatataataatcaaaaacaagaatgcagtggatgtatttaaagtagattacctagcaagagagaactagtgaactagaagatagaagaaaattctccagaataaaccttcaagagatttaaaaaatgtaaaatatagaaaagatgattagagaattaaaacgatccagtgacaagttctaatatgcatttaaaaaaatttttttttcaagttttttcttgctgcagtgtccaggctgaagtgcagtggctattcccaggtgagatcatggcacactgtggcctcaaacttctggcctcaagtgatcctcccacctcaggtaaataggtgggactgcgcccagctttaatatacatttaattagaattacaaaatgagtggagcaagaatggtgcagaagcaatatttgaagagataattgatgatcattttctagaactgcagaaagatgaatttgcagattcaaaagtgtatagccttaaagaaaagctaaaagctaaaaactgagcaagcatccatcttgtaagtcagatcacattttgtaagtcagagaaaacacagcaaaataattctgaagaagataaagagaagctaggcatggtggtgcatgcctgtagtccaagctgcttggaaggctgcaatgggaagattgcttgagttggaggccagcctgggcagcatagtgagaccccacctaccctgtctctaaaagaaagaaaataaagggaaagaaagaatgaaaagagtagaagttatgaagtataaagcaaatgtatagcagggaaaatcaatgaagccaaagtatgattcttagaaaagattaataaaaatgataatactctgattaggttgatcaagaaaaggaagacagaaataaagaaaggagcacaaataaccaaaatcaagaatgaaaaagagggggctgggcccagcctttaatcccagtactttgggggaccgaggcgggcaaatcacttgagctccggagtttgagaccagcctgggcaacatggccaaacgccatctctacaaaaattagccaggtgtggtggtgtgtgcctgtagtcccagccactcaggatgctgaggtgggaggatggcttgagtcttggagggggaggctgcagtgagcctagatcgtgccactgcactccagcctaggggacacagtgagaccctgtctcaaaaaaaaaaaaaaaaaaagagtgcttaaaaaaaaagagtgaaaaagggagatagtatactcattaacaaaataatgatactatgaatactatgaataattttaaaccaaaattttgaaaatttagatgaatggataaatttattagtaatataactattaataaaaatggagtcatctgggcatggtggctcacgcctgtaatcccaccactttgggaggccaaggcaggaggatcacctaaggtcagaagttcgagaccagtctggccaacatggcgaaaccccatctctactaaaaatacaaaaattagctgggcgtggtggcctgtgccagctgcttgggagactgaagcaggagaatcgcttgaacccaggaggcggaggttgcagtgagtggagatcgtgccattgcactccagtctggttgaaagaatgagactccatttaaaaaaaaacagaaaccaaatggaatcagcagttaaactcttcccttaaagaagactactagcccatcactaggagtctaccaagcacttaagagaaagaattaatattacacaaatgcttcctgagaatagaaagagattagcaaaacaaaaaacctgacagtgacattatgagaaaggaaaaatcataagcccttttactcaggaaaatttctacattttactatgaaaaattcccaactatatattagcagagcacaatccaatattttacttattattgtagtataacaaactaccaaagttttgtggcttagaacaactgattttttttttttccagagattctgtgggtcggaagtttggactgggcacaacaaggatggtttgtttctgtttttgtctaggttcccagctgggaagactcataggagggcttggaatcaagcccttggcttgttgatctttgtcgtgtcaatttcttgtttttcttttttctgagacaggatcttgctctcttgcccaggctagagtacagtggcataatcatagctcattgtagcctcagcctcctgggctcaagcgatcctcctaccgcagcctcctgagtggctgtgactacaggcacatgccaccacaccttgctaatttttgtatttttttgtagagatgaggtcttactgtgttgcccagactggtctaaaactcctggactcacgtgatccttccacctcagcctcccaaagtgctgggattacaggcatgagccactgcacctggctgtctgtcttaccagtttctaaaatctctttatgggttaaggaaataagctatttatattgataggaaatataatttcctctagcctgacatttgatttttattttgctgatcatgctttttgccatgcagaatatttttatacatagtcaaatttattaatatttcctttaatgacttctggattttatatcatagtacttggaaataccttctccattgtgaggtcataaaatatgccatgtgtttttccagtgcttttatggtttcatatttttacatttggatttgtggatcctccaggagctatttttggggtgaggtaaaagactacttattaacctcgcttttctcagtcagatggagagattaattttgactgtggagaagggggctctggtaaagtatcttgatcatctcttagggtatgggattgtgaggaattactctcttttcacccaaaggaattggaatgagcatctgaagtcaaaactgcctctcctctacagcaggtgggaaaaattgttttaaactgaatcctttttcactgttccttctcatttcctaagactttctgctaccgtggtatcactggcctcatgacatgttatgattttgatctcgtttttgtactattttagtgttttttttttctgatgtcatgaaaggacacagcttcattttatgtataagctctctctaaattgtgatatagtgttgagttactgtgaattctagccgttgttattattattttttttagagatggggtcttgctgtgttttccacagcgagaatcagagctcctgggctcaagcctcctgcctcagcctcttgagtatctgggactacaggtgttcccggctttagccattatttctaggatcagttttggagggctctcctttcttgttttgttgtttgatcccaagtccatctcaggcagtggtctttctgtaactttctataacactccattcatttattatattataagataggctgtgaatataggagaaaacagaccttcatgatcatgatttcacattcctatcattgttccagacatgtataaacctctcagacctttgaggcttagtctaagataagtcctttgaacaaccagtaaaaatcattaataaaaataaagaaaatcagcaattctttttcttcattaggacgtgttgaccttgatacgaatactactatgctacttgttcttggatgaatgataccaactttgacctgggcgcttatgaaaatattttaaagcatcacttaaaaattacctttctcaccattctaactaaagcaataggttttgtgtgttagtgggtttttttctaatgtctacttatgttcatttattaagcgccttctgtttgtcaggccttctgctagtgctgggactatagagttgaataaaatataaaattttccatctactaagggagatagaatataacaagtagttataatgtacagtgctgtgaactataatagaagtgttattgggggcatgtattggtcaggattcttagtagcaaacaacaaaattcactgtagttggcataagcagaaaggtagttttaacatctgtgcttggatgttacacagatgaaagtgaagcaatcacagacaatatttccatgagaaatggtcaaccccactaagggggactcttctagagaaaacaccactgctgcctttaccagcactggtgacatcagatactggacatcagaaactgtcccataacagtcctagaacatgggcttataattttctttacgttttctagtgcagttagatgcagttagcccattcataatctttatatccttcatgcccttcattggtctatagcaactactactgggtttgaaatagccctgactttaatatggactttacctcaggcaatcataggtgattattttattatttatttagagacagagtattgctctgtcgcccaggctggagtgcagtggcacgatctcggctcactacaacctccgcctcccgggttcaagcaattctccctcctcagcctctcgcgtagctgggattataggcacccgccttcatgctcggctaatttttgtatttttgtagagatggggtttcaccatgttggctaggctggtctcgaactcctgacctcaggtgatctgcccaccttggcctcccaaagcactgggattacaggcgtgagccaccacacccagccaataggtgattattttaaaactcttacaacattgcatgccactaactacccgcatctcattctctaagacagagattgggaaactatggcctgcaggcaaaatccagcctgccacttgtttttgtaaataattagttttattggaatacagctatgttcattttgtttacacattgtgtgtggctgcttttgcactatagtggcagagttgagtagttaccacagagaccacaaagcctgaagtacttactgtctatccacttacagaaaaagcagaaaaagtttactagccgctgttgtaatgcttattaaattctctctgccttttaagtccagcaggtgaggtaaatcagtttctttcaaactttttgactttgaaaataagatgcacaatttatattatgactcatgcatgcatatcatatattatatgtaaatgaaacattttcttcttttcattctattctataccgtttcatgttttgaaaagtatgctagtcccagctgggcatggtggctcatgcctgtaattccagcactttgggaggccgaggcaggcagatcacttaaggccaggggttcgagaccagcctggccaacatggcgaaatcccgtctctactaaaaatacaaaaattagctggatgtggtggtgcacacttgtaatcccagctactcgggaggctttggcaggagaattgcttgaacccagaaggtagaggttacagtgagccaagattgtactactgtacttcagcctgggtgacagaccaagactgtctctaaataaataaataaaaataaaaatatgctagtcccagtctactaaattgatttcatgttccacaaatcagttgtaacccataggtacatgaataggcatgttccattcatgaattatccaagatctgtttcatttccttaggagttttgtctgcattcccttctggtttccattactcaatctgtcaggattctcaggtgctactaacaataagtgtctgctccagctggtttaagcagaaaagcatttcttaaaaaaaagtagggatcttacagaatcttatagagggccagataacagatcctagtgctacctagatggcagttaagcagcaaatgaaatgcaggctggggaaagccatctaactacaccatgagacttccctagagaaaaccctattcctgccattgcgcagcacctgtgaccctagggtctggctaccagatatcctgcaaggtcagccccgtaagaactcagtctctgtgattgtctcaccaaagctccttgaaggagggctctcctggctcaggagctcagaggctgctcagggcatttctaccttttggaatcctgcttcattttcatctcgctgttctaaaactcctaatttttcttctcctattttattttccttttcttcagctatctactttgctcctttccttctccttttcctttatcctcatactcatcttggccattcctatcatcaggtggcgtaactcaaggctgaggtccctgaacagagcttagagctcatttcttcccactttcagtgtaccttcaacggcttttctagctactcctcattgaggttgtccagcttgtgtttcttgtgcaccttccagtgccgggcacaggctgggcagcacaccttctgggccaggcccaggattaagaacaggagcagggccctagagactgagactgttcccggctgacagagtgtggcttatgtctctcttcaccatttttaatggccagacaatgtgtttgatattttgattatttctattatttcactattataaataactctgcctgtaatcccagcactttgggaggctgaggctggcagatcgcctgagcccaggtgtttgagatcagcctgggcaacatggtgaacccccgtctcacaaaaaaaatacaaaatgagctaggcatggtggcgcatgcctgtagtcccagctattcaggaagctgaagtgggaggatcacctgagtctgggaggtcgaggctgcaccatgatcatgccactgcactcgagcctgggtgacagaatgagaccctgtctgaaaataaataaataaataactctgatataaatgtctctctcatttataagtcagtgtatgcacattttgtagcacttggtatgtattttccaaaggaacttaaaaataacttttcgtattttttctttttgtagaagtaatgctatattttagtgtaaaatactattttatagaaaaaatttaaaataccaataagaaaataaaaattacccacagtgtcatcatcctgatatgctactgattaatagtttcttccatttttttctactttccgttttacagacatgagccccttctacatataggggctcaccttaacattaaagtgagacttttttttttttgagacaaagtcttactctgtcgcctgggctggggtacagtggcacaacctctgccgcctggtttcaagtgattctcctgcctcagcctcacgagtagctgagattacaggcacctgccaccgcgcctggctaatttttgtaattttagtagagacggcgtttcaccatcttggccaggctggtcttgaactcctgaccttgtgatccacctgcctcagcctcccaaattgctgggattacagtcgtgagccactgcacctggctcttatgtgactattttttttaatgtcatcagatattcttcgatagtatcatttattgtgactgtgtaatattccattctgtagatttaccaaagtttatttaaccactgcctaatagtggactttaaggattttcagttttacagttttctgaacagtgctgaagtgaacaactttaagtcaagtctttgcacacacatctatagtggtttctcttggatagattcttagatgtaagatgagtgggtcagagagcatttacattttttaattaagaaactttattttttagaccagttgtaggttcccagtgaaactgcacagcaagtacagagaggtcccatgtcccccctacatttttaaggatttcagcacatatcgtcaaattgccctttaggaatgttgtaccgttttccattttcacctacattttctcatatctctgcaacactgagaaatatcatttaaaagaaatctttgataaggcacatgtctagtagaatacctattccagtcaagctaagactaaattttctctctcctgaaatttatatttacattattcagtccattattatttattgtggttagtgatcacacagttccaccaaccttccttctttggccaatttaacaaaaattataaaactaatacatagacacaaaaataaacattcagaacagaaagatatagcgatgaaagtaaaaaaaatccccacttgctttagccaggccttctgaaagcggtttgttttttactttaatgcttttttgtaattgtggtggttacttccaaaactgtaaataaaatatacataaacatgtaatttttattttttttgttattttattttgtcattttatttatttttttttgaggtggagttttactcttgttgcccaggctgcagtgcagtggcgcgatctcggctcactgcaacctcggcctcccgagttcaagagattctcctgcttcagcctcccaagtagctgggattacaggtgtgagccttgccatatcgcacactccccgtgtaatcctgctgtccagagatatacaatttggtgtattgtatatccttttagagatttaaatgtaggctgggctcagtggctcacgcctgtaatcccagcactgtgggaggccaaggcatgaggattacttgagaccagaagtttgagaccagcctggcgacacagtgagaccctgtctccacaggaaatgaaaaaaattagccaggaatggtggtgcatgcctgtagtcctagttattccagaggctgagttgtgggagaatcacttgagactaggagtttgaggttacagcgagctatgatgatatcactgcactcctgcctgagttacagtgcaagaccctgtctcgaatgaatcaataaatatatcagtaacaacaaaacatggactgtgagccaggtactatgcatagtctcattaaatcctcatagtgtctgagatgggggcccttgtttaccaaaacgtaaacttgaaccttatggctaactggtgacttgcctaaacatttccagtatttcctatgataagttgtatgcaataaataagatgtatctaattatgtgttcttgtgtgatcatctccatttaatacatttccacaactaggatggtttggtttaaaaagtgtgcacatttaaactatttaaacttttgtatcatcctgagggaggtagtttagagtgtggactttgtcgtcatacataccagtatttagattctgactgccacttactggccactcactaaaatgaaactgtacatcagtttacctatctctaaaatggaaggataacagaagcctcatatggctgtgaagattaaatgagatgctgctgcaatgtccctggctagtgtgcagcacctaggaagaatggtgtccaagacagaccaggcccctcatctcatagaactgatattttaatgtgggacaggaggaggcagcagtgaaaggcagtaaagaaatgaatgaacaacaaaaaaaagtggtgctgtatggacgcttaacagaaagtgacatgataggtagatgggtggttattttaggttgggtggcttgggaaagtttttctgaagaagtgacatctcagctaaggtctcagtgataaggatagttttataattcaaaaattcctagaaataaaaacatgggatcaaacattacatgcattaggccaggcaccgtggctcacgcctgtaattccagcactttgggaggccgaggcgagtggatcacttgaagccaggagttcgagaccagcctggccaacatggtgaaaccccgtctatactaaaaatacaaaaattaaccggatgtggtggtgcaggcctgtaatcccagctacttgggaggctgaggcaggagaattgcttaaacccaggaggcggaggttgcagtgagctgagatcgtgctctcactacagcctatgcgatagagagactcaaataataataataataataataataatgacaaaatgacctgaaaaaatttttaaataatttgcattctatgtatagacatgcctctttttctttaccattaccagaacttttttcctaatgtaaaaaaaaagtggggttgttcaaagattgtcttagggaccttctaatgagctttactggcagagggaaaagataagaaaatgtgtaagtcccttttaggaatctcttctatttcctctccctgtgttaattgtctaccatcatccattatactataaaccgttgtcttcactttactggcctttttctttacaccacatcctgcctacattgtaggactggaagctgccaacatgcatgttaactaacaagcactttttcgtctttagaattaggcagtgcctgggtcaggggagatgcaagattcagaacagcaatgcttttgctataaaaacaaggcagcttttagggtagactggtttttccaaacaaattcattgttaaggctgtaacacgttctgtgagttaaaactgtgcagaaggctctgcacatatgtttgttacagttgagcctttttcctgtatggcatgcaatgggggcaatgggcattggtgaacactgtacactaccattgcttccacaggtaataagacctcttgtttgtaacgtgtatatgattacatattgtggatctgttctgaaagcctttaatcatcgtagaaacgttctctttgtagggcttgagcaggcctcagcatctttacgacaatatacatgtttttgtttgtttgttttgagacggagtctcgctctgttgcccaggctggggtgcagtggcacaatctcagctcattacaacctctgcctcccgggttcaagcaattctcctgcctcagcctccccagtagccgggattacaggtgcccaccaccacacccggctaatttttttgtgtttttagtagacacagggtttcaccatgttggtcaggctggtctccaactcctgacctcaagtgatccacccacctcagactcccaaagtgctgggattacaggcgtgagccaccacgccaggtcaatatacgtgttaaattatagacatcactcagttactgttttgttcatgtatggggcaaatatatatttttatagaatatacatgtattataatttaatttctgattcaagccttaaagaaaatatgtagttcaaacttggaaataaatggattaaaagtcacttgctcttaaaatgtggtttctttttataatcttttaaaattcagcaacttaaataaaacatcctgagggcaacatgtgttagtgagggggactgggggtggcgtggggagggagtgtgtttgatgaaattgtccaggagcaaagcaccacttacttgaagcccagagatttgtcatccaaatatgtgcagattgctgggctataaatagtttgaactcaagtaaacagcctcttctccctaactgctgcttggccattgttcagatgccagcacagactgaggagcatctcacaccaagctcaaggctcttgtgcccaaattttgggctgcttctcttgtggggagagcttcagctaccctgacttgagatgaccaagggtcacatgttcaccctctttagttatcccacgtttggctcccacccctatgcaacctgatgtacagtttcataaacatgcctctgctctgatgagtagcgctgatctaagaagattcctggcaactattaaaaagccctggggccccatggctgttgactgaagtagatttaggaagcacagaagttcttttttcagggcagaggcacgcatggctcatttctttctttggaactaagtagagtggcactggttgtcagaactgctgcaggctgcctgtgccagcaactcatctgctctgtgccaggcaggcaggctgctgacatttcaagagtccctttgaggactccagcaacatgctgtcattagagcaactgaggacagtccatagtttattagtatatttcctttggaaaaaatgtctccccctctctctctctttaaaattcctgctttagctgcattgctgcattcatgtgcagtgactcttatgtcaaatgcctatgaggagattatgactaatttaacattttgttgttgagaggacataaggaatggtagaaggagtactagattaaggatcaggagcctggattcttgcgcaagttacgtaacttttcctagctttgatttcttcatttgtcaagtaaagatagtcatgtccctcctgtttcttggggttgatgagaaaatttatgtaaaggtactttctggactataccgaacaaatggaatgcaaaggagaagtagggtaatggaaggagcttggtgtttgagtctcacaggcctcgcccacactgtgacctcaagcaagtggctaatgtctctcagcctcaaccttttcatctgtaaaatgggaacatctatacttgccttgcaggagtgttagaaggattagaaataacatatgtaaagcactgacaaatggcaaacaatagttgaatagcaataattgttattattacacttaatgtggatatattcactctgggtgatttaggattctaaacctaaggaagtattcagtttatagatgtagagattagcaaaaggccctgctagtaactgatagtagcaactgataataatagctaactttaaaaaatccaagtaatacatgaatatgactttttaaaaagtctctgagtctagaaaggcatctgtctcctgcttacccctcaccctgaggcagccattttatttttctgcttttacttcttttggtggttacttctatttctctaaataatgttactcccatttccttttttaaatgaattttgtttttgtcagaaaggtacatgcacatagtttgccttagtctttttaaggtcaaatatcataaaagatttgtaataaaaaccatctgttccctgcccccaccctttctttacccttcctcctatcctgctcccaagggcatacacttttgatccttttaggcgtttgatctagcatttatctctctatatctaaataatatgcttatcgagatatggttttttttaactgtattacagaaattttgaaacatgtacaaaactagaaagaatagtataatgaatcctcatgtaccacccattacccggcttcaaaaatcaaaaacccatgaccagttttgtttcatctgtgctggtagccattttcccctgccactagattattttggagtaaattctagacatcattttatcagtaattacttcagcatgttttttttgtttttgtttttgtttttgtttttgtttttgcaatgtcgcctgtcacccaggctggagtgcagtggtacgatcttggctcactgctacctccacctccctggttcaagcagttctcctgtctcagcctcccaggcaggtgggactacaggcacacgccaccatgcccagctaatttttttatttttagtagagacagggtttcaccatattaggctggtctcgaactcctgacctcaggtgatctacctgccttggcctcccaaagtgttgagattacaggcgtgagctaccgtgcccagcctagcatgtacttttaagagaataaggactccttttaaaaatataaccacactatcacacataaaataattaataatcctttattattagcagtggtctccatttaactcataagttatttttttagttctagtcagatccaaacaaggacctcacattaccatactgctttttcttgactcatcagttttttgtttgtttttgagacagtctcgctctattgcccaggctggagtgcagtggcaccatctcagctcactgcaacctccacctcccaaggttcaagtagttctcctgcctcagcctcccaagtagctgggattacaggcatgcgccaccatgcctggctaatttttgtatttttatttttgagacggaggctggccgtcacccacgctggagtgcaatggcatgatctcggctcactgcaacttctgcatcctgggttcaaacgatgctcctgcctctgcctccggagtagctgagattacaggcacctgccaccacgcccagccaatttttgtatttttagtagagatggggttttgccatgttggccaggctggtctcaaactcctgtcatgcagctggttttgatcagacatcctgtcatgctttatttggccattcacaatcaataataaaagacttctttaaggggataggtctcagttcatctgtttgtcccataggcctctgccctgcctgggaagctgctgggtactggaagggtactaaggtactaagtggaagatgctttagggcacatgagcaggagcagcagttagactgagggcccttcacgtgttagcataaggaggccagtctcttactagaagccctcgatcaatcctaggcagttcattcaatttatttaaagaggcctcctgtctttggctgtggttctgcagagcttttgggccctctgtgtgctgcaggtatgggatagaggagctggctggcacaggaccttcagtggatcccttaattttttggcccttctgaatcttctcgacgcctgctgtcttcaggttcagagcctccctggggtcccacaccattccttgtctctcatttccaatggtgctttcttgtccttgtgctccaaacttcagcttctgttgtcatacctctctgaactttttctatcttccggaaattatttgaaatgaaatcccttgttctctaatgatccttccttcagcaaaaaggcccaatttgtagttcagaagacgtggtgctttttacaaaaagtatgttaatgttttaccatagactggactaagtagagtgtgtgtgtgtgtgtgtgtgtgtgtgtgtgtgtgtgtgtttagaaaatatttattgagtttcctattttatgccaggcactcttctaggcacttgggatagatgtattcagtgaaccaaggagacatactgttgactttgtggagcttacagtctggtggggaaacacatggaacgtgtacttataaatatgttaagggttataagaagagacataggagtaccatgagaccagtacagcagggggagctaacgtggctcagagaaaagggcgccctagggaagtgatatttaatctgaaatctgatggctgagtaggagttaaccaaaataagagggaagagcccttcaaatttgtatgtcaaagtgcagtagcaagtgagagtctgagaccaatagagagtagcaagtgagagcctcaaaccttctcctgttggagcaccaggctgtactacctcaggatagtcccttgccttctctggatctggcattcctcacccctaaaatgaggagaccacatgctcctttcagctgcaaaaatcaatgagtccaagactgtttaaagttaaggtcactgtttaagtgaaggtccatctctcccaaaacagctgtagttggaaacttatctcaagctggtgggaagtggtttgaaaaaaggcagggaggggacagtgtgatatcctgcgaacctatccagtttctagccacataatcactggggtcaggcttctcttctccttctggctctccttcagacacaccaaatcagcagtccaaaggggaccacaaagtggatcctcaggacatcgaaccctgaagaaaaagcagccacgtgtactccaaaaccaaaaaaatacgttgagcaatgtcttagtcatcttttgtgggtttgattccccatcccccaaaaatgacttaagtttctgatttcaaaacattgtgtgtatgtgtgtgtggttttttttttgagacagattatcattctgtcacccaggctggaatgctgtggcatgatctcatctcactgcaacctctgcctcccaggttcaagcaattctcctgcctcagcctcccgagtagctgggagcctcctgagtagctgggactacaggtgtgcaccaccacgcccagctaatttttttgtgttttttttagtagagacagggtttcaccatgttggccaggctggtctcgaactcctgacctcaagtgacctgctcgcctcagcctcccaaagtgctgggattacaagcgtcagccaccgtgcttgaccaagaacattgttttaagtgtaagtgtggttccttctctggggccttacaccaggattgtggtgagacgatgtattgttctcctttcttttttcctgttcttctgtattttcttatctttttacaataagcaattatgattataattggaagaaaacaaaatctacttttattcgtaaatctcaatcaatatacttctcaattaattgtctagaaaaagcatggaccttctaactgcatggcacagtgaataagtgagttggaaatggtatgacagctgaaacctgcctttgatgggtgatgagcgattgcactgtacagcagctgtgtggactagaaagtgggtagtggtggccagaatttctttattcatatactccttcaacagatatccgtcagttgctagctgatatagtttggatgtctaactatattggtggatagctgttggatgtcatgttgaaatgtgaaccccagtgttggaagtgggccctggtgggaggtgtgtgggttatgcgtacagatctctcatgaatggcgtgatcccctccctgctgtaatgagtgagttcttgttcggttagttcaagtgagaactggttattttttaattaaaaaaaattattttggccgggcatggtggctcatgcctgtaatcccagcactttgggaggccaaggtgggcggatcacgaggtcgggagatcgagaccatcctggttaacacggtgaaaccccatctctactaagcatacaaaaaaattagccgggcatggtggtgggcgcctgtagtcccagttactcgggaggctgaggcaggagaatggcgtgaacctgggaggcggagcttgcagtgagccgagattgcaccactgtactccagcctgagactccatctcaaaaaaaaaaaaaaaaaaaatgcaagggactacatgtgtgcaccaccatgcccagctaatttttgtatttttagtagagacggtgtttcaccatgttggccaggctgtcttgaactcctgacctcaggtgatctgcctgccttggcctcccaaagtgctgggattacaggcgtcagccactgtgcctggccctggttgtttaaaaagaacctggcacttctccctctcacacttgctctccatcttgccatgcaacattccggctctcctttccctctaccatgtctaaaagcttcctaaggcctcaccagaagcagatgctagtgccatgcttcttatacagtctgcagaactgtgagccaaataaacctcttttcatcataaattattcagcctcaggtattcctttatagcagtgcaaacggactaacactgcgtaacaaattaatcaatctgtgcctgtgattttctcatgtgtcaagcagggataataattatacctacctcatagagatccttatggggttaaatgaggtaatttatataaagcagttagaatacaaccaggcacggtggctcacacctgtaatcccaacactttgggaggccaaggcaggcagatcacttgagctcaggagttcaaaaccagcctgggcgtatggtgagacccccgtctctacaacataaataaataaaataaacagaatattacctggcatatggtaaatatacaataatagttttggggtttgtttatggatttccttattttaataagtatctcataatatgtacaaaatgctgctatattagacacagatcttttccttaaaaagttaggattctggcagagaaaaaagacctgcccccaactaaatatgtgtcatcagagaaaagggtatgtttcttaagagagaaacagagcatactaaggaaattcagaggaaggagagaccccttctaaactgggggtaaaaggtggaattaaacagccaaagtttccttcatcctcaaatggagctgatgctgctgtctgtgaaaaacagccaagtttcctgaagggaagccctttaagaggtggtagtgcaagggggttgtggattcaggactggcaccacatggtccctagttagagtgcaggctctgccccttgctcccgtgagcctttgagcaggttggtcggctcaccatgcatctgttgctacagctgtaagatgtgaatattaataatgtctcctgcacccgattattgtgaggatgacatgaagtggtgttcatagagtgctcagtgcacagcttggccccagcccacataagtgtgtccagtattgtcagttataagaagaaatgaatgtgccagtgttgctatggttctgtcttccgggattctgtcacagacgtagaattattccgttcacaagggaagtgatacagagtacatgttgttgaagaaaatgatgttgtttttatgaatgggctccttactattatttttgttcaagtaacaaaacatgattcaaagcacccatcttcaagagcccagcctcatttcctgacacctactcagtcttctggaataaaggctcagccaaacaatagccctgacctccagtccctccaaactgagtgttgctgctgagaacaggccttacagctctgggtgggcttttgttcattactcatcgtgacattctggagaaatacaggacccttttgacttcccgaccaatctctgactttctttcattgtcacatcaccattagggcaaaggatgatgaaatggtcagaattagacaagaagtattcaaatatttttcaatgtatagtatgtgccaggcacataacccacacaagaaccttggagagtaaggctgttattcttctcattttacactgggaaaccaaagcacagcaagaaggtctagggaccagaaggaagcccacatctctctgagctgtgaacggctgctctctgtgggttaccaggctggtgtttttttgttttgttttgttttttgttttttgttttttttttaaagacagagtctcactgtcgcccaagctggagtgcagtggtgcaatctcggctcactgcaacctccatctcctgggttcaagcaattcttctgtctcagcctcccaagtagctgggactacaggaacacgccaccacgcctgactaattttttttgtattttagtagagatggagtttcaccgtgttgcccaagctggtctcaaactcctgagctcaggcaatccacccacctcggcctcccaaagtgctaggattacaggtgtgagccaccgcgcccggccaggctggtgtggtttttattccacagcagtcctacgtcacattgtcacattgttgaaaagccttcagattgacaaactccctcctaatatagcctgttttcttggatgttttctgataagcatctgtgttttctgagaactaataaaaattcttgttaaaccacaaattaccacagcctcttccttacctatagagagccgctttcccagtaaagctccggtcctaccttcccatcaccatcaaagtggcattgaaacagatcagatctgctccttttgagggagttagttgaagcccagtcttgcttcaggccacacaggatttgggtagcaaagcaaggaaagcagcctctctgacctagtggcctgagtgtttcctttcccaggctggctgcggcaaccactttgagaaatggcattggcattggcatgtgtgtggcatgtgtgctgacctagttaggagttgaggcttcatttctaattctgtccctttcgttttgagctgtgtgaccttgggcatgtcacctaacttctctgtatatgtcttcttatccaggaaggagagattaataatgtagcctcatagcacttatctgattctcctaaggatgttatgagaatcaaatgagattatgtacaacgagagcaaacatttattcaatacttagtatgtaccaaatactttcagtttccttacatgtgttttttaattctcacaatcctaaaacagaggcactagtatcccacttgacagttaaaaaaactgaagttcagagaaattaagtcagacaggactcagatccacatctgtggctcccaaatgatgttcctaaccactatgcatgtcactcgctccccattgtacacgaaagtagagagatgttctttgtctttaccatcaagcactctccaaatgcaagaaatgatctctcgtaaccactgctgttccatgttggtccctaaggacacttatagcctgttacttgtttgtcttatcttgtagtttatgctgctgcttttcatgtccctaaggacttgttcagtgaattcttttggttttactcccagagaatctgttcatctccttcataaagggggttaaaggtgcccagctgagcctggcatcttgggcagtggcctctgacttctccagggttcttccttccctcaagcatgtagttgggtagcttgtagtaaaatgctctataatgcatttgtttataagttccccagtcactgatttttactcattgaatctcagaagtggaaagcaccaaagccagcattttgttgatagggaaactgaggtccagagagggatgtgacttgcttgaggtcattcattcagttgaaggcctgaccaagactggaacccagtttcccaggggacacaccagtgctgtttccaagccttccccgggggcacacatcacctcccctacatgaaggacaaactcatgtactgtgcccagcatgtacctaggagacctgggagaaatgaaacaacttggaaaattgggcaggaagaaagagatgggtgtggggtggggtgaagatctccaccctaactagtatattatataccaaagaaaggaattaaacacacaggaaagcagacaacccactaagaagcaaaggaatttacccaggaaccctggctcagtgagtggataggaagccttttgtcactaaagctgcagggttgaaaattgaaggaaggatattaggcaagcgtggtggcctgggatgcagttacagccccctggctcattgtccaaaggaaatggatctctcctgtggacagagaggtggaaactgagtgagtgagttgtgtggttgacatcatcaggctgagcattggattacaacaaatggggacttacttggcccgagacatgggaaacacccactaaaacctcaaagtgcttttcatttaggagacacggggaagagacagagaggagggtaaagtgagaatcctgcccgcaccacaggtctggactgctaaccttgaatcctggtttcttaaattctgcctccgcttctgactgaggaccactggattttgaggaaactttggtcttgtaagtagaactttactctcctcccctgcccaacacccccagggagaagcagagcttggaggcagagctctctggagagcttgctttccagcctgttggccacaaaatgtctatttttatataatgatatatgtgagcttgctctgaaaattatggccttgtctgaaactgcctaaggctagtcggagcctccagtctcacaaatgggctccattcagatgctgtttcatttttactcaaagaactttgacagagtattcagagctttaaaagcagctccttgctccaaatataggtgaagaaataaatcttccctaagaaattcgtgtttgtaaaaccctttctttttttctgattacaaaggtggtataataatttttaaacattctagaaagaaaagtctccgaaagtagtgaaaattccctattatcttccccctcaggaacatggttgttgtgttaaatttcagttacagatatggtcagactccatgaatttaccacatataaacccagtgctgcagcagctgtgtggaaaactccaagatggaaaggggttggaaatctttaaccttgggtttgcgatctttttattgcttccttttaaaaatttgctgtttatgcctggaatataaacaggacatgtaagcctttaggcattttatttgttggtatctgttttcagggtttgaaactaagcaagctactctgtagagagggaaagagggggcccttgctgtacccaggtcccttacttggtgggtccctgaactgaggaggattcctaggtggcttgagatggcttgcagtgtgctaacaggggaggtgtcccctcttagcaggttaagtatatttgaaaagttacagctaacgggaagatttcagcttcaacaaaaagctaccatatattagaagggtcacccaaggaaactgtcaccttgggcaagtgtttcacactctctgggtcttgtttctttatttgtacctaatgaggggacaaaactagatgatctctgtatttccaaattcagtatgaaatgaactgtccatatttcttttccctttgtattgggcccttatggctttaggagcaaaggaccctaggttttcagtttcccagagtagctaaaaacgggtgcctgtaggacagttaaaagaagacataaaacaggcaacattaagttacttctgagtttttatgggtctttttcagattaggtgttcttgaagaaagagaaagaaaaagtctcagtggtaactgtatgtgcacacgcatacactagcacatacacttggggagagaggaaagaaggaattggcattattgagtatctcttaagcactaggccctatgttatgctcaaccctttacagagcactagatggtcagtattattccctaaccccattgactgaggacaaccatctacttatatgttttcatattatcctgaactaaactgtatttacataattactggcataacttcaattccccatgtctccactagaccatctgcaccttctctgcgtgtctgtctagcccatcactatgccccactgcctagtagaaagcctggcacataggtacaaaggagacacaacttaatttaaacttaaagcccgccatcctagttcctcatttggcaagaaagagggagaagaagggggaaaatccctctatttgcccctctttcatcatttaacatagagccaccctctcctgccacaagggaaggatagccacagccagagtgcaaaaaaaaaaaaaaaaaagcaaaagacgtcagatcttgaattttgagtttccaaggtgccgggtcttgacaaattaaggtttttgctttgttttgttttgtttttgtttgtttgttttgttttctttaagggcatcagagaccctaatcctcaggaagttgtggtatttagaaactatttgtttgaattaaggtcctagttaataagagggttctcaaaggcccttggcacttctttttttttttttttgagacggagtctcactctgtctcccaggctggagtgcaatggtgcagtcttggctcactgcagcttccacctcccgtttttgttcaagggattctcctgcctcagcccctcgaatagctgggattacaggcgcctgccaccacgcccagctaatttttgtatttttagtagagatggggtctcttggcacttctaaagctgcagtcttccccagcatttcatcccatgaaggtggactgttgctgccatggacccacccatgggcatgggcagtgggaaggccagggcatcctctgcttcatcccagccccgctgggatcttgagatttggggtaatcaaaaaaggcatcctttttcctaaggtggtggtgaggaggtgatgttctggaaggaaggtacctagactttgtggtccctgccaggaagtggagagtggaaatgtggaatgcctcacactcctcaactaggtaggccttcatgtaccagatgagggtggctttcagttcttgttttgtgtgtcaaagttgctcctgttatcagtgtgtgtttgctgatctctcccacctcagtcactcccggcagtgagtttagggcatcttgggagtggaggtaggttgtggaaaagatgtgtccagagatctcatttggctttggtatcttcctgaaataaatgtcacacacagggctgggcatcttgcatatgctgacttctcttaatcttcacagcaatgatgtgaggcagagatcatctccattttacacctaagaaaggcacagagaggtgcagtggattgcccagagtctcacagctggcaggggctagagcttgagttcccaatgagaactggttgtccccgaagcccttgaatatttcaccatactgcagtgcctttttcatatcacctccctggatctcagttgctccatctgttaaatgatgacaagtgaactctagtcagaagtcagagtggtgttttgtttttaatttgaatgcctttaggcaggtgtgttctccagttcattaccatttgcgcattcccctgtgccctctagtctcctgcctggcccctggcccctgtgggaatttgcagccctgcatctggttggtgtctaccgtttctttcgatttagacaatctagagggcagtgagaaattggaaaggggtagcaggtaagagctctcgagttcagtgagaaattggaaaggaatagcaggtaagagctctagagttcagtgacaaattggaaagagatagcaggtgagagctcttgagttcagtgagaaattggaaagggacagcaggtgagagctctcgagttcagtgagaaattggaaggggatagcaggtaagagctctgctttcaccgcctcctagctgggagatcctggactgatcacctcactttatagaacctacttctctttctgtcaagtggggggtcacagtcatactgacctcaaaggggtgccatgcggatgaaatgagatagggctcataaagcacttagttagtacaaaaatacatgcttaggattagctgctctcaatttccagaaagagaatgtcagccaatgtacacaggcatctgccccctcagacataggatggcatttgcatgaggaaccagaagttatctttgaactcatcattttgaaacccctgtgatgaaccctggagctgccatgttggctcttcaaaccaagcctcagcattatttcctgtcacccagtcaagtgatgctgaacctcaaatcagccagccagtgctgaggccaaaagcagaagtgggtgctattctcttgggaccagaggaccctagcccagccacttaaggaagaagctggtaacaggtgctggctgtgacagacaagaagctgaactggcccaattaactctgccaaatgctttcacgaggggccagaagcaattcctaagtggagactgaggtggaaaatctaaagttctgggaaacaggttattaatcatgaccctaggctgagctcactacctcctggaaatccttcagaaatgtcttaggaaaacttggagtactgctccttcaaagagtggtttctttggaagttgccgtgggctcctatgctgactgattatgaattgcagattagaacacataatgtatccgctcttactggaggaagctgcatttccaaaaagaagtctctttaatgtttcaagaaattacaggctttagcttgactcttcagaactgaataatggcccttcatggcaccgaagaaagtatttggtgtattcttactatgtcccaggaacctaggtcagttactgttttagtactttatcagtgtagtctttaacattccataaatgtacattgaggacctgttagtactaagcactggactagaggaccagggtaaagacactgcctctggtcttgtggaattctctgtgcaacaagggaagatagacagaggagtgaataattttaatggcacgtgaaaagtactgcaaaagaaatatgcacaagtgctacaaaacaccagacactggatcagcatattgtggaggtcctgatcttgcgctgggttgattccttctgctctctccctacaattcctggctctgggagctttgccagcatttgcattagggagcaactgagagctgcccctgctgaagcactcatttctggcaccttcctatcccccgtggcttcagaggggtggaaagaacacttccttacaaaatgtatgggccccacctgagagggccctgaatctgaagtccaaagttgtagtaaggaaacagagggacgggtgacttttgtagtctaaaatcaccactgattttccgttggtttgtttttataacatttattgtggattttttttttctgattgcaaaattagaatatgttcaagggaagaaaagctagatagtacagaaaaacacacttaaaataaatcatcactcagtgatttcacttctctgtttttgaataagggcctgtctcccaatccccccacccacataccgctgtatttcaagtttagctctaattttaatttctccctgggcaaagtctcatgtttgtttgcatatctcaaaggtgcttgtgttgtgggctccaatcactactatctgcaattggttagagcctgcggccatcatttatactttcctggacgtgtgtgtagattcatctactgctaagaaccctttatgtgttaggcattatgcaaggtgcggtggggaatgtcgaggtaaataagactttgaggttgctcatggccggataggaaaaaaagactcagataacatgaacacattgtgaaaatgtgccccaagatggggacagagtcctgtagaaagcctaagagattggaggagcagtagcatttgagctgagccttcaataaatttttcatgtatttagccaatatttgttgagaacctaatatccgccaggcactgggcaaggtgataggtggatgatgttaaatataacaggcatggcctttacctgcatgaagtttacaagcacaaatggtggcgttaagaagtcaataagcagggggagtgaaagaggagagtgtggctggggtcttccttgaaaaggtggtattcaaactgagaagagggctgggcgcggtggctcatgcctgtaatcccaacactttgggaggccaaggcgagtggatcacctgaggtcagtatttcaagatcagcctggccaacatggtgaaaccccgtctgtactaaaaaaatacaaaaattagccgggcgcggtggcacgcacctgcagtcccagctacttgggaggctgaggcggaagaattgcttaaacttgggaggcagaggttgcagtgagctgagattgtgccattgcactccagcctgggtgacagagtgagactttcaaaaaaaaaaaaagaaatggagtcacttataccaagagtaaaggagggagagggagtaaagaagggtgctggattattccttcctttgctcattattgattctaaaaatctcacttattttctgtattcagtttcctttctattggagaatattcttggggtctgtgaatggtaaacttgcccagtctttgtttgaaaatatcttttgccctcacacttgatatgttagctagatatagaattttttgcatagcatgtgtaatgaatgtgaaagttatacatgcctctttaaaagttttcaatcaaaacagaaatagataatgtacaaagtgaaagtctttcatttcttttctcacaatttctcaaaagagaataatttttttcaaaagagagaagtttcccagggggaaccattggttacagtttgcccttttctatatatactgaaaattgtttaaagtgtaaagtatgtatactttttaaaaatgtgcacgtacacaaatgctgtactttttttttttctaaacataaataatcatgttcacatttgagcaggacacagtagttcacacctgtaatctcaactagtcaggtggctgagagtggatgattgcttgaggccaggagtttgaggctacattgagctatgattgcaccagtacactccagcctggggacagagtgagacctggtctcttaaaattaaaaagaaaatgtaaagttctttttttaattaaaaaatgataatatatgcaattttacaatatgctttttaacaatcaagcatgtacttttttccacatcagtacaatgaaatctccttcattctttgaagttgctgtatagtttctcatgatattgatacaccataatttaactatttttctattaatagacatttaagttgttttcgccccttggttttgctactatacagtatttcactgagtatctttttacttaggtaaatatatctgtagtataaattcctggacatttcaggaatgtgacgtgtctaggaatttgaccccaaaggatatgtatgcacatttaacaagttaatagatattgtcaacttgtcttcccaaaagattgtttcaatttataatcccagagtatgtctggctctaatttttgtttttcttctggttccttagaattcccgtactgattagtcaacagtggaaaatctgaagagatgcaagcaggaaaaagaaattaaaccaggtaggtagtggcactgttcatactctactgccagagcagcacacgtttttgcctgaatatctttatttctggttgaaggaagaaaatacgtaagttccaaactaaattagtgggagattttgaccttatgaagaaaaggcaggatggctcttttcagaagttatatacataacagcatgctacaatttcacagtcaagattctgttttcaggcgttttttttttaatagcatcagaaagaaaatttacctttggtggcttaagaggggatgggtttcccggccatgtacttaagcttaagcaggtggaatcatacacaggagttattagcaacattgggcctggtgccagctttcctctccaccaagtgtttgctgtaaagctgttttcacaaagaccagggcacattatgggaattttcattttaatgctgtaatagaggagcaaaagccagcaaaacccaacccaaagaaatgggttcggcccagtagtctggtgagaagggatgaagatgcagtccctccagctgagaacaaattgccattcaaagagcacaagtggcccacctggcagtatggccaccttgggtccagtgtccatagtttatgatatctaaatgtttctggcataagttaataattttaaactcagggtaacataataatcgactttttacctaaagcagcagtatttatcaacaaatctggtgaatttctttgaattgtcaagttggaagtactgggtccacagagatcttttcacccaccaggcatccatcagcatccatggatgtggttgttaaggtatcagaattgaaggctattctagattggcctacacccacctggaccttctccatagctggaattttcacaaagaggctaaagagcctggggatgagcgcatcgctctgaagagcttgccgaatccactgtgcatctgtccataagctaaggatggtgtgaggactgaaagctgcatgggagagagaaggtcttgtgattttctctctcttcagcactgtagggggcacattgcagctgtgtctggtgcagctcagtttagactcctgcctcagccaggaaaagtttttttcatttttacattaatttagcaggtatttatggagcatcttctataaattggacaccagataacaaagcaaaagtggcacagtccttgccctcaggaagcttgtgggtctggctgacagtagactagtagcagtagtctgcggtaggtccagagggctagtgggcagagggtgctgcggcttgaaaggtatgcaggagatgacttggagaagagtgggcggggacaggctgggggcttgcggagcagcacagcgaaggcctggaggcttggggggtgcagcactccatggaaattccatgggccaaacacagtgcagagggggttccctggctggagttgagtctggaggtgtccatgaatgaatctgaactttatcctgatggctctgaatggaaagtcgctggagggctttaagcaggggagagttgtgagtcaggcttaggaaggagactgtctagcttcagtttgggtaagggactgagagagttctaagggactgagagagttccgcactctgcctggcccactctcatcacctctcttcttagcgcctgtgctcctccttcccttggaacttcaagaaggcaaaggacagagcccgaagtctgagataagatagactccttggggagaaaagaggaagtggtgctgggtgggtgggtgggggcacccagtgtaaagcagagtgtacaggttgccttggacaagtcacttcacacctatgagcttcagcttccttatctattaaatgaagataataagtattactcttcttttctctcatctcatgagatatcatcatgatatcttaaaatatcatggatattttacatgcccagctagggcttccagagaaatctctctgtttcgtttgccatgtaaggatttgttgaaatcctcaagcgcacattaagtgcatcctgtcgctgcagcttatcgcctgggatgagagcagtgaagaagccctagcctcaggatcagtctcacagctccctctccctgcagccaagaaggaccggtctacagaggggagggagcaaacactgaccgaaggccaggtgtgtgcttggcaccacccacagacaaaagagtgcttgggcagagctgctagaactattatttaagccatgtgccagatgtgataagcacttacatccttctcagcctcatttagtttgatcttatgaagtacatatatattatctccatttgatagatgaggaaaccgagactcaaagaggtggaactgcttgctggtagtgacacaattgggaagaaggagaagggccggagtctggagttcgtgctctctgacttctgtgggtagcatctgccattctgctggtgctccttcagacctttcagacagtgcagaggacacagaggaatcaagggacagctgttctcttacaaaccttgaaaatcctgtacagagccctcagataaccaaaacgtggtccagaactgaatcctggggccaacatgcccatttagcacttctctcaatcagtccttttccccaggtgcattaaacagggcagctgccttcccaccctatgggcaaactgcttggcagctaggagtgtgcctgctcatctcccaggctgctttcctttgcacctcagcaaggagggcaggccgtgcatccagggaagcacatagttactccttctgccagaaggccaccccctaatctggtttaccgtggacactgaagtcactccctgtctcctggccatgaggaaaactcctttgagaggagcctctgaagccagtggagagagtaaaaagtgagaatcctgcctagttgaacaggcagttcagcctgttctggaaagagttaaggctgtgtccataccaagccatttaaagaatctgcccagtagaatcaatattgtcaaaatgtccatactacccaaagcgatctacagaattaattccattcctatcaaaattccagtggcattgcttacagaaatagaacaaataatcctaaaattcctatgaaaccatgaaagaccccaaattactaaggcaatcttgagcaagaagatctaagttggaggcatcacacaacctgatttcaaatattataggctggacatggtgactcacacctgtaattccagcactttgggaggctgaggcgggagttcgagaccaacctgggcaacatagcgaaaccctgtttctataaaagaaaaaaaaaaaatccaaaaagtagctgggcatggtggcgtgcacctgtagtcccagctactcaggaggccaaggtgggaggatcacttgagcccaggcatcgcatcaaggctgcagtgagccgtagtcatgccactgtactccagcctggctgaaagagtgagattatgtctcaaaaaaaaaaattataatgctataataatcaacacacacacacacacacacacacacacacacacacacacacacacacgactattactcagccttaaaaaagaaaatcctgacatttgcaaaaacatggttgaacctggaggacattgtgctaagtgaaatagggcagacacagaaagacaaatactacaggatctcagttatatgtggaatctaaaagagttgaactaagagagagtagaagggtggtttccagagagagtagaagggttgttggggaaatggagagatgttgagcaaaggttacaaacttgcagttataagatgaataaattttggcgacctaatgtacagcatggtaattacagttaataatatggtattgtatacttgaaatttgctaagagagtagatcttaagtattctcgtcacaaaaagtaactgtgtgaggtggtggatatgttaattagcttgattgtgataatcatgtcacagtgtgaatatataacatttttatttgtcattcataccttaataaaactgaaaaaaatttaaagaatctgcccaggtcacaggaagccatcagtcataccctgagctgttgtgtaagctcaaagagtatggtttatagcatatggatgagtgctcttgtgccaacgctgggctaaacctttacatccagtgtctaattaggtagtttctgttattatccatgttttaccaaggaggaaactgaggcttttggagattacatcatttggccaatgtaccagagctggaaagttgcataactaagatttcacttgagctttttttagctccacatcttctattttttcagctacaccaaaacgacttctttaatttagctttgcttttctgataatagtaaccaccaccctttattgagcatcttgtcatgtgagccaggcattatacatccattatttccaatcccagtagaaccttacaagtaaagtatcattgtccccgtttcacagatgaagaacctgaggttcagagaggtcaggaattttgcctcacagatttcatctgagactagagtgagctctcaactatcatcctgtacttccttcattccttaccttttcaggttcctaggaggaaaggactcaaaaaaattatgcatgaatttcctttaatttcacaacaaccctaagggttgggggttgatatctctgttttacaaaagaagaaactgaggctcagagatgttaagtgatttgctcagcgtcatgcagctagcaattggtggagccccgattcatacaggctctgacccatagcttaagcttacttgcctcccccattcccacccctcacccctcttcggctctgtctccttgcaatgggggcagaaaatccagcctttatttctccaggtcctagtagtcctgggagtctgggggatttccagctcctttgaattcccttttttggcctctactctgcctccagcacctctcttaagagtccttttcactgttgtcatagcaagggtctcatctggagggaagctgccttgaggttggaactatttggctgcttatcagcaaggcttcagggccttgccatagcaactttccaagccacccatcttgtgacctgttctgactcagggcccctgggaatcccctgggtgcagatgtttgcagtgactaggatgcagcagtcggctcccaggactctttttctggccaaggccattttaggaaggcttctgttccagctgtgctgggagagttgaggtccagagcctccaaaccttaagaatgcagggttatgtgatgtctagagctggagtttttagccaggggcttatgggttaagagccccctgtgatcataggtatggttacacacacacgcagagaatatatacttttctgggcaaagtatctgtagcttccctcaaactctcaaatgtgtctgtgacccttaaagtttaagaacactggtctagagagaacccaaagtgttgtgggccactgtgctcccttggccaccagcctctcagatgccagaatcttgagagagcacaccaggcctctagtgtttctgcttaggcatgaactgggatacagtatcaaatattgctgaagttcacaattataactataaatgtacagctgtcctttgggatgccccaagtacttttatttatttatttatttttttgagatggagtttcgctgtgttgcccaggcaggggtgcagtggcatgatcttggctcactgcaacctccgcctcctgggttcaagcaattcttctgtctcagcctcctgagtagctgggatcacaggcgtgcaccaccatgcccggctaatttttgtatttttagtagagatggggttttaccatgttggtaaagctggtctcgaactcctgacctcgtgatccgccagccttggcctcccaaagtgctgggattacaggtgtgaaccactgcgcctggtgcccctggtgctgtaaaagtacaactgtcctgtggatgccccaagtacaaccacgaaaatgcatgcccagcaccccaaacatgtcaacatgtttgaacatagtatattcaccccataagtggtagccaattttttattttattaaatattaaataaattaattttaaacacatttttgttttgttttactcttatcattgttattatttatttggtcaggagccaggaatcagatggttatttagtcactgagtgattaaaatctatatgtcaggagctgtgctatatttcaaagatacagtgacaaacaagaaaggcagggtacctaccctcttggaatcagttggaatggcagataatgaacaaatgtatcagcatcatgcctggctcacgggacatttctgtgtgtatttgtcgaatgactgttgaatgaatttcgactgagtcattattaggaagaagtcaaggtgctgcaggtggcaggcaaggaaacttcatctcttctggtgggtcagggaagaggaagagggactcaggctaaagggcctacgccccaggctgccaggaattacacaggactgtttacagggggctggcattcccatgaagactggaggtgtggggggagggctggaatactgaacaaccaagggcttaggaaccttgagtaaatgatgttaatgtgggccagaggtacggatgacatctacactctgctcaagtagtgatggtccctggcttgcaaacatgttgctcttccaggttccaagggaggctgttgttcaaccggtatttacctatgtagcaagttctgggttcggaaccctacttctctcaggaggcaggaaggatggaaggacatccctcctgcagctgaagacggcagagccccagccactgctggcagtggccgtggacacacagtgcagtgtctgagcagtgtgtgaagagactcccttactgtctgaagggcttcactcaccctacactagtgagaagcctctgaatattgtcatggaagggaagcattcacatattaagggtaaaatcaaagtcagagcaaaatttaaagtctgctctttgcccctcaagaccctgaaagtccccagtgactgtcattccactcacctcctctcccattcactgctccccagccccatggcctcttattagtctttctgggcagcaggctccccttgcctcttgcatgctgtgccctctgcctcgcatacttagatgtatatgcagaagtggtttctaaactcctctctctcatcatgtgtgtgggctgtgatacccaaccatcagtaacagcagctgatgaggacagtgatcattagctagagagcacaccctcagtcgctccacccagcattattagaataataataattccccaccaggtccccccacccggcattattagaataataataatcccccaccagatccccccacctggctttattagaattactatgagaaactatcctctagtgattctgttaattgtgatttttgcccccctactaccactggttaagaattacgggcttatgaactgagctccctaactagaccatggacttccctcaggggcacaatggtatcttactgtttttgtatctgtggtatctagtcccaagcctagtatacactgagggatcagtgaaatttttctgaaggaatggatgaatactatagagataatatcttgcttcttttcattctccacggtgtattttggagatgcattttatagaattagaggaactagaattgacacaaactgtcttcaacccatgaaagtctgtgcttccatgaaggtctctggaaagcagcagaacagtccatctggatcactgcttggtggctgggcatgctgggtcctccccgggcctcctgctgcggatgtatgatctaaatttgccgaggctcagctacacagcaaggttctcagagagtggcagtctccatcctactgtgaaaggaggggcagttttccaaggacttccttgctttcctgcccttccttcagagctagaagactcttacctcccttaccccagagctagaagtaacattagagattgcttcagttatccacttctgcataatccatcacccctgttactcagtggtttaaaacaacagcaatagtttcttatatctcatggtttctgtgggtcaggaatttgggaacagcttggctgggcagttctggcttggatcttttatgcagttgcagttagatggtggctggaactggagcagcttggggccagcaccgctgaaggctggccggctgctgctctttcctggccgtctcaggacctctcccctgtggttacttcatagggcctgtttgggcttcctcacagcacggccacctcagatttcccatatgcagctcaatgctctagaggcaggtttccccagagagagctaggtgaaagctgtataaccctttatagcctcatcttggaggtgacacaaaatcatttttgttgcattctatttgttagaggtcattaaggccagctcgttcggggaaattgaaattaaactctacctcccgagaggaggaatgtcagataatttgcagacatgtttcagaaccaccacagagatacccagtttcccccttcattccacacttgagactcccgaggtttgaggggaagagccttgtccagaggtgcccagcctggcatgggcagacctggagtgtgacccagcccctaggcctttggcaggcctgccaggaagtgatctcactttcccttccttcctgtcccctcacagtaagatagagactgccactctctgggaaccttgctgtgtagctgagcctcagcaagtttgataatacagacacagcaggaggcctggggaggacccagcatgcccggccaccaagcagtgatgcagctggactgttccgcagctttccagagacctccatggaagcacagacttccatgggttgaagagagtttgtgtcacaattccagtccctagccctggccctgtgtgaagtagtaacaccgccctgccagtaggatatagctgctgaggaggtaagagttttaaaaaattcataccccaaaataattatttttactcttgctgtgaagttagataccaaagagtagaatgtggtggtagaatcaagagagtcaacccaacatcactgaaaagattctgaaggtttgtatccagctgaatatccaaaacaggatgttgcttaagcatgggtaaaatgcatctggtgtatgttttagacagccttgtactatgttttccagggacttgcttactttcttgcccttccttaagaaatgccttattatgaagctgggggcaggggaaaaagaaggtcagaaaagggaatgggtacttttcagtaaatccatactacatgccaggcataatactaattcactcccctgctttatagcctaatagcacaggctccatctggctccaagctccctaaccttgctgagtttcagctgcctcttttgtactatgggataatgatactttctgtcatagagttgctataaaattaaatgcttgtaagatgcttagcacagtctggcatgcagtaagaaagaactgtgtaacaggccaggcaccgtggctcaagcctgcagtcccagcactttaggaggctgaggcgggcggatcacaaggtcaagagatcgagaccatcctggccaacatggtgaaaccctgtctctactaaaagtacaaaaattagctgggcatggtggcgcacacctatagtcccagctacttgggaggctgaggcaggagaatcgcttgaacctgggaggcagaggttgcagtgagccaagatcgcgccgctgcactccagcctagtcacagagcgagattctgtctcaaaaaaacaaaaaacaaaaaacaaaaaaactgtataactgttggctccaattaatccccacagccactttttaagacaagtgtgagccctcccattttatagaaggggtgtctgcagttaggtgaggtgcccagcatcatgtgccactgtagggacagcagctgagactctgaagtccttgtggcatccaccacaccacattaccctccgggcagctctgccagggctttcctgacatgcaatagttgggggcagaggaactcaggaggctttgtgccctacaggagccccatgtcaggtcctagagcaagaacatttgaaaaaccaaggccaggaatccatttatccacttaggaggctctatagggagcagggttacagagaatgttgtacacagaggaaatagtctagtaaaggctttgaggtcaggaattaaatgaggtttgaggatttaaagagaggcccagtgtgaccagagcaaaatggaccaagaagagagtagaaatgagacaaaggctcatctgcagaggcaggcagggccaggtcaatgcagggcttcagggactggcatcaggagagtggatttcactagatgtgaaatagaaaagcatcagaagttgaacgaagcagggaaattccagtgatccaatttccattttgagaacgttaccctgcctgccatataaaaaatagaccctgggctaggggtgagagagacacaggactctggtcagggtctctgctcagagtcctggtgagacattccggagcctgggtggtgcatgtggaggagagaggtcagcagattcaagctctgttttgcaggtagaaacaaaaggaccaggctgggcactgttgctcatgcctgtaatcccagctctttgggaggccaaggtgggaggattgcttgaggccaggaatttaagactaggctgggcagcatcgtaagaccctgtctctacaaaaacattaaaaaaaaaaagaagaagaaatgacaggactgggtaaagaattgtccatgggtggtgaagaagaagcgaggtcagggatggtcctgggtttccagctgggcagatggtggtgcccttgctcagttgggaaggccgtggcgagcaggctggtgacttgacgtctgaagcttgcagtgctgtgggatagccaaatgacacgctcaataggctgagtcagaaatctagaactcttaagagagggttgcagctctttgaaggtcaccaacatagattatttcgggaaaggataagagcccctcgggagcaaacagaagagactggcgtcctaacacaaaggtcccggcagtagcaggtgcctgtgcagactggttggagggaggcccaaagggtgtggtgtctggaagtcccatgaagagaatggtccgggaagaaatgagttggaagaggaggacagaaaggtgtccctggggataggcaccgtagaagtcactcaggaccttgtctgacttgagcaccctgaccttcccttcctatcactgcctgcatccaggcctgcttgggtctaggcctggcaggtgcagaggccaaggcccggcctctctgcctccaaacaaagcctcacccagggccactctttgaatggcaacaggcactgcccaggcaggcgacaggctcctctctggtgaccttgtgctggatgtgccccaaggcgctgggtagggctttgcagccagccccaggcaggccacacatggatagaaccggcagccctcccttttcccaggttcttggaatattctcattttggggctctgagttttctgttggcctcagtgcctctcttttctggctttctatcacagagagaagccgctacccttgaaatttgatgaatgcctgttcagtaggccctggcatttctgtttccacggccctttcgtccctcagagaagccttagagagcattttgcccacccctgataaaacttctcccataagaccaggtcccacttctgtgcttcatgtcttctgcaaaagtctgtttgctttttgtatggtttctgcaaatactgaatttttgaaaaagaaaaaaaaacaggaaatgacctttctagtatatttggaaaacaatttggagcttgtaatggaatctgcctgagcaatgaggactaatagctgcagacttggaacagaccatgtagctcttggcagagcctggggcctcttcagtttacaaagctggggggagtattagaaacccacgggagaagtggcttcctgtggggaaatgcccagagcaggcacctgcaggcactgtaacctctgaccccagggccccaaaaggcctggggacagagtataagggcttcaccctttgtcctgggcattcaaggtcaatcacatgtctggcaatcatccagatcccacaagataccaaaacctcctgaggatgaggaaaagaaagagcttcattctttagcaccctgtagggctcaggctgagctagaagattctagattgtttttagactcaaattgcctgttggctctctgggtccctctctatccaacttttctgtagatttcagcaaaaaccacctcctcagagaggcctttcctgatcatacagccattaactgcatgatccacatgcagagaaccctctcctcttctcccatagcacataccataatctgtgataagattcatttacttgtgcagtgcctttttctctttacacattgtaaatatcttttttagtttccagtatataccctatgcccggcacagtgcctggcatgtagaagttgctcagtacattgaatgaataaatgaaatatcaagactggaagacttggaggccaggtgcggtggctcatgcctgtaatcccagcactttgggaggccgaggcaggtggatcacttgaggtcaggagttcaagattaacctggccaacatggtgaaaccccatctctattaaaaatacaaaaaaaaaaaaattagccgggtatgttggttcatgcctgtaatcccagctacttgggaggctgaggcaggaaaagcacttgaaccggggaggtggaggttgcagtgagcagagatcatgccactgcactccaacctgggcgacagagtaagactccatctcaaaaaaaaaaaaaaaagactggaagacttggagatcatatttcaaacttcattatttagatggtgggaaaggaagctgagagagaaggggactcatcaagggtcaccctattgcgcgggtattgaaccagatcttcagccactgttatgatgcagggccgcacattctttgctcttctttccctgtaatctagaacatcttctattattcacttgttcatcagctattcattgagcttcaagtatgtgcagggccttctggacgtaacagtaaacacaccagccagggtcaccacttctggggaatttatattcttaccacacaacaccataaagcaccaaagaaggaagttttaatcttctgtagcaccgttaaacagagtaaaaacaaaggagctgaatgaaatgtccaaaggcaggttttactaactcagcccccaaatgaaccatcctaatcatttattaattgcattccacttacattccccatcacttactacactttttgcatcaccatcttattgaatcttcataacagccccctgaactgcagggtgtgactgttagccccgctttgctgaggtgaggggagttgtgcacggcccacagctggtaaacaacaaagctgggctggacgagcaccctagatgccttctaccctgccacccattcccctcagagatttgtaatgtcatcagggactcccaagggggcagtgtgatgtggggaaaagagctctggaccgggagttaggaccgctagatcaagaaccctgggcaagtgccttgccctttctgagcctccgtttccgcagctgttgatgagaggcttgtctagatgagctctgggatgtctttcggttagattctacaacaacttttcattaattgaacaggtatttgccctgtgatggtcctgaatgaatcaaagctgtctccctgctggagataggtcatgggctgttggaagtaaaggtttagaactcaggagagaaaagactgtagacccatgtgttagggcatattagtaatcatatattgagaacatccttccgtgtcaatatacataaatggattggcctgattctttttaatcattgaaggtttctgaactgagcatgaggatgagccaactgatgttggggaatgtccctcttgaagtagaggacagagggcttgaggatgaattgggggtgggggtggtgaggaataagtgagaagactgggggcagaaaagccagttggggaaggttgtagtagactggatagagatgatgaagcgtaactgaggccatgattactgcatggagaaaatgggaagatggacctgaagagagaaaataattgaacctgggtaattgagctttaaggtgcaggatgccttcttaaagagaggaagaagtcaggcatgagttacgggtaataggtttttgacttgcataattgattgtggaggtggctcctgactaagggaatgaatgagagagagtcctggaggagggagagcataattttgttgatatcctccgggaggattcatctagatgtctgcagctcagcaatgaggggatcgacattgaaatgaatggaagatgatgtcatgagagagaacgagacgtgtagaacaattagagaaacattagaagagagtaaaggatggaattaaggagatatacaagtagtcaaggtgttggactaggagaatgtaaaagagcattctgagaagttgaaggcagttgctttactgcctgagccttagtttcctcatttctaaaatgaggattagaatcgtgcctactcgttgtgtttagggttacatgagagaatgtgtggaaggcacttaccttgcatatcagaagtagaactcatgcaataattcatcattcattccgtaagtaagagtcaagcaccagcatatgccaggcagctgggccagccctttggagtacacagaggagcaaaagggaagtctgagtgcctgaccttgtgggagaggaattgtgaaagaaagaagactcaatatcataaaaatgtgatttctatctacattcaggtaccagatattactatatatatttaatgcagtcctgataaatacaagataaattgggggacaagttaaatgactattaagtttataagaaaacatagatcagcaaaaacagccagaaaaaaaaaatctaaagtcaaaaaagatttgagctatgagaaggaaaccatcctacaacatgatactagtatatgagtagacagatcagctggagagattaaaagattcagaaacaggccaggtgcggtggctcacgcctgtaatcccagcactttgggaggccgagacgggcggatcacgaggccaggagatcgagaccatcctggctgacacggtgaaaccccgtctctactgaacaaaatacaaaaaattagccgggtgtggtagcaggcgcctgagtcccagctactcaggaggctgaggcaggagaatggcgtgaacccaggaggcggagcttgcagtgagtccagattgcaccactgcactccagcctgggcgacagagtgagactccgtctcaaaaaaaaaaaaaaaaaaaaaaagattcagaaacagaccccaatacacagttttgtatgtaacaatgatagctttttacatcaatgaggaaatgatggattactccacaaatgatttgagataggtagaaaaaattaaggtggctcgctaattcataccttattacagataaattctagatcaaagatttaaatgtgaaaagggaagccataaaagtactagagaggccaggcgtggtggctcacacctgtaatcccagcagtttgggaggctcaggcaggagtatcacttgagcccaggagttcaaaaccagcctgggcaacatagtgagaccccatctcttaaaaaaaaaagaattagctgggcacattagcatgcacctgtagtcccagcttctcaggaagctaagctaggaggatctcttgagcccaggagttcaaggttgctgtgagctaggctggcaccgctacactccagcctgggtgactccagaccctgtctcaaaaaacaaagtaccagaaataaacaaagggatttctttactaatcttagagtggggaagacatttctaattatgttacaaagcccagaaaccataaaataaaataaagatcaattttactaatgaatataaaaatatgtatgtggggagaagtgccgaaaaataaagtcaaagtacaaatgacaagtaaaaaatactagtaactcctaattagacaaaagactaattgccttaatatattaagaactcctacaaatcaataagaaaaagacctaaaatccattagaagtgggcaaaagaatttgaagaaacagtaaacagaaaaggagatgcaagtgggaagatgctcaggttcactcctaggagcagtaggaactaaaacaatcaggcactggttttaaaaccaccttttagattaggaacaaaacagcattaagaagactgtggtgaaggaaagtgctcatctgatatacctactggggattgctatggtttgaatgtgttccctccaaaataccaatgtgataatattaagaggtagggcctttaagaggtgattaggtcatgagggctccttccttgtgaatgggattaggcaccttttataaaagggcttgaggccaggcatggtggctcacgcttgtaatctcagcactttgggaggctgaggtggctggatcacccgaggtcaggagttcaagaccagcctggccaacatggtgaaacctcatctctcccaaaaatataaaaattagctgggcgtggtggtgcacacctgtaagcccagctacttgggaggctgaggcaggaaaatcacttgaatctgggaggaggaggttgcagtgagccgagaccatgccactgcattccagcatgggcgacagaacaagactccatcaaataaataaataaatgggcttgagggagtgagtttgcccctttttgcctttctgccatttgctctgtgagaacacagtgttcaaggtgccctcttggaagcagagagcaggcctcaccacaggctggcgccttgatcttggacttcccagcctccagaactgtgtgaaataaatttctgttctttagaaattactgagactcagatattttgttgtagcagcacaaaacggactgagagacaggaactaacttctgtggggagaagttggcaatacctgttataataaaaaagtcacagatcctttgaggtggcaattccacttttatagaaacaatcctcaggtccatcaacagggaagtaattaaatcaatctacaacagtgagacaacagagtatcatgcagacaataaaaggaacaatttagttattactttgggtttgttttcagtgtgttgatgtaatcagtgctgcagtggcttcagagtgatctacagttgtttccaaggtgtgtgtgtgtgtgtgtttgtgtgtgtatatgtgtgtgtgtgtgtatatatatatatatatatttttttttttttttttttgaaatagagtctcactgtcacccaggctggagtgcagtggcgcaatcccggctcactgcagcctctgcctctcgggttcgagcaattctcctgcctcagcctcctgagtagctgggactacaggcgtgcaccaccacacccagctaatttttgtatttttagtagagatggggtttcaccatgttggccaggctagtcttgaactcctgacctcaggtgatccacccgcctcagcctcccaaagccaagacacatttttaaatgaaaaaaaggcaagatggaaaataaatttttttttttttttttgagacggagtctcactctgtcacccaggctggagtgcagtggcacgatctcggctcactgcaagctccacctcctgggttcacgccattctcctgcctcagcctcccgagtagctgggactacaggcgcccactaccacgcccagctaattttttgcatttttagtagagacggggtttcgccatgttggccaggatggtctcgatctcttgacctcgtgatccacacccaccccccgccgcctcggcctcccaaagttctgggattacaggcatgagccaccatgcccggccaaaattttgttttaaataaaggaaaaaggaagggaaggagaaaaagggggaacatatatattgcataaattttgtctggaaggacaccaaaacgtgcttgccttggggagggtgtctggatcggatgggaagggagactaagctcttatctctgtccttttggaccttttgagttttagaccacatgcacacataatctaaaattaagtaattttaagatgaagtgaatgtgttcactataaaaaggaaatataacagattttaaaattacttataaaaatattaatgtatgtaattatatcactggtattctttttcatttaactatatgtgaacattttgccatttctttaaaaaatattcacaaacatcattttaatgcctgaatggtatttcatttagatacaaattagttaagtatgtatatattaataattctccattgtccgtttaggacatgtgacacatccatttaggaactcattttggtgtctttagtttcctgctattataaataatactgtgggccaggcgcagtggcttaggcctgtaatcccaacactttggaagtccgaggcaggaggatcacttgagcccaggagtttgagaccacgagtttgagaccaccttggttaacataatgagattcccatccctgaaaaaaaatgagccagacatggaatagtcccagctactcaggaggctgaggcaacaggattgcttgagcccaggaagttgaggctacagtgagccatgattgtaccactgcactccagcctgtgtgacacagcgagaccctgtctcaaaaaaaaaaaaaaataatactatgaggaacatctttgtacattttatcttcatgtagatcttggattattttcttagaatagattattataaactgatttagtagctaaaagatatggaaaaagttgaggtttctggatacacactgtcaagtcactgcccaaggaggtcttggaagtttacagtctcattaacagggtttgagaatgaccattttctgacaggatttccaactctgaggattctttatttccccatttgctgttgactctaaagatgagagggtgagtgacgaatataaatatgggagaaaaataaaacgatgtgtttctgctttcgattggagagctccccagagccgtctttggaattgctgttccctgaggggatatggtagccagagcatgttggcccagctgatgttttctaggattggtctttgagtgtggcatttgctgtctctgtgtcccgagggccagtggcctgcactgggcagcctgtaacatcagatggcattgtgagatcaaagccccaggagacattccagcatgaagctggcctttcagatagagcctgtaattccatcccatggtgtcaggtcctaggacaagaacacctgcacagcactccacggtgcacggaggcccttctcaacagccccaagaaggaactgcggctcctccccacagaggacaggcgggcagcaggggagaagagggatagacacaaactccctctccttcagaggcccgagagtgaaatccagcgagtgtgcatggagcgcctgctctttaccaggtgctggatgagaatcagggaatgcagcggccagaacctgttggctcagctgccaggattaggtttcagctggacatgggaaaaatccagaccaaattcctgttcccgtggagctgacagtctaactgaggaagagccgaggactcggaggctccgggagccagtgtggcctgctcggggtttgtcattttccagagcagcgggtttcaggtggggctgaggcccttctgagccgtggctgtaaaccggcctcactcacctcagagggcagctgtggccactgagtgcgtgatgtgtatgaaaacacaggcacctgggccatggtacctttccttatcgtaggaattgtcagcatcatttttatcctctgttattactgttattatcataagccattttcctgtcctgaagcattgagcggtttccccagaggcagagcgcaggagtgaacctccgtgacctgtagaaggagccacctctggaacttccgggaattcttttagccaaggaggagccagagcgtgactagggcagcgcgcaaggctgctaggaagataggcagggtgcgccatctgctgtagccggggggaattgccgtggacagtgtcctggccctcctctattttacacaggggaaatgaaggccccaagaaaggcagggtcttgcccagggttaggtggcagagcttgggtttaaggtcacgtgtctcattctttgctctttctaccataggacacctccctgtctcacctgtctgatctttgagggcccctaattcattctttaggtgtttcttctgagctaggtgttgtggggggatgtgggccttgccctccatactgatcctcttctctgtctctctctttctctctctctctctctctctcttctctctctctctctcacacacacacacacacacacacacacacctgcagcacttactggctcaaccccaccctgggtgccttctgggcacttctgccaatgtcagctaccttctaaaagcattgcacaataatttgggtttataaaacttcaaccattgaaaaaatatagacttagaaaacgaaagttccccttaatcacaaagaaccacagttgacagggttgatagatgttttttcagatttttttttcatatgtctgctatctttccccacaggaactgggttttattttaggtgttgttttgcaacctctgtttttcagttgccagtttatctcagacattgtcctatgtcagtacaggcccatctggcacatttctttattattttttttttactgacatgtcattgtatatatttgtggggtgcaacttgatgttttgatacatatatgttgtataataatcagatcagggcagttagcatatccatcatctcatgcatttatttctttgtgatgagaatattcaaaagcttctgtagttattttgtaatatagaatgccttttttttttttttttttgagacggagtctcgctctgtcttgcccagggtggagtgcagtggcgtgatctcagctcacggcagtctccgcctcatgggttcaagagattctcctgtctcagcctccagagtaactgagactacaggcgtgtgctaccacacccgactaattttgtatttttagtagaggcgacgtttcacgatgttggccagcccagtctcgaacttctgacctcaggtgaactacccgcctcggcctcccaaagtgctgggattataggcatgagccaccgcacccggcctagaatgccttattgttaaccatcaccatactgtacaatagaacaggaacttactgctcctatctaattgtaactatgtacccgttgaccagctttccatcctttcctctcctctcccctccccagtctctggtaaccactgttgtattctctccttctatatcaacttttttttttttttttgacagagttttgctctgtcacctaggctagagtgcagtgtcatgatcttggctcactgcaagctccgcctcctgggttcacgccattctcctgcctcagcctcctgagtagctgggactacaggcgcctgccaccacgcctggctaatttttgtttgtttttttagtagagagggggtttcaccatgttggccaggatggtctcgatctcctgacctagtgatccacccgcctcggcctcccaaagtactgggattacaggtgtgagccactgtgcctagccgataacaaatttttttttttttaagattccatgtatgcgtaaaatcatgcagtatttgtgtttctgtgtctggcttatttcacttaacattatgtcctccaggtttatccgttttgtcccaaataacaagatttcattcttttttatggctgaatagtattcctttgtgtatatatacattttctgtatccattcaatcatgttggacatttgggttgattccatatcttggctattataaatagtgctgcagtaaacataggaggtcagatgtcttcttgacataccaatgtcagttctttggatatatacctagtagtgggattgttgggtcatatggtactgtttttaattttctcaggaaccctccatactgttttccatagtggctgtatggcacatttcttttttatgactacttcataattcacgcgatgcctaacctcctggtggacatttgggtggtttcctataggctgctattactgaccaggtgcagtaaacatcctcacactagagaaaacattgggcatttgcctgagtgggtctagaactaggatttgctgggtgggcccatgggcccaccccactggactatgaactcctaaagtcaggccagtgcttagaccacccctcccacttactaattcaggtctgcgaggtagccagagtccatgcaatgactgctatctaattgccttcagaaaaccataggtgctcaatgagagatactagtatccccttcgcaaattaaccttttgttaatatagtagcagtacttcttgttgccaagagtacataaatggacaatcttgtgtgctactggtgggaatataaataaaaacagcactgactttataagtctttctgccaattttttgtcatcatgaataccactgtgctatttgggaaggcaactgggaaatgtgtcaaaaatctaaaaattatttcacccttccctttagcccagcagttctacttctagggatatactctcaggaaacaattagggatgggcacagagactttcataaagtcccagtgctgtgtgtggcggtagaaaacagggaagtacctctgtgttcatttctggaggcctcatcctagagtaaatcatggcccatccaagcatgctggcacaaaattcatgtggagggagacttagtgacatgttctaaagcgtcccaaagagtaggctacaaaacacaacataaggtatggtcccaaatcatttctaaatgtatgtggctcttctttatatatgtggcactcttctctcctttctctagactgtgttaccaagcaccagggctgttaactgctgtctctgtagtaagaactactaatttattttttctttttttcgagatggagtctcgctttgtcgcccaggctggagtgcagtggcacaatctcggctcactgcaagttctgcctcccgggttcatgccattctcctgcctcagcctcctgagtagctggaactacaggcgcccgccaccacgcccggctaatttttttgtatttttagtagagatgggatttcactgtgttagccaggatggtcttgatctagaactactaatttcatatctttcctccccactccacctctcttctgagctccagcctcctagttccatgtacctagcctacctctccccttggagggctcacaggcatctcaaagttaccgaataggccaaacaggactttatgccctcaaatattcctcctttgttcttccatatgtcagcaaaccacacttctgtccacctacttattcacaccagaaacctaaattacctgtcaatccaacactacttcttgttggttcgatttccaagttatatctagaatccttcccactgcccccctcctccacccaccatcttggcacctgaacttcacaggagcctcctaacttgccccttcccagcactgctgtgcccggccgccacagtcacctttgaaaatgcacggctgctacttcatggccttgcctaaagcccctcaggaaccaagttccagatgtggtctggctcctgcctacctcagcagtgtccttggtgtcattgtccctcttctgccatgctcccgcctgctggctctttctgtccttccaagccctcatgcctccctccctcagagccttcacacatgctgttcccctctctgtagtgctcttcccctcactcttcatctgcatgacgcctcgtcctccttggttctcagctaaaatgtcactttgtgacccccagccttgatcaggtcccagtgatcactccagcaccctgcattctcccttgaagccttgagcaccaaggccatgacttaggtacgaggtgactttatgccacctgtagtagatggtaagctctgtgaggccagggaccatggccagtttgttcatggtggtatctgtgccagtgcctggcgcatggtattaataaatgtgtgtacatgtttgtcaataattttatttaaagaaaagtctgagcccatgttctttaaaatgttgatggtggttgtctgggtgtggaattatgagtgacttgttttgttctttgtacttttctgtgctttttgctttgttttcaataagaggcaataactgtcattttgacagaagccactgtgctggggaactggagctgtcctctctgcagaatgcatctggacttacctctgcccccttgccttctgtccccacaggcctgaggagcgatgcgacaggcatgatggaggtcgagtcctcctactcggacttcatctcctgtgaccggacaggccgtcggaatgcggtccctgacatccagggagactcagaggctgtgagcgtgaggaagctggctggagacatgggcgagctggcactcgagggggcaggttagagccagcaggtccttggcactactgcatgccagaggccctctgccgggccccgggctagcctccaagtcctagactgcccatactttcttagagaagaaaccacatttaagtcaggcctgccccatggtcagtggcagagtccagcaatctctaggttggaagatgtttgagtctcaggccccaaggactcctctggacaggcatccgggactcttcctgtccccctgccccctagcccaggtccctccacttctcgctatccccacagctatacctggctctggccactcacagctctcacctggctgactttagcggccggcttccctgggctccctacacccatctccgcccttcctgttcagctctatgcagcagccagcagaccccatttaaaccattctgtccatcatgcttctgccaaaaaaaaaaaatcccccagtggcttcactgagtgaagctaagcttgtcacattgccctggggcagtcctgctgtaggccgggccctgcccaagtctcacccggtgccactcctctccctgacaccctccagctacatctacctttggtctgtttctcagtcaagcctctccaaggggccttctctgagtgctagatcagccttccccaatcacatgaccctcatcactctctgacaaggtctcaggggtctaaatgtgagcgccgggagggcagaggccttgcattctgtttggcacacagcaggtgcttggtaaccacagaccgaatgacaaaaggaaacagcatccacccacccaagtcctggctggaacacccccaccccctccattcccccagagaaccccttggctcaagtccacagtcagcctgggaatttccttgggaagcttccctgacccctgcacggctgaggcctttccctcctgctctcacagcgccacagaggccgtgtgtgcttctcacagcacagccatcaggctgcaactgtctccccgtgggctgtccggagggccacagccctgcccctccctgggtagccctagtcttcttgcccctcactggccagaagtgaatcaaaagtacagaacagagaagactttgccggggcttggacccagccctctcatgttacagatggacaaactgaggcccagagaagttggaggacttgctctgggccacccagggagttaacatagaatctggccggcttgagagagagcccccagcaccctgtcgacggaaccccaccccaaaagccttccctgtcccataatctattcattctcctctgtcacgtggcccaggcagaacctccacaggctcaccctgctcgcctctccagcatcaactctcatcctctcgccagccatagtcaagtactttgatcgctcagaagcccctgtgggccttcacacgctgcacctctgtttgcttctcccctccctccccttgcctggctgggttctcttcattcttagagacccaggcatctgctcagctgagaagccttccctgaccgcagtacccctcccagaccggggaggcacctcttctccctgctgcctccatgagcccactgagcataatggccctgctctagactgagcttctccagcacaggctctgtgtcttgtgccctcggtgcctggtggtgtttggcacatgatggaggtaccgagtcaatggctgttcattgaccgactgaatgaccagcatgtccagctgccacactgggcacgctgccctgggctctctctcaaggcttctgtgtcctcaccctcagctctggtgagctctgttctgtctctctctccctcagcagttgtagctgctggcccatgtgcccaggctctcctaacacctgttttccctgactcagattccctaaagtatgggtcctctggctacatgacattcacctgccagggtgactgacatttaaaaagggggcctgaggaaagaacagtgctcactgaaggaaaggaaacactcacggtggcgtccaggcaagagtgactggccaaggagccttccaggaagcccgcagggagcagttccgtttcacaggcggggctgcgggccacgcccactccagcgactccccaaggcagggggagtacagagttccaggcgccaccccgctgggaataaaagcaggctttccaggcagcgggctcggaatagggtcccgagctaccacccacttcctagcttgccgcaggggcacagtgaggcagtgctgatgtcaggcctctataaaccttcaggaatgctgcttattggaggaggttaaatttggtagaaggggtactagccttggtggcaggcagggctctccacccttgatccaggcaaatcagctcacctcgctgggcctcggttttctcatgcatatcatgaccctagttacacctccatgttactgtgtgcattgcacgagaaagtgcccatccatctgcagaccctggagcttgctatagggtggtgattctcctggttctgtgaagggcttagcctgaaggataaaaaggtgtggtctggttgggctggatttgaactcaggccctcagtgagcttgtagggcacctagtaacattgcacagtgtcactggggtttaagaatgtaccacctattgagctctgcccacatgccaggccccacgtggtgcaccttatgaaaagacacctgtttatcatgcagcctgaggaggaaagcatggagactggggcctgggtgtgagtttggcactcccctcaacctgcactgctggtccagtgggtggcaggagctgcctgtcccaccttgcacaggggggctcaagggaagctgaaagtgaggagacttggcttgtatcctgactcccctcagtgaggtgctccatctctgtgagcctgctgctgcccctcaccccaccaagatgtctgacaggatggatttgagaaggaggtacaacacacaccccatgatgcacggttggcccccacagactctgatgcaggccacaccctggcgctccctgagctggcctggttcagtgctctttactctcttagaagaacattggccgggcacggtggctcacacctataatcccagcactttgggaggctgaggcaggcagatcacctgaggtcaggagtttgagaccagtctggccaacatggtgaaaccccgtctctactaaaaatacaaaaattaaaaaaaaaacaaacaaacagaacagctgccatttgctgagcacctgtgacacactggggacttaacatctggcctctccctctggggaacctgcacaaacaaagcaaccttcaagagcccttcacttgatgctttaagcacccatccataatggcccttaattgactcttaattatactaacaaacactatgtgtatttccatgtaaaaagatgttacagaccaggctaaagtccataggccaccaccacctcagtccagctccagctcgtcttgctccccagggcatatccactgctatcagtttggctgggccctttcacacctccttctgtgcattactttgtgtatatgtgcccaagaaaaacctctttctctcctctccagaaggacaggtggagggaagcgccccagacaaggaagctggcaaccagccccagagcagcgatgggaccacctcgtcttgaatctgaccttgtccaagaaggctggacgagagaccttctgtcccctcccagagggggaaccctggcactggcccagcagcctcttctctgagctccatgtcccagataaaccaggccagactgagaaggctccccagaggcctctgtggcctccactccgggaaagccctctgcccacacccacaggcttcacattcccaccaccttcgcaccgtgcccaggtacactttcaagacactgtaaccacaagatgttatttattgagctggcgccgggacttgggcggggcctgccctacagtgagcagcccacacaggaacgctcctctcgcgagcggcccgggcagggaccctgtcccaacaccaacacctcctctccagcccaatcttctgggtccagacctgcttgtcccttttttagaaaacacttttaaactttttaaaaattttaaaccttttttcagcagatatggagagagctgacaatcaattcacattttttaagccattttagctaaactgtcattgtgcatctctgaggttccctcatggagctccacagatccatttttagggaagggattttggctcaaaacgatctgaccacctctgccctgtccaccaggataagtgacacctaggacccaggaaataaatgccgatgatttgtgtgactggtttaagattatttctccttaaccttgcaaaaacaggggttgggccttattttccccaagtccacaattagccggacttgccccaggcttctagaacatacgattctgagaagatgctggcgttctgcagaggccagcaccctccaaggccagtgtctgatgagccctcttccatctcatctgctctcaccccaactgccagcttcaggaacccaaaaggaagctttactccttaaaacctagagttaggaggggctgagagttcagggaatgtttgagcaacaaccagagaagccttatttcttctggaaggaggacagcctctggacccctcttggcccacagcattgggatctctggcctggcattcacagccacccttaggctcaggccctgctgctgagcaggctgacccagctccctccatgctcatcctgcccacatcggcccgcccaagaccaccaaattacatgccacctgctgcatgccaccagccatgggcttctttattgagcaccagattttcagtacaagttgccacagaaggagggtttcagattcaaccatgcccatgtgcaagggcgctggtccctggccagggcacataatcagagaagtgacgcggccatgccgaggtatacgtgtgtgcagaaatggacacatagggttcaggagcatcagtaactgactattgagatcatggtcttcttggaaggaataaatgtaaaaatgttgctcagccccacagagttggggtgactccacagggtgaaggcttggaggagtggcgtcttcagaggttctgccctgctcgttggttcagagaagcaaaaagatcaggcaacttgtagtacccaggatgttgtaaaaatcatagaacaccagaaccagaaaggaactccttcctatgatggcaagaagatgccttgccaagaccacataggaagaaaggagcagaacaggcctgggcccctctccctgcccttggctttgggcagccatggaggtgtccccaactgcccagacctttgggactgggcttcagaaagtctccccttagaacagcctctcaagaacttttatagaaaacaaaccgatctaatgagacgctgctcccagccagggcccagaaaccagggagtcatcacacattcatggcgctgcccaagaatggaagggcatcttgctagaagtcccacagaaagccacactggggccaggacagggcaactgcccagaagcccagacaggaacctacctgcagaggctgaaggtggcatcccataggctttatagagcaggtcgagaagctccctcttttcatcttctgggaggaaactagatttggccgcattgatgttctggaaaggccagaatggcagacaacatggaaccagagaacaaagaaggcagctcttagcaatgtagtgatagtccatcctcttcactcaacatgggcagatacgcttagagggggaaggatttgtccactgtcacacggcagcaagtgccagagtagagaccatgaggtcgtgttcttaatttgtcattacatgaaaaagggctgtgagaaggaagttggagaaacctttgagagacagggtggcatgtagggggccagagacacctcgcagacacgtgcaggaatggacttattcagcctgggatttaagaacaacctgaagagagtgtgcaagacttcatagctgctgcacacacctttctggggagagggttgacagctttcactggattctttaaaggcactcaacccaagcaaaggatcaaaaacctggtcctaggtcaggacgtcaacacaaagatgtcttctctgtggaaagtgtctaggttgggcttgtcttggactgttgaggcagactcactccctctctccaaagattccaggccccggactggacctgtagataccatactcccaaacccgagtcaaggccagtatggctcacacccactcaccagccttttaaactcctcttcagtaaagcccatgtcccgtttggtcatctggtaatcagtgtccagggtggacttgaagatgagcgggtcatctgtgttgagcgagtagttagcctggtcatttttgagcctgcagaagagggaggaggagagaatcagcctccttttactcttacataaatagtcagaacacattgacgttcacccgcctttgatcctcacagcagcctcaaacagatctgaaagatctgatccttgtgcagagggggaaataaattcagaacttaggtgacttgttcaagtctatgtaaccagaaagtccagaatccagcccatcctgaagaccagagctgggcaaaggcagcagaggggccagacatgggaaccaggcagaatggcagccggtgggggcgtgggggtgggagccaagaaagcaacatccccctccggctgccaccctctccagccttcccctctgcaccctaccctgcttgttcctcagtcccactgggagctggctactccaacataccatggaagctgttcttggcacgatccctgaccaccatcttgttgtatctaatggatctttcctagctctgaccataatcgacttgcatagcagaatttcacactgttgactgtttcttgaaaccttttccctggatttctgtgacaccacacttttgactttcctcctacttgtctcttttgctggtcccttaaataccattgtccttctgggttctatcctaggcccttcttgctccaccacctcctggggccactgcttctccttcagccaccatatctgtgcagatgactcctggatctttttccagcccatggtatacccacatgcctccaagaacctccacaggtgccacgtgtccctaaggcaagccccaagacccccttgtcatcagaacatcagagccgaagcccctccccttctcatatgcctggcagatggataagtgctggcctgaccatggtcaccctgagttcttgctgtccttgtcttggggaaggcggctttttcctaaggcctgatactgctcctgtggcttggcgacaggacggaaggagggccttgaccctggttagactccaggatgggagccaggcagggtggaacagaccctccggtggaaagcttcaagatggcgctcaggggaatgcccaggggtcccaagggccaggtgtcaggaagagagaacatgctggccagagggactcctgcttcctatgcgatgcccagggggcagagttgggagaattggaagtgtggaagcttccctcagagtaatggagcgttctgctccagctgatgagctgtagggccccagctctgctggttagcagctgggtaatcccagtcaagccacagcacatctgggcctcggattcctcatttgtaagatgaggacggcaatgcctgcttcccagggtgtcgaagagatttcatatctaaaagacgcggcatgggctgatgcccaatccctaaagtttcttccctctttggccttcctggaacaaaattgaacaggcccaggggaacagagctcaccgaatgactgcatgctccgtgtccggcttccaggcaccagtgaggtagctggaccaggggcagatctggaagagcaggtgtgtggctggcagggatggccccaggccatgctgattcctccccccatgtctgggcctggggccacccctcgagttcctgggacccgccctgctttctgcctctctatacaggaagttgggacagccggggatggttcctccccactccctggcccgcttacctcgaagtgcatgttttcctgccgcagcctgttataaagggcctggtcttccagggtgtggtagccgtgtcccagccgctctgtcttgagtatgtccacagcctgtagagaagcagaatagagccaagtatgggaggaggcagtgaggagggaccccatggccagcccaggccctcacctcttttactacttcggccgagcccacctccccggcgtggacagtacggtgaatgccgctcttcacagcctcctggaagggggagagccaggtcatgggtgccctagcgggagggccccggcaggccctgccttgaccatgctgtggagattgaaccatcctagtcatgctgcctgcttcaacagcatggggaaacctggtcttttaccctccaagtccttatctaagtggtagctgtcactcattagccagttaccatgtgtcaggtagtatatgaagtgacttgtatacattatctaatattcacaactattatcccacccattttatgatgaaggactgaagctcaggagattcaagtaatgtgaccaaggtcagacaggaagtgtggaaccaagctctgagcccgggcagtgggactccagagccctgacttctccaccatgctgcaccctccacaggaggcccattcatcatcacgctggaagcgacttttgagatgtcggctccaactcagtcatcccaatagaagaaacagaggcccagagaagacacagtgttgcccaggttcacacagcaaatcacagccagaagcaggctcagcacaggactcccaacaccaagtggaggcttttctttctctctcccttccttccttctttccttccttcctccctccctcccttcctctttttccttccttcctctctttctttctctttcttttctctttcttctttcttccttttttttttttttgagacagggtctccctctgtcacccaggctggagtgcagtcgcattatcacagctcactgcagctttgacttcctggactcaagcaattctcccacctcagcctcccaagtagctgggactacaggcatgcaccaccatgcctgactacttttttttgtatttgcagagatggatctcactatgttgccctggctggtctcaaactcctaggctcaagcaatcctcctgcctcgcctcccaaagtgctgggatcacaggcatgaaccaccacgcctggcccagggggattccagttccaagccttaagacccaacaaagacacacttcagaactcaggagacaccatggtccctggttcttgtgatttctcccaactatgggtgggagacaagctcacccagggccagcctctccattccttctcacaggacccacctggtaggcctggacatgtccaggcaagaggctgcttcctgggatggtctcatctccagccaggtcaatggctaccacggtctgctgctggtacttcttacacagctccaccaccttgggggaccagtctgtgggcgagatgcccacccaggctctgtcaccagcaccatggagagacctcccagcctacctgcctgctgtcccacccaaaccccccatgggaggccagcacaaaacagggctcagtgtcttcaaatcctaactgctatgtcctaaccacatggcctgcggaaaactgctctgcttatggcctcagtttccgcccttttcagaaagaaccctgccagctattgcacagggtcacggccaggctttgccgaggccatgtgtgtaaagcaccaaggacggggcctgagctcagtaaatgacacggacccttctctcacctggtgtttccaacaacactcatggtaggcttattcccatgcgcagatgaggaaacggaggaccgtttaacacgtcatctaaaatagaactcacactagtattgggaagtatctcgctaatgtattaggtactcttaaccaataaagttattctgaagtgtttaagaaagaatgaatgaacacaggctttggaactagatgtccccggatacaaatccagggtttgtgccttgcaagaggctgcacctcactccacctcagtttcctcatctgtcaaatgggactaagcaatggtagttctgctttgcaggctgctgcgaggattagaggaaatgcgtgcaggtagctctttggttcttactaatcctgagggtagaggaatgaagtaagtgtgatcatctccttgtgacagtgcacaactgaggtgtcttggtgcataaccagagcagcagtgtgacctgcccaatatcacacagtgaggctgtgcaccatgaggcacaaactctagagatctgatctgcgtcagtgacaagggagacccctcagaaatcttggaaatcagacctattcaggcccagacaggatggggcctggtccactgggtctcgagggaggactatgggctgatcagaatctagcctagatttttttttcaatagttacgttcctatttggtgttgagcttcctgcagggtggctataaaggcatggtgtccctggggagaacatctccagaagttctgagcctgcctaggaggtctccagttgtttcatgaagccccaagttcatgccagtgggctcaaggggacaccatggggctgtggggcacaggggagatcaggtacagccccactgctaggccaggaggtcagggccagggtgagacgggcggccctgggcagggcggtgatcctactcactgggctggtggcgcatgcagcacaggatggaccgggccttgaccccgaagtctcgctccccctcctgcaggccctggcccactagggccaccacctcgtctggggtgaggtcccctctgtgtgaggagaggagtagggatgggcctgaggcaaaaggaaggcctaaagggcagctctgggactgggacagaggaggaagaggaggctttggggaggaccctcctcccccactgacccactgcctcagaggaaagactggcagagatgcccccaggccctagcatgtccctctagctcttaaagcagctgggtgctcctagatcttagtgggaggtgtggggtgtcaacatggccctccccacccccagatggacagcattgctaagcttgggcctgccatgatgttcacattctatatgtatcagaatcatggctcagaaaatggggcagggtggttttgtgataccacttagagatccatgggggcccaggcagggggctagaaatgggccagactcacttcagttatgaagttagagcaggacctttagggcctttagagatctgatcagcatcagtgacaagggagacccctcagaaatcctgggtggctaagcaggttaacattcctggacagcaggcctgtggccagagcaagacacagccaaacacttgtgcccaaggtaagaacataacggcaaagggaggatgggaaccacgtctcttgtgacagagttaaacccatctttctgaggccatggaccagactgggggcaagaacaaggtcttgcttgggtcagggattcccagcagttcgcccttccagtctcagagctgagcctcccagccacaccctcagcatggccccttccaggcccatcactcactcagcctggttccaggggattggctccactttggagttggccagcaggtgcggactgtaccgcacctccacatacaccacgccctctttggccttcatctctacaaactcataggcgatccttttgatagcctcccggcagcccctgggaagggaagaaaggggttgggaacaaccttccccaagtcccttgggagctccaggagcaaatgacatccccaacccttggcagattaaacccacttcatcccccagacccaagctctgggcatccactggataagatcccagacactgggcaagtcctatcagctctactttggaactgcataccagttctcacccctccatcctggcctgaatcacgccatctctaactggcctccctgtctccatgcttgcccctgtcatcctgttctccacccagcagttggggcaatcttttaagaaggtaaatcaaagcatatcacttctcccctcgaagccccagtagcttcctgccacggagagtgacatcgcaactcccaggtcctgcccacaaggcctgcatcctccaggccttgccagcctccccagcaccttccttctccctcattccctgaggccaccggagaagacacaggcctgctcttccccgatactgtcctacactgcgtctctcccgctcccctggtttagagccagctgaagcttcacctcctcagagaggccttccctgaccaccttatcttttttttttttttttgagacagaatcttgctctgtcgcccaggctggagtgcagtggcgccatctcagctcactgcagcctctgcctcctgggttcaagtgattcgtctgcctcagcctcccaagtagctgggattacaggcgcatgccaccacgcccggctaattttttgtatttttagtagagacagcgtttcgctgtgttagccaggatggtctcgatctcctgacctcatgatccgcccacctcagcctcccaaagtgctggggatacaggcgtgagccactgtacctggcccagaccgccttatcttaaaacggcccctccaccattctcctgggctttctttttctcccaggtccttatcactactcaacattgtgtgtcatatggcttatcagccagtttgctgtattccctactagaatgcagtctccatgtggcaaggacccctctgtcttgggatggctgcgacctctcagctgaggaccatgcctaggacagagtagcccaatatttgttggtgatggagttaaggctggcagggaagagaaatgagagaaaaggacacagctggacaagtccagagggatgcctggatgtgggagacacgtgggatacagtcatggacttggatccttgtgcccacacttatctgctgtgtgacccctggttagtcaccctctgacacctaggtcaaggagttattgcggggacaaatgagtcaaacttcataaaccccacccgggtcagtgcttggagcagagcggacaaatgctcaaaacattttcgttgttattactgcatgtttgttccagaagcaaggcacaaattggcctgccagggccactgtgttgatcacgtaacggtggactgtgcttagctggaagttcccaccatgaagagtgaaaatgaagtggttactagaatgtgtgagggaaggcacacaagtgctgggagagcccagcgtgggaagaaagtgccctgcccaggggagatcaggccactctcaggagaaggggtcaccagaagttcttgcatcttcaggatgaggatggaggccaggcgcagtggctcacgcctgtaatcccagcattttgggaggccgaggcgggcagatcacctgaggtcaggaattcgagaccagcctggcaaacatagtaaaaccccatctctactaaaaatacaaaaccattagttgggtgtgatggtgggtgcctgtgatcccagctacttgggaggctaaagcaggagaatcccttaaactgggaggtggaggttgcagtgagctgagatcgcaccactgcacttcagcctgggcaacagagtgagactctgtctcaataaataaataaataaataaataaataaataaataaagcagtcatggaaatttctctctagtactcgcccataccccttctgggccttttcggtacctagtgctgttccctggcgactcaagacaagaaaaagaaaaagccttttggagaatcttccccacatctccccgcccccaccctatattcaggcctctcctcccctcacaacacgaagccctgaactaggagatagatggcccgggttcaagccctgcactgcctctgaccctgtgttcttagctcccatattctgccatttctctgtagaacttgaagcaatttcagtccatcacacccacatctcagaagggaaaactgaggcctaaaggcactggagagactcactaagtgtacacaatggtgagaaagacagctgtggtttcagagcaacttctctggcccccacaggctgagggacaggcctggtcctagtcatagggatcaatgctgccctaggacctgtgggttgggggca

SEQ ID NO: 757 - DNA, 1332 bp, Homo sapiens
aagagacagagaggagggtaaagtgagaatcctgcccgcaccacaggtctggactgctaaccttgaatcctggtttcttaaattctgcctccgcttctgactgaggaccactggattttgaggaaactttggtcttaattcccgtactgattagtcaacagtggaaaatctgaagagatgcaagcaggaaaaagaaattaaaccagtaagatagagactgccactctctgggaaccttgctgtgtagctgagcctcagcaagtttgataatacagacacagcaggaggcctggggaggacccagcatgcccggccaccaagcagtgatgcagctggactgttccgcagctttccagagacctccatggaagcacagacttccatgggttgaagagagtttgtgtcacaattccagtccctagccctggccctgtgtgaagtagtaacaccgccctgccagtaggatatagctgctgaggaggcctgaggagcgatgcgacaggcatgatggaggtcgagtcctcctactcggacttcatctcctgtgaccggacaggccgtcggaatgcggtccctaaggacaggtggagggaagcgccccagacaaggaagctggcaaccagccccagagcagcgatgggaccacctcgtcttgaatctgaccttgtccaagaaggctggacgagagaccttctgtcccctcccagagggggaaccctggcactggcccagcagcctcttctctgagctccatgtcccagataaaccaggccagactgagaaggctccccagaggcctctgtggcctccactccgggaaagccctctgcccacacccacaggcttcacattcccaccaccttcgcaccgtgcccaggtacactttcaagacactgtaaccacaagatgttatttattgagctggcgccgggacttgggcggggcctgccctacagtgagcagcccacacaggaacgctcctctcgcgagcggcccgggcagggaccctgtcccaacaccaacacctcctctccagcccaatcttctgggtccagacctgcttgtcccttttttagaaaacacttttaaactttttaaaaattttaaaccttttttcagcagatatggagagagctgacaatcaattcacattttttaagccattttagctaaactgtcattgtgcatctctgaggttccctcatggagctccacagatccatttttagggaagggattttggctcaaaacgatctgaccacctctgccctgtccaccaggataagtgacacctaggacccaggaaataaatgccgatgatttgtgtgactg

SEQ ID NO: 758 - protein, 190 aa, Homo sapiens [sequence omitted]

SEQ ID NO: 759 - DNA, 1400 bp, Homo sapiens
gttgcggccccaacgctccgggcctggcgtcgacacgtcgcagggggcgaggggctgagccgccggggatcccggggagggaggctgcggcccgatctttgtccctcagccgcgccggggacggcgcccccgacgccctttgaccccgccccgcgttcagggagagtccgttttcggctgtttattatatttgtagccattggtcgacctcattcgaaagtttcttaaaaaaaaaatcccttcttgtttgggggccagaaaataactcaaaactgtgcagaaaatttatttgtgtgtgtgactcttctggggccagagaggattgacttctttgtgcgtcagttttatcgtctgcaaaatgggaatcatggtagcacctgtctgatgacgttattacaagaattcccgtactgattagtcaacagtggaaaatctgaagagatgcaagcaggaaaaagaaattaaaccaggcctgaggagcgatgcgacaggcatgatggaggtcgagtcctcctactcggacttcatctcctgtgaccggacaggccgtcggaatgcggtccctgacatccagggagactcagaggctgtgagcgtgaggaagctggctggagacatgggcgagctggcactcgagggggcagaaggacaggtggagggaagcgccccagacaaggaagctggcaaccagccccagagcagcgatgggaccacctcgtcttgaatctgaccttgtccaagaaggctggacgagagaccttctgtcccctcccagagggggaaccctggcactggcccagcagcctcttctctgagctccatgtcccagataaaccaggccagactgagaaggctccccagaggcctctgtggcctccactccgggaaagccctctgcccacacccacaggcttcacattcccaccaccttcgcaccgtgcccaggtacactttcaagacactgtaaccacaagatgttatttattgagctggcgccgggacttgggcggggcctgccctacagtgagcagcccacacaggaacgctcctctcgcgagcggcccgggcagggaccctgtcccaacaccaacacctcctctccagcccaatcttctgggtccagacctgcttgtcccttttttagaaaacacttttaaactttttaaaaattttaaaccttttttcagcagatatggagagagctgacaatcaattcacattttttaagccattttagctaaactgtcattgtgcatctctgaggttccctcatggagctccacagatccatttttagggaagggattttggctcaaaacgatctgaccacctctgccctgtccaccaggataagtgacacctaggacccaggaaataaatgccgatgatttgtgtgactg

SEQ ID NO: 760 - protein, 76 aa, Homo sapiens
MMEVESSYSDFISCDRTGRRNAVPDIQGDSEAVSVRKLAGDMGELALEGAEGQVEGSAPDKEAGNQPQSSDGTTSS

SEQ ID NO: 761 - DNA, 21500 bp, Mus musculus
  misc_feature (1)...(21500): n = A,T,C or G
actaggtggtgctgtaggatgacccttgaataacagacgaccagtaggcagtccaattctcttggttggaaacgtgcagaaatgggaaactacaggctctctactaggtgccttcccacctctgcctctcttcctacctgatcactgtgcctccagaccctctccctctctctcatcatcttcccttcacttttcactcgcatctctgctctccaccacaagaaaattggccaagatggctcaggcacttccttaatcctctaattttcccactccctgcttcaaagactgggtcagagaggctgagtctctctgagctcttgatctgagctccctgaataagctctgctctctctccactccatacaaggtttcctcccattatctgatacttctgtcctcagtcttcacccagaaatcgacaaatttaaaatagcaatcgggctcctgctctgacctgaaagattccattcgatgtctctgtctacccagtgagaagtgtgagcccactctctcccacgaggtctcaggactgtagactccttgtgttctgctggtgttggcactgcttggactcagaacatcattgtaatgcaccaagcatcagattggcactgtttgaaattcttgaagtacttgtgtttgaagtgacctggcatctcctgactcctccttgcattctaaacaggcaaagagagagatgttgtcctggagctcagagagacctgagccaagccacactctgtcacttactagaatcaagtgaccttgacctctctgaaaatcaatgtctcttgactctctgcataaagaatagttgaactaaggatgctaaggatgaagggaaggctgttcgttacttacttgaggctcccattccataactaaatgaagccaatgcaattgtcttagaacaaaaagagatcatacgtgcatccaacatccacatcctacaaatatgtaaagtggggcctaaaaagggaaaaataactttgtccatgcctcatggtccttggttacctagggagtaggcagatcagggtcatcacatgattttaagtggtttcttctgtacctgctatgttctccatctccaccatcagagaggaaaagagaaagacccaaggtcagagttgcagccaggcacagatcagccaaggtggaacctggacactaagggccagtatgtgctgggtcgaactaatggaagtgtgcctacctctgagccagttggatcacatctgagtcaaggtgtttccatctgggacaattgtgtgggtgcgcttggaagctagagatatctctgagaatggccaggttggtgcaggacaagagaagatgacgaagccaggatatgctacagagtccatcggtctgctggaatgcaccaggtcacaatgcagagaagccactcttaagttagaccagacagcagaatataaggaagagacatagccttgcctgtctaggagaggatagtatgaaatataaacgggacatctcaaaacctgatataataggttcatgtcccagacatagagtcagtggatagagaatcagagagagggcctgagagacacagcactaagtgagtattagaagtcgctgagtggcagagagggtgttatggtctggctggggaactgctaaagccaaagcaggaagacttacaagttctagatgctcccattgcccatcactgaaatggacgttcatacatatatagcaagcggcagaggtagaaaggaatggaccccaagcctatctcatctcagaccttagccttatacatataaattaagccactggaaccttcaagccagtttagtcatgcccatacagacttctacagagagggacatggaggacagagggccttgtttgccttttaggaaatgctggttgagcacagcaatagggagtcaaagaggatataaagacttgcacaggaggaaggtgactactgacactttaaagagaggagggcagaagggccctagtatgaaggcagaggaccaaaatatgtttgggaaggtgtaaccatgcccactggtggctgaattgggccacacggggagaagtgggggaaagcatgcacagatgccaaggccacgtgattggctgaatgtagaggatgtctccatgaaagagaaagtgtggatcgcatcatgactcccagatgtccagattagacagctggggaagtggcagtctttctcagcacagggaacaggacatcaaagtaggcctggaaagtgaagcccatgcaagtcctgaacagatggcagatgtcccagggagcttgtcatgagtgtggcaacaaaaaatggcttggctgcttggagcctaggctcgcagggcagtcaagtgacctgtggtccacagtttatcctgctccacctggcctccccatcagtgaagcccttataggtgtgaacagctggaaaaccatcctggccacactgagaactatcaaggagccactagatggcatgaactgtctaagggacacagggtgccaacctcagaaagagccttgagtgagaaaaaacaagggacagtagtgaatttatctggggcattgtgcttgcaggcagctcccagaggtggtctgagagtcctcaaagtatcccataaccacttggcgtagccctttgactcccatttcccatagaggatggtaatactatgtctatgttacacttgtgtctccatgggacagactctactcagtggtttatcccccagcctcaccatgacagcacatgactgaggaaactgagtctcagctaaagcacagcaggctaagataaggccctagacctgctgcgctgttgtgcttcaaccactgtgctgtttggttcacaggtacatgagggagcccagcccagagcagcccagccttaggcagaaacacatgctcacactctgcagccagtcttggattggattaacatttgaagttcagaggaacaggggacacagaagacaacttggactaggatccaagactccacccaggacccccttagaagcagctgcagttaatctagaggattgctacttcctacagaaacctaccctgacttctccagtaagcaacagacttctgatgtcagtaggggcagcactctactctcaaagatattctccagtgtctgatacacacccacaaagcatcaaagcagcagcagcagcaaccataatgaagctcacagtagactcattccacttctaagtccattcaccaatggactttaccaactccgttcataagctccttgatcctttggaagtctacgcactgactgcggatgttagcttcagtccttctgccctctcttctctctctacagccagttagcaaggaggcggggcttcagagaatgcagtacttatttcacaaatgaactcctgagaaggaaggtcatgtgaatatcccatggtccacagagctcttcaaactgagactggaaacatgttgtctgtgcctctcttttcacatggctgagcagtgcacagcccaaagctgtgcaaatatgagcggcattcaccgaactgttctgtgagcagaggactggagtctggaagctcagaccatagtttctagtccccaagtcaacatatggcaagttaactattaacctaaaagcaatcttcctgtcaagtctgagtctctcctctgggtaggaggattcgcactcagggtttttaagttctgacagcctgaatccacattctgaacccagagcctggtatcccattggcaggctgacatggcaacttatggattcacacaaccttgagactggccccaaccataccgtttaccagctaacttagcctactcagtgtatgatcctctctgagcttaagcatctttctccgtgagtgaaatagtcacatctttccctaagcctgacggtaggcatcaaatacccacagtgcacctctgccctgcctgccagtggcctagaagagctggaccaacacacggcaagcacgggagcaccaaaaagaggtactggtcataccaggaagatgatacaagcaaaacaaattatggggtatttctgggtccctaaataatggtgagaggaactgagaacttctccctcgggaggggatgcacagaggattacaaatctttttttctttggggaagttttaggactttattgttgtatgttctgtataataaattgaatctcttagaatgtagaatttgataagcatgagtgtgcacctgcaaaaccaacaacacactcaacataataaacataaccattgccccgcccccaaagaaatcccctggcaatccatctcccatgccctcccaggacttccagccatgcagctgctgactggcttcctgtctttgaagattacggtgctttgaatcttccagcatggtagataaatgtagctgcatggtgactctgacactcggtgtgattactcaataattgcctacataaactcttcttttaatgagtataattacttgccactcctaacagtggtcaccacaacgtttccctaaagtcaaggcctgggtcccatgcaggaaaccagacaaacgggaaaggaaaggtctgggtgggcctggggtgtttcaccaaggaaaaggaacacaggtcgctctgggttttcttttggaaccaaaactaagaactgcagacccaaaagaggaactatcaaatcaaagcctttctggcttaacttaccggtggaactagttagctctccactcccttaggttagcccgtcccacagtgagggggctttgctttcctttttgacagatcaggagattaaagctcaaggatttgggagttcaggttctcacagctaacaattgtctatgctgggaactggatccatgttctctttcctactattctgttcccagccctgatactatcaaatgtgtccagagagtgaccgttcaggacaagagctgttgccatagccttttcttcttctttgccttcattagttatttttttccattgtcattcacacttaggtcagactttaaaggaaagagggaaagtggatgtcatatgagaagacaaaagaaaagtggagcccagaggaaaatcccaaagagaagtgaaattcaaagatacttgtcattaacacacacacacacaggcacacggacttatacacacacacacacacacacactcacacagccatacacactcacaggggcatacagacactcacaaatacatgagaacatacacacacccacaaggggacacgcatgcacatgggcacacatatgcacatggacacacactcacaaagatacatatactcacacaggcacacatacactcacagggacatacacacactcacaaacacacaagaacatatagacatacacataggcgcacacacacactcacatgggcacacacatataggggggaatccggatcccaggacccctggagtcacaggtatctgattcaagacctagagccaccacgtcttgtccttgtgcaggtcacttctttccctctgcctctgtggcccatccaatgactagtactgacaggcaagtcacaagactatgaggactgaaggttgggctgggtcacaggagctcagcacagcatctgacacatggtaagcacaagccaccaattacgatgattactaattctcccacaagggtttcctgctctccataccttttgttctataaataagacaatgaaactataggcatactctttagtggacataagcatgacaaatgggagaaacagagaccctcaggggaaccatccagaaggagtacatagctgagcactgtaggttgtttctgctgaatagctgagactacggtagaaagcaggatgaataagaaacacagcccagtggttaggtacaaagagaaacacaaacggaagcctaagagatctgagagcagacagggcaccagaaaccattgttttttaggtgattgttagagataaactcttcatgcacagtttaccactgacaggttgcttcttctgcagcaaatttacttatccaataacttgacagaaattgaagtttgaatttggcaagtgaaacacccaggctagactctggatcctgcattgacaaccgatcttcatagccaatcttccaggagccagaagccaaacgagtctggtcttacaagacattgatttccctctaagcccaccaaagccttctagctttgtagctctaggtagggtccaatctttcacccaccttataggctcccactgggaaatggccgaatctcttagaaccttcccttgcagggaagcaggctttcagagtttctgatacttgcataaagagaactgtcttagcagaaagggccagggaagagtctttcacacaccagagcccctctgaacatcagagctcagaagttcatttcaatgagtccctctgtggagtatccgtgtaggcggttctgacagggggcctgcagaactgtactagtgaaggcttggagcttttgcaaggtttgcaagccaatctggaccccctaaaacactcctatccccaacctaagccaagaacttcctatacaaattatttccgaggcaaagggcatatcctgctctaccatgcacccccacggtgagatcgtgggccagctggtggtgttaagatctgtgaaagggcttttgtaaggagcctgctctcccaagggcaactgtgtgtccctccgccctctctgtccagagccctggggaaaggaagtcagaaaggctagaagccagtcctgcagttctgttgttctgcagttccccccaacccccaccccgtggggggcaaagacagcagtgagtttctgctacactgaggccaggccctcacctgctgtattgtcctgggaaaccgagtctgtgctgggtaagagagaggtggggctcaggagtactgaaggaaacggggatgcagaagcagaaggcaggagtggggggactggggtctgcagattctgtctggcagcatcttaataatagcaacacatctccctcggggctggctcgcgctcgggcctgggatggtattgatcagttcatcctgcctacttcattatgttggcaagaacctctcaagcgctcctcaacttctaccctctcccctgtctcccgacccaggcagtacccagctgagctctgcgcggagttttgtttggtaagctaggttttgtcaaagaatggggtgttttctttgcggtgggggtccgggacacagggatctaacccagtggccagctcggcggcggcggcgagcgacacacctcgctagctctgccccagccggcccctttaattcgagttcgctgcggggccaggtgcggcgctgcgtggcgcggtgcggcgcggtgcggctgcgggcggcggccgggcgnnnnnnnnnnnnnnnnnnnnnnnnnnnnnnnnnnnnnnnnnnnnnnnnnnnnnnnnnnnnnnnnnnnnnnnnnnnnnnnnnnnnnnnnnnnnnnnnnnnnnnnnnnnnnnnnnnnnnnnnnnnnnnnnnnnnnnnnnnnnnncaccaccgccaccgcccgctgtccgggttctgcctgtgctggctgccacccaggaacatggaggctctggtacccatctgcaagggtaaatcagtgtccggcattctgctgcgcatgctgccatccctgaccggctgcagcgcccataggggctgcagggtaccacggtagtctgggtgggcgaggtggtgccgacccttgatgtcggcctgaagggctgtggatccgcaccggctgcgtgggacttaagggggagacttgttcctgcagaagagtgcatggaatgggctcggggaccctgtggtctgtgcgtgacatagggcggagggcgcagattggagctggcgggtgatgggaagtgcagctgactgcatagccaccgctggtaaatagtgggtgggtaggacccgagtcacttgggtcctcctggttgcatttgcctctcggcaacggagtaaaatgggcttctctgcagtctcttgttttttccacttggccggggtggtgggctgccgtgaagctctccagcctaaaaggaagctagatctggagcagctgcctggcgacgcctgctctgcaccctcagagttcgggctcctgtgtttcaggtggagatggagtcttggtggtccctcggctggacctcgcaggcaccagctaggctgccctccggcccgcagcgggagcccaccgcactgcgcaggaaggggttaaggtggcacactctagcggtccggcggctgtgggctccggtcagcccagcggattccggcgggagcgcgcccggcggaatcccggctggaaccccgggcgatgggagagggcccagacccctccccggctctggggccagcgggattgggtcggcggggggccagcccggaagccagctttctctaggctccccctctatgtgaagccaatccgccccgcagtcaggcagcttgagcgtttgttctgtgcttccctgccgagatgtgagggattttctcttgggaagaaatcggtggtcgagtgcttgcccagctcaaatgccacccaacccagagcaaggcctgaggcccagggatcctggagggagagtaagttcaagcgaccccttctattaggcattctacagaggcaatcttgctgcttgtgggacctctctagctgggaaggagtgtgtgttgtggaggaaggattgcttctttaccaggacatggctaaggtcagagaggaaaaccctccctcttgggagatatgtcttctgacaccaagaaagctgggtcgcttctgttggcaactgaggtctagggagaaagtgcttcaagctgatgggaagggaaagcttatggttatccaggagaggttaggaaaaggctcctgtggtggatctcattcacaagtgtcatggaaagtagatgtgggggcttgtcacttgccctgaggggatctgccagagcccttaaaagtcttggtctcagctgcctggaagccttggtcccaccttgctgctgtgttttccaggcaacgtcacacctccggaggacagccaggaggactcaggcttttgctgagctgtgcatcttgcctccttccttccaaaggcttcagacccaagctccactctcctcctcaagtcgtggtgcgcgcccctggccaagcatctcactgtccctcgagccccatccagtcctagagcacacctccaggacctgccctcctgctcagaatgactcaccattatttccagctcaagtgagaagatgtgacggggactgagctgcctatttgtgtatctgtgccatcagatctgctcttcgaagaagagtacctcaggctcctgcctggccaggtaaatcaaacaatcacttagtagcagtcatatagaggcaatgggggtggcatcagtgaccaaggcccaggtcccaaacaccctaccatgaatacctcctttggtgcaggtattgccaaaacattagcacagtgcctggcagagggctcccttctccactcctcctgtgcagctatgtccccagcatgtgtgtggtacccaagatcctgtctcagccgcctgcccctagcgcaggccattctatagcttccttgaaagattgtttgttccctgaaccctactgacccctagacaagtgacaaggtgataatagttttagtggcagaagtgatggtacagtcatgtttctgaactcttggggacatcaagtgcacctcctgtcaggttgccaatgactggtgatctcatgtccttacctgcctctgtctttcagccgagtggggctgtgtctccaactcacaaagggctctggggctttcctgcagaagctcagacttatgcttctgtgtttcctggggccgttatcagcaccgagttccctgctgcaggcagctggaaggcattaaagtaaagcacacttctcagccccaattatgacagtggctaccggagacccagtggacgaggctgctgccctccctgggcacccacaagacacctatgacccagaggcagaccatgaatgctgtgagagagtggtcatcaacatctcaggcctgcggttcgaaactcagctaaagaccttagcccagttcccagagaccctcttaggggaccccaagaaacggatgaggtacttcgatcccctccgaaatgagtacttttttgatcgcaaccgccctagctttgatgccattttgtactactatcagtctgggggcaggttgaggcgacctgtgaacgtgcccttagatatcttctcggaagaaatccggttttatgagctaggagaagaagcaatggagatgtttcgggaggatgaaggctacatcaaggaagaagagcgtcctctgcctgaaaatgagtttcagagacaggtgtggcttctctttgaataccctgagagctcagggcctgccaggattatagccattgtatctgtgatggtcattctgatctccatcgtcagcttctgtctggaaaccttgcccatcttccgggatgagaatgaggacatgcatggtggcggggtgaccttccacacctattccaacagcaccatcgggtaccagcagtccacctccttcaccgaccctttcttcattgtagagactctctgcatcatctggttctcctttgagtttctggttagattctttgcctgtcccagcaaagctggcttcttcaccaacatcatgaacatcattgacattgtggctatcatcccttactttatcaccctggggacagagttagctgagaagccagaggatgcccagcaaggccagcaggccatgtcactggccattctccgtgtcatccggttggtaagagtctttaggattttcaagttgtccagacactccaaaggtctacagattctaggtcagaccctcaaagctagcatgagggaattgggcctcctgatattcttcctcttcattggggtcatcctcttctctagtgctgtctattttgcagaagctgatgagagagattcccagttccccagcatcccggatgctttctggtgggcagtcgtctccatgacaactgtaggctatggagacatggttccaactaccattggggggaagatagtgggttctctgtgtgcaattgcaggtgtgttaaccattgccttaccagtccctgtcatagtgtctaatttcaactacttctaccaccgggagacagagggagaggagcaggcccagtacttgcaagtgacaagctgtccaaagatcccgtcctcccctgacctaaagaaaagtagaagtgcctctaccataagtaagtctgattacatggagatacaggagggagttaacaacagcaatgaggactttagagaggagaacttaaaaacagccaactgtaccttggctaacacaaactatgtgaatattaccaaaatgttaactgatgtctgattgaagcctactaatgtactcacagctcaacaggactgatgcagatgttgcataatagcctgcattgtagtcagtgttctacagtgttctacagcatctggttctgcatggaaagcaatagttcgtgcaagtgacttttgatcttttgatttttgatttagaacacagaatatttatcatggctttcatgaaatcttcatcaccgacttacaggtttccaaagaggagagtcacccatggagccagcatctcagaaaggcacaatgcagccccctcacacccacacacaacctaccatagcaacactatcctatcttcctacctaaacatgagcacacctgggaggtgcattccctccaccccacccctaccaccctatttcagcccatctgccccttcacagaggaacataccattgtggcttagttctaaagtctggtgactactcaaaggtcattctcggttttgtgttgagaagaacacacagtcctgtgtgttggaactactttctgtgtcacaggctggggtttgtgaattgcagttgccaactagatgctccggaggcttatgtttcgtaacggaaaaatgctgcattctgctttttctctgcagtgtcgatgtgagggaagcccaggggggtgggggagggacagttaatatgaccaaatatgaattgccaagtttcacatttgttcccttaggcctatggggagaagctacctaattcagggacttctcagcttcagataccattttgcaagcttcagggtcaccgaatgtgtttgatttcttcttttactctggagtttgcaagacatctgctttcctggtggtgtggcccagctccactgacactgcagtggagtataccagtcatgcaatagaactgcatgggtgttcactgcatgaatctcaatatttaaaacacaggagataacctattttcctagtagccgatacagtattcctacttagagtattaatagccttgggatggtattgaacaggggtttttcacatcaaaaggcaaaagcccttcatcagggtaaaacaaatagactatttggaatggggaaccaaaacttctggctggccctctcagcccacctctggtctttcactgggaacacagaccctgccacaccaggagaataaacagaaaagtcagagtgtaaacactcacatgactgaactttggggattaatctagtcgtgggcatgactacacagcttaccagggtcctgaagacaggcaggtctgtgggttcaatgtatataaatatatatcagctctctctctctctctctctctctctctctctctctctctctctctctttctctctctcgtgttcctctagcaagctatagaaaaaattgcatttgaacattgtatatgcttatgcaatatcttgacacagggcaatttatgcatgtgtttgactatgtgcactagaatatatatatatatatatatatatatatatatatatatacatacacaagtgtgtgtatatacattatacatacacatatatatatatattcattctctggagttcagattcaggagcagatctattactcggtgggttggtggtgtaagaaacccaatgggtacagtaaacccactgggcctgggtttgctgtcattgcctcagacatgctccagtgttcatggattcctagatattagaattgtctttctgccctccatgtgctgcagcttcagtttcccacggctgaagcttgtcttactgagtgcacaagggtcctatagccctcacagctccagctatcctgggccaggcccacccaggcctcctccctagaatccatcccattaatcatctccattattatcctctgccccatttgattctctatcatttggttctacatccatcattttcatgaacctgtccataggcggatcctctgctttgaaaccaaggagtaaaactccttgggaccggattctgctaatctacacttaaaggaagcctcctattggtggaaatttcctaattccagaaccaagggatagattccctaaatgacccaaagcatcattttgattactaaactcagactctctctccctagcatactgataataagagctgccctttaaaaaaagaaagaaaggaaggaaggaaggaaggaaggaaggaaggaaggaaggaaggaagaaagaaagaagaaagaaagaaagaaagaaagaaagaaagaaagaaagaaagaaagaaagaaaagaaaagaaaagaaaagaaaagaaaagaaaagaaaagaaaagaaaagaaaagaaaaagaaggatgggtaaagaattaatcctcaccccaagaacaaataaagaatggatgagcactgtgcagccttgaagtagagagtgtgatgtgttgtccctaggaagagagtggggaaggcctttgcttccccatactgggtgtctttgccttttaacacagtggcttaaattctcacaaacacaatgaactgtggtcaggctgttcagtattgattccagtctaggtcttgctgttcactagatggtacctacagttgtctttggggagggggcaccagctcagggtgctagcccagggtgctcattagttcctggtcacccatatccccaggtgactgcagggcatcccatgccaggcacaaagcctctgtgcttctcttcttctcctttgtgggaggtggtgctgaatttcatgacatggggtggaagggacaaacttgggatagtagaaggttaaggcaaaccatacataaggtctagaccaagggaagttagttattcacaaaagccttggcctgggaaccataaaatgtccacacccatgcatgcacatgcatcataaaataaatgatagattattgtcacatacaaatataaaatacacagcacacatgcaaaatgcacaccagccaaaataatatgaggcataggcagaaaagatagacaaagcatgtatatgccgcataagcatgcaatgtgcataccaacatagaatagctgcaagagatatatttgccccgtgtgcaaatgcacagcatgcaactcagatgcaaaatatacaaatccaactgggggtcggggacaatggatatacatgcaagttacataagtgatgctttgttattgtttctgcacacaagctcagcttatatacacagtgcaccaaactatgctaggtacaccaaaacaaaaaacaaaaacaaaaaaaataaataaacaaacagtacccatgcccatgaatccacacaaaatgtaggcattgaatcatcattgactgcctctgcttccacatctaaaaattgataaatgaaggcaagggatcagatttaattgcttttccttgcccatatcaatatccctcaatattctccaaggagcctcttctttggcatccaacctcattcctgagacataactcctgaggtttcaagtggaaagatgtggcaccatatcgagcactggaacctctgggttttctacctttcgccttcctgcaagaatccctcagggtgaaagctgtgggaactgcaagagctggcaacctcttgtgggctcccttgctatcccttttctttcaaagaaaatctacactgaggacccgaactcctctccaagtgtctgggatctccagatttctccctattgtcttgaagcagtgatggtccaagaaactataggattctgaaccctgaatcaggttgaaatgccccgattttctttgagccaaaagatcttattaacactctttccaaagtagtgttgtctggatccaggtcagaaagttggatctatagacttagctcttaaaatgctttccttgctcgtggcatttcacttactcttaggcatgagtccaatgacgacaactcttgattcattcaatctagacttgttctccccttacttcccaacccaggctcccagggaactcaggcttcccattcaagtgttgtgccttgacaaaatcgcagaccagtttagctgaagtaaaatgtggtgggggacattaatctacggctagaggagcagttagcaatttttagagagcctggtatttgtcttctattctaacactaaatttaaatacttggcaatattacccaccattacagagcccaggggcttcatcctgctagtattaccagctggggcctctgcattttggcaaaggctttatacaaaatagaagttaaaagttgcatccagtcttggatcaagttttgtgggctctgcttctatatccctgagtatcttaaccctctgttcaggcctctatagaggaggcaatgagcagataatggacatgtggttcaaaacttgtacacttaacacactgagacttgagtttccaaagcaagatatcaatttccaccatagcttcatgaggcctctgtggcctcagacatttgtaaaagttgtagtttctgggaggttggacatgaaagagtccaggaaaagtagagaaactatcaggaagaaaagaaagatgcctctgtggcctcagacatttgtaaaagttgtagtttctgggaggttggacaggaaagagtccaggaaaagtagagaaattatcaggaagaaaaggcaacagagctgttgaatttcagagtaaatttatcaggagccaagttttcattgattaattaaaattaattcaggaacccaaatttaatttagttatggctctgtgcctttctagaacttcagtggtgtgttagagtcaagtcttagtgagaaaagtcagagcttctgaagatcctcaggcagggaattcaatgctacccatagtcgtgggaaggagttagaaacacatcttccccagagaaaaactatgggaagtacaaacaacatgtggaggccatgaggggagtgcagtcctctgacgtgttagcctaggatagagggtgacctcagagctcttcctcttccagtctgcatggggggaatgggatggctaaggcctgtgagggttctgatgtgtagggtactccaggttacacaatagaggttccttttgataaagtgttcatcatccaggttcgaactcatgcccttcactcattcacatcattagctacctgagtcaaccagcatgaggtgtatatgctgggagctgtcttggtagttatagtgaccattatttataccctcagacttggcccttattgagaccagcacacacacacacacacacacacacacacacacacacacaaagcagaaagcagggaaggagaggtaagggatcccttgcacactcctcagctaacctagtctacttttccctcctttctgctccccttttccctaaaactcagctccatctctcatagtttgtgtctaacgttcttaaagaggaaatgtgcaataaaagcaatagtgactgttttctttagcaatagctctttcaaaaatcttgctctcaggactgaaaagtgatagatgatacatacatcatcagatacgcccttgacctctggacatctgttcacggtttctgtacttcttcttcctacatggtcatatgaatgattcctgtctgctgaggtccgacctccctctggaatgaacatatacacagaggtgcagtgtgcactcaaggaaggcccacaagaaggctttcttttgacattctgtcttcttttttcatatacttttttcatgtacctctgtgtgtgtgtctgaacccctctcccactgccttgcctttctaccttttcttcagcagtaccctagaaacctttagggactgaaacctcacatctgagtgaccttatgccagcctgtcttgttgaatttgtgtctgtctgtcaggtgtaatggaagtctgtaggagagtgcttaccaatagataagaataaagcatcctgagccattacagaagatcttttccatgcactagaaaccattacttgattctttcacagccctctccagggaaatgaataccaaggaatgtagccatggggtgtacggatgggatcagttactcaggcagagttgggaatcgccctctgactctcattcacaataggctgacttgagcaactagagagactccatcagagcttcagagctttgggtagaggtgaacaggcacagaggcatgggtcgtcaagggatatcattagtgaaataagccccacctcccactacaggatgcacctgtgcaaaaatagtttttatatttcccagggttttggaaaggacccctttcttgaaacatctgtgaggtgagctattaacattcagactggacaggaaaggctggcaaccccaggagcccattccattccttctcaatctactttgctccacacacctttgcatagcctaacgttggaaaatctcaaggaggagggtgtcctggatgctttgcgatcctggttatttgaggagaaatgggaaaatgtgtggttcagcctttgtgattggaaagtaggattccctcttgccttagttaagtaaagcattgggaggtgacagaagaccttgcatggctcagagtcagccttctaaatctcagtgcttggtgcctggaaacagaggtgaagcagacaaaaaggacaggctgaatgatgctagctaaagtagatctggaagagggctaaagggcacggcgtggcatatcagatgctgctgctcctaccacttgccatttcctactaaatgtatagaaagacagtataattcttgtcaatcaaggttttagtccattggtcctgagttattagaggttttccatatatacatatacctgtgtatatatgtatggtatatgtatatatgtatgccattatttcaaaaatcatccacaaataggcggtgacaaatctcctcagtttcactaatgtggaatacatttgacattctaaggaatacgctgcatttacttgaattttaacatgaccttctttgcattcttttcacctccccagttctgctcttttccgcttaaaaacttgtctagcaggcatttattcaaacaaaagaacaggctcagggtcacctctttcccttccctgccagagggaaaggtcgattcttttcccttcctgcctcaaggatcaaagggaatcgagatcccagggccaggtgctttcttagcctttattctgtccgccttggttggctgtaacctaatctctaaagactagaagagttatgcccaactctgtagctctaggggagtgggacactcagagacttggctcagcactggtctatttagcttcctcttggtcagtgttagagtcctagggttggctttcatgaattctgaaatatcctccatgaaagggaggggggcggggatgggctttgtggcctttggtagaactaaatcacatgtagctgagtctgatcaaatgaaagaacagagggctgggcctagagcaactaaaacccacttgtgtctttggagatgagctgtagactgctgggtgggatcctaaatatgccctccattctgtcttgcctagcagtgttaaagtcatggggaaacacttttctaggcctcatcatctcctttattctgtgtgcactttacttagaagtgggtgggagggattcctcactagtatctgaagcagttgaggtgatacaggggtggctgtcatttcccccacattcccagaagctcgacaatctggtcaagtgagccatcatccagtagtagaagcctttaaccttgactgagcgtgaccagccactaagtgctgcggttgaagcagcctgtctctatggccatttctcgtcctgcatgagccctagcatggaaactaatctaacttcccgtgctcctcctcactcctaaaatagtcagatatgttccagctgagtgtgccgctgagaagcccttgcatcattctcctgacggatgcatagggcaggtgtgattacataatactgtggacagctgctgcagcagctacataattaaggggagtagagaagtggctgggtgataggaccttaggtagttacccagaggactatatgctgtgtctctgggtccttgggagaggcctccaggccctgcttctccttgaaaatgactccctagacgcggctgccttgtttgtcagactgcataaacactcggggatgcagagaaagaaaaggaggagcttaggggagatgctattcaggggcatgcttggctagcagacaactaccgtattagccattaatgtgactgagttctggacttacaaagtgtagagactctgacctgccaagtgaggctaaaaggagcacacgagttcaaggctaagacctggaatagaaaagcaagaggagaggcctggatggctttggcaagggtgagcctcagctcctgagagtttgaacatgctccgtgcttgccccagttctgccttcacgtgggagccggcgacccagtttccttttgttgtcgtgcttggatggtttcttcatttgaagggctccgggaagctggaaaggcccatgattgagctccagcctgctgagcaaacaatgccccagccaaattggcctcttcctgggtttctgcagccatgcacccctctctccactgagggtaatcttggaacagccaggacgaatggtgccagaaagcaaggaggattctcttgtttccattacagacagagctgtaaagctcataagtgagggctgttgtgtgcttatgtgcttattatataggctggagaacatatctatatataatatattgtatatattatatatgtgtgtataaatatatatgtttatatttatacacacactgtggaaatggccgctcacttaggctcatgcagcacagactaattaggatttcaccggcttctttgctgttcatgcatgactctgcatgactctgcagctgccttcccgtgtcctgtctctaaaaaaaaatcactgaaaactcaaagaggagcggaagatccataagcctctttgagatcaatagggaaaaaggaactccaaggcttatagcaaagcttcctaaggatgatgctgaaagggaacgtgggtctccatggtgataagagacagagaaccaatgagagctgaaggcggagcaggacttgtgtggaggactcatgggaactgggagtcatttaactatttgtttgcttcatgaaaatttagacaccagctgtaactgcattgcacagggtgtatagatgttatcattcttgctgacatattctggaagctttcagccccaccaacactgccccacccaggacttctgcagctgagagttcctgtgtcagtagggtctgatatatgtacatagattatacatatatgtgtacatatgtgcctcaatgaacattgcctgttcaccttatcatgggtgtacatagacttcatagagctccacagtcttttgtaaatattgacacaagtaaataagtatataaatatatattactgaggatttattttaacatcattctgtgtgaaatgacaaaaataaaatttttgacagacacttgtgctttctaccctcttctttgttggattattgtctttacaaaataaaaatgtgcttgccttactctccgctctctgacaccatgaaagctggtcagactagagctgcccattttcaatgcaccagggactcccttggctggatgcccatctgccaatgcctacaagccttgtgtagacactgggacatggggatagcagaaatgggcttggggtcttctccattacatcagcatcttcgatatagctggagaatgtatgggaaaggggaatctaacacaaaatccaaaaccagcctagggttaatttaattcctaacttcatccacctttgctaaccttcatacccaaagtcacttctcattgctgcagatagtgtggagtctggaccaactagattctcggctctcaaatgattctgcctattttggcctctcaagaaatagccatggctattagttcagatgatagtgctaacactca

SEQ ID NO: 762 - DNA, 1500 bp, Mus musculus
atgacagtggctaccggagacccagtggacgaggctgctgccctccctgggcacccacaagacacctatgacccagaggcagaccatgaatgctgtgagagagtggtcatcaacatctcaggcctgcggttcgaaactcagctaaagaccttagcccagttcccagagaccctcttaggggaccccaagaaacggatgaggtacttcgatcccctccgaaatgagtacttttttgatcgcaaccgccctagctttgatgccattttgtactactatcagtctgggggcaggttgaggcgacctgtgaacgtgcccttagatatcttctcggaagaaatccggttttatgagctaggagaagaagcaatggagatgtttcgggaggatgaaggctacatcaaggaagaagagcgtcctctgcctgaaaatgagtttcagagacaggtgtggcttctctttgaataccctgagagctcagggcctgccaggattatagccattgtatctgtgatggtcattctgatctccatcgtcagcttctgtctggaaaccttgcccatcttccgggatgagaatgaggacatgcatggtggcggggtgaccttccacacctattccaacagcaccatcgggtaccagcagtccacctccttcaccgaccctttcttcattgtagagactctctgcatcatctggttctcctttgagtttctggttagattctttgcctgtcccagcaaagctggcttcttcaccaacatcatgaacatcattgacattgtggctatcatcccttactttatcaccctggggacagagttagctgagaagccagaggatgcccagcaaggccagcaggccatgtcactggccattctccgtgtcatccggttggtaagagtctttaggattttcaagttgtccagacactccaaaggtctacagattctaggtcagaccctcaaagctagcatgagggaattgggcctcctgatattcttcctcttcattggggtcatcctcttctctagtgctgtctattttgcagaagctgatgagagagattcccagttccccagcatcccggatgctttctggtgggcagtcgtctccatgacaactgtaggctatggagacatggttccaactaccattggggggaagatagtgggttctctgtgtgcaattgcaggtgtgttaaccattgccttaccagtccctgtcatagtgtctaatttcaactacttctaccaccgggagacagagggagaggagcaggcccagtacttgcaagtgacaagctgtccaaagatcccgtcctcccctgacctaaagaaaagtagaagtgcctctaccataagtaagtctgattacatggagatacaggagggagttaacaacagcaatgaggactttagagaggagaacttaaaaacagccaactgtaccttggctaacacaaactatgtgaatattaccaaaatgttaactgatgtctga

SEQ ID NO: 763 - protein, 499 aa, Mus musculus
MTVATGDPVDEAAALPGHPQDTYDPEADHECCERVVINISGLRFETQLKTLAQFPETLLGDPKKRMRYFDPLRNEYFFDRNRPSFDAILYYYQSGGRLRRPVNVPLDIFSEEIRFYELGEEAMEMFREDEGYIKEEERPLPENEFQRQVWLLFEYPESSGPARIIAIVSVMVILISIVSFCLETLPIFRDENEDMHGGGVTFHTYSNSTIGYQQSTSFTDPFFIVETLCIIWFSFEFLVRFFACPSKAGFFTNIMNIIDIVAIIPYFITLGTELAEKPEDAQQGQQAMSLAILRVIRLVRVFRIFKLSRHSKGLQILGQTLKASMRELGLLIFFLFIGVILFSSAVYFAEADERDSQFPSIPDAFWWAVVSMTTVGYGDMVPTTIGGKIVGSLCAIAGVLTIALPVPVIVSNFNYFYHRETEGEEQAQYLQVTSCPKIPSSPDLKKSRSASTISKSDYMEIQEGVNNSNEDFREENLKTANCTLANTNYVNITKMLTDV

SEQ ID NO: 764 - DNA, 22280 bp, Homo sapiens
cgcctttgggtgccttaggccatgaaacttccagtagggccagtcattttcctcaggttgaacttcaggaaactcctcactgcaatttcagcccctttctgcaaggcctcagagtcaaagattccctgtgttccctttgtaatgacccttcttggactcagagaacatcattaagatgcactgagcatcaggtttgcactgtttggaatgtttgcaggattcgttttcaaaatgatttggcatctttgaaagtcctttctcccttttaaacaggcagtgacatgtgttggggtaacggttgatgtggggatcagcaaagtctgggctggaatcccagctctgccacttactagagccatgcaaccttgagcaggtcctatgacctctgagccttgatgtcctctcagcaaaatagtgacagtaggaggacccatggtgccagtggagataaaggaggtatatgcattcatctgcttaaggctcccattcctcagccaggtaaagttgaagaacgaatcatagaataagaagtagcccagctttcccattttacagatgaagaaactggggcccaaagaggggaagtgacttacaaggtcacctggtaataaagtcaggacagaaactggcaggccaagggcctttccatgatatcaacttgcttcttgtttttctgttctattcctcttctctattgaccaaaggccataaaagggagagaagaaggacgtggggcttagagtaaccttcaggcccagctaattcagccacataacgcagacactagggagtcaacctgtgttaggctacttttatgaagcaaaaacagtgatactgtctgcacttctgggataactgggccacactagggtcaaagtgttctcctctggagactttgatacatggcccactttgaagttagaaaacttccgaggatggccagggtagtgcaagacctcaagccacagcatataaggaagagttgaggacctgggaataatgacctcaaagaagagaagccatggagctcctcgccactgttttcaactttgtaaagtgctgatctctgcaaggtgcaggggaggggaggaagaattgctctctatggccacaggtgggacgcctgagtgaaagcttcaagaaggataattccaggtccacaaaaggcaattgaaaagttagctctgtccaaagttggaatgatccttggtaggaggcaataagcacatgtgagcagaagctggaagaccacgggtccttaggagagcttaaagcacagagtgactagtggacaggacgaggtccagcccacagtatacccactctatgagaacagcacagcaggatggataggagcatgaattctggagccacagtgcctgagttcaaaccgtggttcttgcctggactggctgggtgaccctgaacaagatgcttaagctctctataaaatagagagggagccaccagctctgggaaaccctcctccctgccctgctatcctctgatacaggggttgcctggtgcatcctcctcctggtagtagtgactggtgcaaggctggtcttccctcttgacccctctcagcctcttgggcaggagtcagaaatagcccctggctggccctgtggcaactcaagtttcttcagaagtgagggccctctaaggacaccaagtctagggctgaaaggcaaggagaggcagttaagctgtgggcaccatagaggctgtgcatctgctggtgtttgctggttcacaaacactgccagggcagcttctttgtgcccagcctggagcagataccagtatgcaagggcagaagagacatggccctgccctcagggtgcttccacctagtggaagactgcgtgcagatggacacaggcccctcaggacctggtgtgacaggtctgtgtccggagcatattgttggtgggtggagaccaggaagagggttaagaaaggcttcgtggaggatgtgacataagttgagtgtcagaagaagtcattgaagtgacagggaaggaggaaggtagggcattctggccagggggctgctggagtcaaagcagaaacacctggagccatctggaagctcacgtttcttgacaccttcctggaagtcactgagataaataccttgtgcccactatctcatttaatcctcagagcaagcattgggcattattaatcccattttacagattggaacctgagactcagagaggaaaaacaccccacctaaggtcatgtgaatggcaagcagtggaggaggggctccaccccaggcctgtctgacttcaagtcttaacctgacctgtctgttttaagccagttagagctttcgaggcagtttaatgtgatgccagtgtggacttccaggatggaggtttagagggaagacaggggaacatcagatcatgaaaggctttgctcgctttttaggaaatgcaggttgatcctagcaatagggcaccaatgagtagttgaagaggtgatagatcctacctgcactttagtggggtctctatagcaactgtggggagaagagaccagaggggaacaagtctgaagacaggaccaacaggggttgcagtgacccagactgtgcctgctggtggcttgaaccagggcggcgtggggagggagagggaatcagagagaagcaaacagacaccaaggccaagtgattggctgcatgtggagtgtgtcgggtgaaggaggaagaagacagttgataaggacatccaggcttctggtttgggcaactgggtgaatgttgttaccagtgtgttacaatcacctacactattcagcacagtaacatgctgtacaggtttgtagcctagggcaaaaggctctaccatacagcctgggtgtgtggcaggctatgccatctacgtttgtgtaagtacactctacgatgtttgcacaacgatgagatcacctgacacatttctcaggatgtgtctccatcgttaggtgacgcgtgactgtacttccaccaccttgctgtactgcctttgagtattagcagcagggggcctcatggtaagacaacgagcacactgcttgaaccagagcagcagctccaaaccatgagggagggactaccctcattagccattccttaacatgttcttttattttatttatttatttatttgagacaggttctcaccctgtcacccagactgtcgtgcagtggtgcaatctcagctcactgcaacctccaccgcgctggggctcagctgatccgcctacctaagcctcctgagtagctgggtctacaggcatgcaccaccgtgctggctaatttttgtattttttgtagagatggagtttcaccgtgttgcccaggctgttctcaaattcctgggctcaaacaatccactttcctcaacctcccagagtgttagaattacaggcatggaccactatacccagccttttttttttttttcaagacaggatcttgctctgtctgccaggctggagtgcagtggcacaatcatggctcactgcagcctcaaactcctgggctcaaatgatcctctcaacttagcctcccgagtagctggaactacagggacatgctattatgcccagctaattaaaaaaaaaattttagaggtggagccttatgttgcctaggctgatattgaattcctggcctcaagcaatcctcccacctcagcctcccaaattactgggattataggcatgagccaccttgtaataaaagaacatattcttttatttagccagtattgcggtgggatgagtgtgtagcagctcattcaagacaggagccaaggcccaggcctccatgaaggggccccttagaggcagctgaagttaatctgagaagccttcctgcaggaggctgaccttgactttggaggtaagtagtgggctggagtggaggcccatgccacttccaagggaagttctcaaatgtcaggcagatgcacaacacaacatcagcaacaacagtgacattaacagagtcctgttccacactgaccaggctttgcttctccatgcacctccatgggtattatcctctgtagtcctaaccaatgagatgttaacacacactaacaatgaaggtccctttccttccttccttccttccttccttccttccttccttccttccttccttcctcattctgtctttaagccctatgaagcaagggggtgggcggggctagtgtcctacctattttataagtaaactgctactcagaaaggtcaagtgagtgagcttgggtcgcacagaccacggccctggtcagatgccttgccttgtcctcccctttgggagcctttgggtcctgactcttgcaccaccactgcctcaagtccctcagttaaggtatgaacagttaatcaccagcaccaactcccttctaaaccagattgcctgtgaggctcaggttgcctccaggagagacgacccctggggaatctctgttcctgagaccagaaattgagcccagaggcctggcactgagctaacagtaaaagtgggcagtagaatggcatggtgacttataaagtcacacagtcttgatctgttccagcctcactactaaccagctaaattaccttggtcctctctgagcttcagtatcttcatctgtaaaacagagacaatgatatctttcccactggctggttgcaaggattaaatcaaatgatctctggagggctgtcagcccagtgtcctcctgccctgcctacctgtgagtgagtggggactgtgccagcacatgggtggatgggctggtggggagcatcaagcagaggcagcagtcatgccaggaaggggagctggttccctgggagtgacacctgagaagattcacaaatgggaagaactaagagattctccctccagtccctctgtgtgggtgtgggtgtgtatgcatacacagtcataaactcttcttttaagatgactgtagtcaccagtcactcactgtgacagccaccacagcccttccctctgctgaaggcagggcctggctctcaagcaggaaaccaaaccaaagggaagggagtggtctttggggattttcaccatgccccagggaaaggatcaaaggacactctggctgctattgtgtggccaaaaataagaaatggagcccaccatagaactggaaagggggctcagttaagttagctggctgtccattctttatagctaattttgtccttactaccctgtaaagtagctttgctctcccattcgaccaactaggaaacgaacagtaggaggctcagagagtgtcagtaacttgctcaagttcatacagctagcaagtgttagtgccgggaatacggcctgtgttcttttcctatacagcactgccaaaccaaggtactgacagacacttttcagggcagaagccctgaaatgtgcctaaacaactgttatgatggttcttttttttcccccttctttagttaatttctttttttgtcattgttcacatttaagtttaaaggatagagacaggacaacatacccctgaggccaagtcacaaaatagaagcagaggtcagaggaagatctcaaagagggaaatgaaattcaagagctgctcattccacctgcacagtgtggtgtgggggctaagggcacatgtcctagaatcacaaagacctaattccagtcctagagtcaccatttattaacctcaggcaggtgatttcacctctcactgcctccatttcctttccaatgaaatggtactaatgtatacattgacttctagggctgtgagaattaaatgttgccctgggtaagaagtgcttagcacagggtctgacacatggtaagcccatgtcaccaattatgacgattgattttccttcaagggcttttctctgtccacagcttctgttttcaagaaggaaggcaaaggaaatgtatacatatgatcagatggatagagtatctgactttggccacacaggattatctgactttaaatgacacgagaacccagtgtgccaaataggagaaacagagccccttggtgctggtcaggggaggctttcagaaggagtatatagggaagggaactggaggtcaatttggtagaggggtgggaatggtgagatctcaaggaaagtaaagggcggggcaatctgggaagcagagggaatggggcaacaaggacctggtgattgggagcctagagaaacaccccagagctaagctggaagctaagagctatgaggagagtttcacaaggaagcagagcagcgaaatcatcatgcattcagtgtctgctggatgctaaactcattcaacaattaaaacctcaccacacccttaggggcatcctgatttttcagaggagggcactggtgcccagagaagtgaaataacttatctagtaactgttagggagttacgtttccatctgactgcctccaaaacacccaagccgttcactgactgggacactaacaggccaggttcaaggtgctctaaaccataccagcccttctctatagtcatctgtcatcctttgggcccacggaggtcactgccctcccagaccaccccctgcagctctaggcaggctcccagtcttcaaccacacctcacagactaccacgatgaaacgccagaatccggagtcccgcttcatgggctttcagggctctccccacgaggtacacgcatagagaggagggtttcccggccggagggtaggggggagggcccagtggggacttcctggtgctagagcccatctgaatccagagctccgtgtctaccgcagtcttatctcaaggaaccaccactgtttggcacacctgtctaggtgaccctgacagggacctggagaacagaactagcaggggcttgaggctgtcgtctgcctcccaaaagcaccctggaccttctcggatgccctatctaggcagaaagtaggctgtgcctcccacacacatttcccgaaagcaaagggcatcctcgtctgcccacctagggtgctgtaagctgcactcctaagttcagagccctgtgggccacctggctttgcaagttctgccagagggcccgttttgtgagtagctgaccattcccaagggcagcggcgtgtcccccagccttccctgcccgggccctgggggagggagtcggggagtggagagggccagccctgcagtgctgcctgttcctgcggctcctctcggtgggggcgaacacagcagaagagtttctgccacactgcggaccgcacctgctgcatttccctgcgaagccaaatctttgctgggtaacagggaggtgggaagccgatctggagaaggggtcgcgctggcgggagaaagggcaagaaaggggtctgcagatcctgtctggaggcaccacaataatagcaacacgtctctcccggggctggatcccgctgtgggcctggggtagctgctattgattatctcctccttgcctacttcattacgttggcaggagcctctcaccagtgcccctcaacttctgccctcccccatctccccggcccggcagcacccagctgagctctcctggaggttctggttagtaagtcgggctctgccaaagaatgttttcctcgcggggcgggggctgaggcccgggggcccaacgaggtgacgagctcggtggcggcggagggcagcttgtcgccccggccccggccccggcccccgccggcccctttaattcgagttcgccgtcgagccaggtgcggcgctgcgtggcgcggtgcggctgcgggcggcggccgggagctccgtacgcgccgcccgcgggactgcagagccggctcccggctggccgcccgcaccccgccgccgcccgctgccggggttctgccggcgctggccgtaacctaggaacatggaggccccggtgcccatccggaagggtaaatccgtgtcggggcgttgcgcggcgcgtgctgccttccctgcccggctgcggcgcccagaggggctgcggggcacccggcggcgcagcctgcagcgcagcaggcttgggctgagtccgcggcggcaagcccttgccgaccactgccgtctgctcggcaggtcccagaccggggagatcaaggggaacttgcaccctgctcaagaagagtgcacagaatgggctcgggaccctctggggtttgcgtggcgcggggcggagggcacggagaggagctggtgggtggtgggaagtgcagctggcagcataaccatgtctggtaaatagcgcgggttggtaggacctgaaccacttgggacggccgggctgcattcgcctcttcggcacagaataacaaacggctttgctgcagagagggctttccccttcgctggggccgtgggctgccgccgagcccccgcgcttaaaaggaagctgagatctggggcggcagcctggcgcaggctactccccacccccagagatcaggttccgggattttgggttggacactgagcctcggcggtccctcggctggacgccgggggcttaagagctgaactgcgcttgggcccgcagcaggagccgaccgcgcgggcaggagggggttaaggtggcgctagcggccgcggccagcgggagggtctggtcctctgcgcggaggcgagcgctgagtgcgccgaacggaatcccggccggagcccggggcgatggggagagggcccagacccctccccgccctggggccggcgggattgggtcggcagggggccagtccggaagccggcttcctccaggctccccctctcgctgctgccaagccgcctcgcagctaggcaggcggagcgtttattctgtgctccctgccgaggagatgtgagggattttctcttgggggagaaatcagtggtcgagcgcctgcccagctcaaatgccacccggctcagagggaggcctgcggcccagggatcccggagggagagtaagttcatccagttttcgtacagtgcagactttgttgtgtggggtctccctagatgcgctctgaaggagtgtgtgtgctggggggtggggtgcttcttttccaggactggctgaggtcagagcttgtagacaggctgcagtgagctaagccctcctcttgggagctgctgtgtcctgacatgtgggggtaggagtgcttcttccagagtccttcctgagagcagctggggactagcaacctggatcaacccagggaggcccctggagaaggcaggcccagccaagcctgagtcttgctccctgggagaaaatgcttcaagctgatgggaagcctgcccagaagaggcaaggaggctgagggatagtcctcaggcctggcatcagaatagaggatgggcatgggggcctgttacctcccatgagggaagctgccagaccctcctaaatcttggcaccagctggttcaaatgccctggttccaccttgctgctgtttttttccaggcaacgtcacacctcctgaggacagccaggactccagcttttgctgagctttgcatcttgcctccttccttcaaaaggctccaggcccatgctcggctgtcttcaagtcccgcatgcccctggccaggcacctcaccgcccctccagcccagcccaatcctagagctcacctccaggacccagagtctgcccttctgcccagaatgactcaccattatttctagctcgagtgagaagacgtgatgaggagttgggctgcctgttggtgcatctcagattcctgcagcatctgatcagctctgcaaggaagagagcttcacgtctctggtcaggtaaatcaatctatcatttaataacagccttgtgtagaatcactggggtggaggccaatgagaaagacccaggcccaagctccccaaccatgaatacctccctgggtatgagtatctgagacattagtgcagcacctgggagagggtccacttttaacctattagcatggggttatgctccatgaagcctgtgtgctacaagcgggcctgtaccagccaccttcccccaatgcagggcattccagaggttcctggagagattgctacctgctccccctgatccccagacaagttacaaggtgaaagtaaattttgctttgtcgttgtggtggtggtgatcatgtgtctgaactcttggctgagagatgggagacaaaaagtggcaacccaggtcaggctgccaatgctgagtagcctcatgtcaataactgcctctgtctttcagccaagcgaggctgtctctccagctctcagagagctctcggggctctcctgcaggagaccaggccaatgctcctgtgcttcctggggccagtagcagcaccctgagctccctgccaccaggcagctgaaaggcatagcgtgaggtgcttctctcagtcccaattatgacagtggccaccggagacccagcagacgaggctgctgccctccctgggcacccacaggacacctatgacccagaggcagaccacgagtgctgtgagagggtggtgatcaacatctcagggctgcggtttgagacccagctaaagaccttagcccagtttccagagaccctcttaggggacccaaagaaacgaatgaggtactttgaccccctccgaaatgagtactttttcgatcggaaccgccctagctttgatgccattttgtactactaccagtcagggggccgattgaggcgacctgtgaatgtgcccttagatatattctctgaagaaattcggttttatgagctgggagaagaagcgatggagatgtttcgggaagatgaaggctacatcaaggaggaagagcgtcctctgcctgaaaatgagtttcagagacaagtgtggcttctctttgaatacccagagagctcagggcctgccaggattatagctattgtgtctgtcatggtgattctgatctcaattgtcagcttctgtctggaaacattgcccatcttccgggatgagaatgaagacatgcatggtagtggggtgaccttccacacctattccaacagcaccatcgggtaccagcagtccacttccttcacagaccctttcttcattgtagagacactctgcatcatctggttctcctttgaattcttggtgaggttctttgcctgtcccagcaaagccggcttcttcaccaacatcatgaacatcattgacattgtggccatcatcccctacttcatcaccctggggacagagttggctgagaagccagaggacgctcagcaaggccagcaggccatgtcactggccatcctccgtgtcatccggttggtaagagtctttaggattttcaagttgtccagacactccaaaggtctccagattctaggtcagaccctcaaagccagcatgagagaattgggcctcctgatattctttctcttcataggggtcatccttttctctagtgctgtgtattttgcagaggccgatgagcgagagtcccagttccccagcatcccagatgccttctggtgggcagtcgtctccatgacaactgtaggctatggagacatggttccgactaccattgggggaaagatagtgggttccctatgtgcgattgcaggtgtgttaactattgccttaccggtccctgtcattgtgtccaatttcaactacttctaccaccgggagacagagggagaggaacaggcccaatacttgcaagtgacaagctgtccaaagatcccatcctcccctgacctaaagaaaagtagaagtgcctctaccattagtaagtctgattacatggagatccaggagggtgtaaataacagtaatgaggactttagagaggaaaacttgaaaacagccaactgtaccttggctaacacaaactatgtgaatattaccaaaatgttaactgatgtctgattgaaacctattaccgtactcacagctcaatggaactaatgcagatgttgcataatagcctgcattgtagtcagtgtgttctacagtgtgtatctggttctgcatggaaagcaatagttgtgcaagtgacttttgatcttttgacttttgatttagaacacagaatatctatcatggctttcatgcacatcctcatcaccggcttatgaacttccaaagacgggagtcacctatcaagctaggatttcagatagacacgttgaggccacctcatatcccatacacagtgcaccatatcagtgccatcattccttcctaatgaaatgcacacaacatccaagagatgcactcccctccccaccatcccaccaccttatttgagcccacctgccctttcacagaggaacacaatcatggcttagctttaaatagctggtgtttgttcaaaaggtcatactcatttttgcattgaaaagaacacacagtcctgtgtgttggaattactttctgtgtcacaggctggagtttgtgaattgcagttgccaagtagatgctctggaggcttgtgtttcataacggaaaatgctgcattctgctttttctctgcagtgtcgatgtgagggaagcccgggggagggacagttagtatgaccgaatatgagttgtcaagtttcacatttgttcccttaggcctatggggagaagctaacaaaccaacagacctctaagcctctgatttcaccatttttgcaggctccagggtcacaaaaacatgtctggtttcttactggagtttgcagacatctgctttcccactgatgtggcccagctacactgacactgcagtgaaatttaccagtgatgcaatagagctgcatgggtgtttgttgcatgaatctcaatatttaaaacacaggagataacctattttcctagtagcctacacagtgttaatatttagagtattaataggcttggaatggtcttgaactaggggtttttttcccatcagaaggcaaaaatccctccatcaggggaaaaaaaatagactatttggaatggaactaaaacttctggccccccagcctacctatccctgttcttctaaacaggaacgcagacctctgcaaagccagaagagtaagcggggaaggcagcatctgaacacctcacatgactgcaccttaggaattaacctagtcgcgggcatgactgtacagtggaccagggcatctggtcctgatgacaggcaggtctgtggatccagtgtatataaatatatatcgagtatctctctttcacgcgttcctctacctagctagtgatagaaaagaaattgcatttgaacattgtacaagcttatgcaatatttttgacaaagggcaatttatgcatgtgtttgactatgtgcactagggtgtatatatatacatacatatgtgtgtatatgtatacacacacacacacacacacacacacacacacacacatatatatatatatatattcattttctggagttcaggttcaggagcaaatccactgcttggtgggttggctgtctaagaggcctaatgggttaatttgtctcattggtaaccccactgggcctgggtttgctgccattgcctcagacactccggtatccatggattcctagacgttagaattgtctttctgccctccatgtgctgcagcttcagttcccatggctgaagcttgtcttactgagtgcacaagggccctgtggccctcacagttccagctgtcctgggccagacccaccccgggcctcctctctacagttcatcctgttcatcatctccattttcacctcttcccttgccacttggatcttattatcatttggctctgcatccgtcactttcacaaacctttcgctaaagagccagaatggatcccctgctttgaaaccaaggacaccaaggagtaggactccctgggaccaaattccactgatctggacctaaagggagcctcctctatgtggaaatgtctgaagtccgggactaagtgatggagtccctagatgatccaaaggcatcattttgatctccagacccaaactctctccccattaaactggcaaccagagctgctttttaaaaagaaccaaaggatgggtaaagaatcatttcccaccccccagaagaagtagagtgcaaatgagcactgcacagcctaaaggtagacagtaggttgaccctgaaatggcttcaggtagggggcttttaactcaccagactgggcgtctttgccttttgacggagtagcttaattttcccaaacagtgaattgcaggggtcgggctatgcaggggtggctccagcccaggcctcactgctgcctagttagcacctacagttgtcttggggcatggggcaccagctcagggtgctaggcccagggtgctcattagtgcctggtcacccacatccccaggtatctgcagggcatcccatgcccagcacaaagcctctgtgcttctcttcctctccttcatgggaggtggtgctgaatttccaaggcatggggtgggagggacacagatctttggaaaatagaaggtaaagcaacccatatctgaggcctaggtcagggatagatatcttatcacagtgtccttggcccaggactctaaaatgttcacatacagtcatgcacattcaccacaaaataggtacactgttgtcacacacaaacataaaacatgtaacgtgcaaaatacagacagaccaggttaacataaaagcaaacacagaagatatatggttataattgtatataaaatgcacactctgcacagatatagaatttacacagaacatacacaaaagacaaacatacaccacatacaaatatacaacctgaaactcagatgcaaaatacataaaaaactacatggacaaaatgcatatgcatataagatacacaaaggctactttaccattgtttctacacataaaatacacacaaactcagtatatacacacgatgcattaacttataataggcatacaagatacatagcacacatgcccaaaaatatcgcacaatacacatgaaatgcagacatatactcagacccattgccctgcccccagagctatgaattaacaggcacaaacaaaagatcagatgtaatcacctttgcctggcctgtgtctatatcccccaggatctttcaaggaatctctttctctattcttttctctcactaccagatttcactcctgagaagtaactcctaggtttcaagcaggaggatgggccaccacatcaagcagatatctgactaagaccaggaattgcatggggtctctaccaattcaccttcctcccaccagaaacctgggtgcagggtgtgaaagtacctgggacagctggtagcctaatataggcctccttgccatgacccttccttccttccagcaaatccgcacagacaacccaatagcccaggctccccttctcccagcacctgggatctccagattcagccctattctcttaaaagcagtaatggctcaagaaactgcaggatcttgagcccaggaccagggtaaagatgtccccaacattctctaagcccacagattttattgcccttccatcctttgcagctttgttgggggcacggtcaggaagttgagaccctatagagacctgtctcttaaaatgagccacctttacttgcttgtggcatttcacttgctcttgtgcataagcccaaaggggccaactcctgattcccctctgggtgtgttcaatcccgggcacgctcttccttttcctcttgttgggctcccctggatgccctgcctcccatccaattgctatgcaacccagttcagcttaagtaaaaagtgattaagaacatacatctaaggctaagcaagctaacactttttagagggcctgactttatcctatattctaaggccatatttaaatactttctaagattacccaccattttggattactcttggagctggttcttcccctaagtaggactagctgagagctgagtgcattttagcaaaggcttcacctacatcggaagtaaagagttgcagtcaggctttggatcaggcctcactcctgatttctgctcctgcagccatcccgttgtgtctcactctcccttccagtgatggtcgcagctcccagtctctacagaaaaggtaacaacagtagggagtggacatatgggtccaaaacgtgtgctttgctggaaacttgtgtttccaggtcaaggtaccattcctgttggcttcatcaagtgcctctgtggattcattttcaagaaacttggagttttcaggagaccgaaaaggaataggcccaggaaaggtggagagattgtcaggaagagagagtggctgagtgggtcaaatttcagagtaaactttttaggagccaacatttaattaagaaaataattaaggctctgtgctttctgaaacttcagtaatatttgacatgctctcttccttcttctctgcttgcctctgtccctctcacctgtgtttctgaggctagtgttggcatgtcaccatgaggttagccttttaaaaggggccccacgggagtgtgcctctagattgcgttagcctagtatggaaagggctcccatggaagctatgatggcctgagaccccagcctgggtgttcatgttgctgctccgtgttgggagggcccaggactagcttgttctacctattcttcctggatctctcactatattatagtgaggactctatcagtatcaacccatgtggagagaggacagcaccctctgaagctcctcaggctggggattcagcactgcccacagtagtagagtcacagaggctgactcccccctaaggaaactatagaacagtgtgcaaattgcatatgaaggtggcaccactacccctatgtcaggcaggggagcacagtgctttgacttgtttactcaagagaggggatgatggtgctgagctctgctccccagagctttcctggggcccattgtcataataacttgtatgtgggtgatggccgcctcatctgcgagggctataatatccatggtgctccttggttgcacaatggaggttcccctagccttggcaaggtatccattgccgggtttgaactcatgaccttaacctcattaacatcatcagtcacctgagccaacgcgcagagagggggatgctgggagctctctcagtagctattgtgaccatcatctatatcttcagacttagcccttgttgagtccaaccctgttcccctatcaaagcaaccagcagggacagatggaggtaggggctcccctacatgcaggaaggttctcttcctcaaactaacctagtttacttttcctttttttctgcttcccttcccaccaaatctcagcttcatctctcatagtttgtgtttgaatatttttaaagaggaaaagtgcaataaaataaatagtgactgttttctttagcaatagctctttcaaaatcttgctctcaggactgaaaagtgatagatagtacctggattatcagataatgcccttgacttctgggggctcattcacagtctctgtagtttcttcttcttcccacgtgttcacatgactcctgtcctcttgagatctgacctccttctggaatggacacatatgctaagatgcagtgtatgcacaaggaaggcctgtgagagggctttgtcactttgtctccttcctgtgtgcacctctctgtctccatgtgtgtctctgtcccctctccctctgtctccccatttctgcctgctgtcatacagcatccttacaacctctaggcatgaaaatcctaagtttgtgtgaccttttcagcccattttgttgactttccctcagtctggcagatgtaatggaagcctacacgaaagcacttcccaatagataagaataaagcatcctgagccattacagaagatcatttccatgcactaaaagccattacttgatccttttgcttccccttctcccttccccagggagacggatgctgagggaatgtggcctggaggtttgcacttgggatcagtagcctgggcagatttgggaattgccctctgactctctttcaaaataagctgacttgctcaaccaaagggactccgtgagagctgcagaaggaagcaggttcttgtgggtttcagtagaagtctacagggatagaagtttgggtggttagggcatgacattagtgaaataaagactctaccacccgctagagtgtgcagctgcacaaatatttgcacacatagccaggggcttcagaagagtcccctttcctaacatctgtgagcttaaatgttcagactggacaatcagggaaggctggcaaccccagggtcccattccatccttttttgatctaccttgctctatacacatatgtacagcaaaacctcagttaactgatggggaaacctcagggacaggaacatcctgattgctttgcaattttggttatttgagtgggaatgggaaagcatgtctggttcaacctttgttattgagaaaaatatttcctaagtaggttagcataactttcctgccttagttaagtagagtgtttgaagataacagggaccttgccttgctcagggtcaacattgtaaacctcaatgcttattgtacagtagtggacataggtagagaagaccaaagagacaggctgaatggctgctggctacaagacaggcctggaaatgggccactggggcacatcctggctcatcggagcccttgctgtcatttgcctctttctactgaaaggatagtaagaaaacataattcttgtcaatcgaggttttggttaattggtcctgagtttttagaggttttccatatatacatatatttatgtgtgtatatatatatatatagtatatgtatatatgtatactatttttaaattatagaattatacattgaccaatctccttagtttcacttatgtggaataaatttggcaatccaaggaataaactgcatttatgtgcattttttgaatgacctcctttgcattcttttcacctctccagttctactctttttttttctgcttagggacctctctagaaggcagatctttcataaaaaaagaacaggctacaggatcacctctttcctttccctcccaggtggctgcctgactcagggataaaagggaagtctgatctaacagccaggtgctttagcctttcttctgtctgccctggttggctataacctcatcactgaggatcagaaaagttattccaaactttgtactcgaggggagtggaaagcttgaagacctggcaaaggatttatctatttagcattctctttgtcattggtggtgccctaggtttgaggtttgtgagatctgaaagtaacattccaatgaagaactaaagcacatctctgccacacagaaggtgaggtttgtggcaatcaatggaactaacaaatccattctgttttttattatgactaaacctaagttgagggtgtgggtattagagcagctgaaattcagttgcctctttgggggtaagctgtacacatcactcaagaaacagctggatgcaagctaaaacctgctctcattctccctcttgcctgctagtgtgttagatccatggaagacagtttctctcagcctcacctcttgcatttgactgttgctttctacctagatgggagtgggagggatttttcactgtatctggagcaattgaagtggtgcaggggtgtctgccatctccccacacccacagaagccctccagtctggctatgttagttgtgatcaggcagcagaagcccataacccagacttgacatgaccagctggtgcactgaggcagttgaggtggcctgtctggatggctacttcttgtacttcatgaacctcagcatggaaatggatataactttctgtgctcctctgcactcctaaaatagtctaatatgttccagatgagtttgcagctgagaactccctgcatcattccactgatggatgcacagggcatgattatgtaataatgtggacagctactgcaacatctagatcattgagggcagtgtagatgtggctgtgtgctaggacccttggtagctatccagaggactcagtctggtgtctttctgagtctctgtgagaggcctctaagccctgcttctccttgaaaatgattccctagacaccgaatgccttgtttgtatgagtgaataaatgctctgggctgctagagaaagcaataggaggagctgggaggaagagaatattcaggggcgcactttgctaccaaacaatttccatgtcagctgctaacattactgcctttttagcctatgaagtgtagggcaaggactttgacctgccaggtggggctggaaaggagcacatcagctccaggctaagaaatgggatagaaaagcaagaagagaggcctggctggctttggcgggggtgagtctcagctcctgagggtttgaacatgctctgtgcttgccccagttctgccttcacgtgggatccagcgacccagtttccttttgttgtcgtgcttggatggttccttcatttgaagggccccaggaagctggaaagtcccatgatcaagctctagcctgctgagcaaacaataccccagccaaattggcctcttcctggttttctgcatccctgcacccctctctccactaaggataatcttggaacagttgcgattaatggtgccagcaatcaaggaagattctctagttttcatcagggacatagctgtaaagctcatgagtggaggatgctatttccttttccagacctgtgtgcttatgtgcttatataggctgcctctggagactttatattgtgtgtgatgtgtgtgtatatatatatacacacacatatatatatatatgtatatatatatatagagagagagagagagaggaaatggccgccactcacttaggctcatgcagcacagactccagttagggtttgcactggcttccttgctgcttgtgcatgaatcttcagctgccctcccatgtcctgtctctaataattgctgaaaactcaaagaggtagataaataagcctccttgggatcaatagcagaaggaactccaaggctgatggtaaagcttcgtaaggatgatgccgaaagggaactggggtctccatggtgataagaggctggggaccaatgagagctgaaggcggagcaggacttgcggggaagactcatgggagttgggagtcatttaactatttgtttgcttcttgaaaatttagacaccagctgtaactacattgcacaggatgtattgatattatcattcttgctgacatattctggaagctttcagccccaccaacactgccccacccaggacttctgcagctgagagttcctgtgtcagtagggtctgatatttgtacataggttatacatatatgtgtacatatgtgcctcaatgaacattgcctgtccacctgatcatgggtgtacatagacttcatagagctccacagtcttttgtaaatattgacacaagtaaataagtatataaatatatattactggggatttattttaacatcattctgtgtgatatgaaaaaaataaaatttttgacagacactgatggttttcacttgtttcttgcctgctgggattatcatccctacaacatgcaagtgtgcttgcctcactctcagcctagtttctgtggccatgagggtccaggcagagaccaggcaggatgggagagggtcctcctggatgcattgggtatcatcttggtgtgtgcctgcctgcccttgactgggagccctgcgcagacgaggcagagtatgtggatgggagggtgggtgggtgcgtttgagatctccccaattacatcaacacttcctgtatcttccatggagctggaggatgtgtgggggcggggtacccagtttgaagaccaaacacagtctgggaatcatttaaatgcagccgcacccacatttgcaggccttgtcctcaaacccacccccacctctgcccattactgctggcccaggggtctggaccaaccgtgctgtccactctcaagtgaggagaatgtctatcttggcctcctgagatggagacacagcagcaccttcgtggagaaggtcctaacacacacacacacacacacacacacacacacacagacactgctgaggcacatctatgtgatttcctctgagggctaatctagtcctgaactcctgcaaatttagaaggctcaaaagaggccatggtgtggagtatgagcaca

SEQ ID NO: 765 - DNA, 2280 bp, Homo sapiens
agcgggcctgtaccagccaccttcccccaatgcagggcattccagaggttcctggagagattgctacctgctccccctgatccccagacaagttacaaggtgaaagtaaattttgctttgtcgttgtggtggtggtgatcatgtgtctgaactcttggctgagagatgggagacaaaaagtggcaacccaggtcaggctgccaatgctgagtagcctcatgtcaataactgcctctgtctttcagccaagcgaggctgtctctccagctctcagagagctctcggggctctcctgcaggagaccaggccaatgctcctgtgcttcctggggccagtagcagcaccctgagctccctgccaccaggcagctgaaaggcatagcgtgaggtgcttctctcagtcccaattatgacagtggccaccggagacccagcagacgaggctgctgccctccctgggcacccacaggacacctatgacccagaggcagaccacgagtgctgtgagagggtggtgatcaacatctcagggctgcggtttgagacccagctaaagaccttagcccagtttccagagaccctcttaggggacccaaagaaacgaatgaggtactttgaccccctccgaaatgagtactttttcgatcggaaccgccctagctttgatgccattttgtactactaccagtcagggggccgattgaggcgacctgtgaatgtgcccttagatatattctctgaagaaattcggttttatgagctgggagaagaagcgatggagatgtttcgggaagatgaaggctacatcaaggaggaagagcgtcctctgcctgaaaatgagtttcagagacaagtgtggcttctctttgaatacccagagagctcagggcctgccaggattatagctattgtgtctgtcatggtgattctgatctcaattgtcagcttctgtctggaaacattgcccatcttccgggatgagaatgaagacatgcatggtagtggggtgaccttccacacctattccaacagcaccatcgggtaccagcagtccacttccttcacagaccctttcttcattgtagagacactctgcatcatctggttctcctttgaattcttggtgaggttctttgcctgtcccagcaaagccggcttcttcaccaacatcatgaacatcattgacattgtggccatcatcccctacttcatcaccctggggacagagttggctgagaagccagaggacgctcagcaaggccagcaggccatgtcactggccatcctccgtgtcatccggttggtaagagtctttaggattttcaagttgtccagacactccaaaggtctccagattctaggtcagaccctcaaagccagcatgagagaattgggcctcctgatattctttctcttcataggggtcatccttttctctagtgctgtgtattttgcagaggccgatgagcgagagtcccagttccccagcatcccagatgccttctggtgggcagtcgtctccatgacaactgtaggctatggagacatggttccgactaccattgggggaaagatagtgggttccctatgtgcgattgcaggtgtgttaactattgccttaccggtccctgtcattgtgtccaatttcaactacttctaccaccgggagacagagggagaggaacaggcccaatacttgcaagtgacaagctgtccaaagatcccatcctcccctgacctaaagaaaagtagaagtgcctctaccattagtaagtctgattacatggagatccaggagggtgtaaataacagtaatgaggactttagagaggaaaacttgaaaacagccaactgtaccttggctaacacaaactatgtgaatattaccaaaatgttaactgatgtctgattgaaacctattaccgtactcacagctcaatggaactaatgcagatgttgcataatagcctgcattgtagtcagtgtgttctacagtgtgtatctggttctgcatggaaagcaatagttgtgcaagtgacttttgatcttttgacttttgatttagaacacagaatatctatcatggctttcatgcacatcctcatcaccggcttatgaacttccaaagacgggagtcacctatcaagctaggatttcagatagacacgttgaggccacctcatatcccatacacagtgcaccatatcagtgccatcattccttcctaatgaaatgcacacaacatccaagagatgcactcccctccccaccatcccaccac

SEQ ID NO: 766 - protein, 499 aa, Homo sapiens
MTVATGDPADEAAALPGHPQDTYDPEADHECCERVVINISGLRFETQLKTLAQFPETLLGDPKKRMRYFDPLRNEYFFDRNRPSFDAILYYYQSGGRLRRPVNVPLDIFSEEIRFYELGEEAMEMFREDEGYIKEEERPLPENEFQRQVWLLFEYPESSGPARIIAIVSVMVILISIVSFCLETLPIFRDENEDMHGSGVTFHTYSNSTIGYQQSTSFTDPFFIVETLCIIWFSFEFLVRFFACPSKAGFFTNIMNIIDIVAIIPYFITLGTELAEKPEDAQQGQQAMSLAILRVIRLVRVFRIFKLSRHSKGLQILGQTLKASMRELGLLIFFLFIGVILFSSAVYFAEADERESQFPSIPDAFWWAVVSMTTVGYGDMVPTTIGGKIVGSLCAIAGVLTIALPVPVIVSNFNYFYHRETEGEEQAQYLQVTSCPKIPSSPDLKKSRSASTISKSDYMEIQEGVNNSNEDFREENLKTANCTLANTNYVNITKMLTDV

SEQ ID NO: 767 - DNA, 45736 bp, Mus musculus
  misc_feature (1)...(45736): n = A,T,C or G
ggtaggacaagtttgaaatgtcttgattgacactgagtttcctatcctggtttctcttacctccgtctctgtttcagctgcactgatgccctggttctgacatccctggaggagacctgttcctgctgctctctgcatctcagagaagctcctgcttcctgcttccccgactcagttactgagcacagccatctaacctgagacctcttcagaataactacctcctcactcggctgtctgaccagagaaatagacctgtctctcccggtcgttctctgccctgggttcccctagaaacagacacagcctccagctggctttgtcctctgaaaagcagtttacattgatgcagagaaccaaactagacatgccattctgttgacaacagtttcttatactctaaggtaacaactgctggtgattttcccctgcccccaactgttgaacttggccttgttggtttggggggaaaatgtcataaattactttcttcccaaaatataattagtgttgctgattgatttgtaatgtgatcagctatattccataaactggcatctgctctgtattcataaatgcaaacacgaatactctcaactgcatgcaattaaatccaacattcacaacaaagtgcctttttcctaaaagtgctctgtaggctccattacagtttgtaattggaatagatgtgtcaagaaccattgtataggaaagtgactctgagccatctacctttgagggaaaggtgtatgtacctgatggcagatgctttgtgtatgcacatgaagatagtttccctgtctgggattctcccaggagaaagatggaactgaaacaattacaagtaatttcatttaattctagctaatcttttttttttttttttttttttttggtagactatcacctataaatatttggaatatcttctagcttactgataatctaataattaatgagcttccattataatgaattggttcataccaggaagccctccatttatagtatagatactgtaaaaattggcatgttgttactttatagctgtgattaatgattcctcagaccttgctgagatatagttattagcagacaggttatatctttgctgcatagtttcttcatggaatatatatctatctgtatgtggagagaacgtggccctcagttcccttctcagcatccctcatctctcagcctagagaagttcgagcatcctagaggggcttgaacagttatctcggttaaaccatggtgctaatggaccgggtcatggtttcaaaacttgaacaagccagttagcatcacagagaaacagtccatccatatttgctccctgcctattattcctgcttacagacttttgcctgatgcctgctgttagtgctacaaggataaagcttgtgtggttctcaccaggactggaagtacctggtgagctctggggtaagcctagatatctttacattttcagacccttattcttagccacgtggaaactgaagccagagtccatacctccatctccttccccccccaaaaaaattagattaatgttctttatatagcttttttaaagtatttaaaacatgtctataagttaggctgccaactaacaaaagctgatgtgtttgttcaaataaagaggtatccttcgctactcgagagaagaatgtaaaatgccattgattgttgtcacttggaggcttgatgtttgccctgataattcattagtgggttttgtttgtcacatgatacctaagatgtaactcagctcagtaattctaatgaaaacataaattggataccttaattgaaaaaagcaaacctaattccaaaatggccattttctcttctgatcttgtaatacctaaaattctgaggtccttgggattcttttgtttataacaggatcttgctgtgtagtcctagctggcctcaaactcacaatactcttcctggatcaatctcccaagtgctgggattacaggcacattccaccacacacacctgactgagctcgttcctaatgagttttcattaagcaaattccccatcaccttgaaactaatcagaagggggaagaaacatttgctatgctcctgagtgctaacactgggatcattcacatggggtttgcattcctaggcaaactaaactgctgccttttacaacaaggctcagtcatcttcctgaagctgctgagaccagcacttggtcttgttttgttttaatatgtctatatgactggtggtggatccctaaatagtttattaattaaactccagttaaggagaaagttactcaccttgacccgtttgaccatatcccgtgtgtgtgtgtgtgtgtgtgtgtgtgtgtgtgtgtgtgcgcacgcgtatgtacgtacgtatgtatgtaggtatgtaggtggttcccagtatacacannnnnnnnnnnnnnnnnnnnnnnnnnnnnnnnnnnnnnnnnnnnnnnnnnnnnnnnnnnnnnnnnnnnnnnnnnnnnnnnnnnnnnnnnnnnnnnnnnnnnnnnnnnnnnnnnnnnnnnnnnnnnnnnnnnnnnnnnnnnnnnnnnnngtctacagtgagttccaggacagccagtgctacacagagaaaccctgtctcgaaaagcccaaaaaaaaaaaaaaaaaaaaaaaaaaaagccaagtaggtccagttggtatagtatcaaagtgtttttagagtaattagtgaaggtctgctttacctcaaagttgcagagcctctcttcctgagtttaagtgcctggccggcagtcacaaattaacatgttgctgtaaggcagttagttgaagctttgttcacacattggagagtatgaaaataaagtgttctaagagcgctgatactggatctgtgtaaacctggtaaatgccgtttgtccaggacttagcgtgtgtgagttggtagctcagtacgagtttactagttccgcagtgtgtacaatggaggcgggtttgttttagctggccacctgtagaatcagcctttaaactgctgtgaactttgtcatgacttgaatatgaagatagacaaaaactctgtaaagacaaatgtttgttttcccccttacagaacgtgtgagcttggttttatcttcctttgtatttagtcataacctctcaagctggcagctccgaccaaggatcagaagctgtgtgcgttccacctggtggaattagctcagctctatatgagaagtggagttaatggaaaacgtgttgactgggtggtttctatttaaaagagtgatgataattcttgaacagtagtttttattttgctatttctttaagctgactgatgtgccacaaaattattttaaggtatttgtgttttaagagtgttctcatgagattagttgtagatattttttaaaatacaactggtttttaaaatctgagtattgctctaagcaagtgtttagactcttacgggaaggtgggtggaagttgtttggcttccgtatttccatgcgtgccgtcagacataggtcagaacgccaactgtgcatcctgctgtttaaagacctcttggcctctgtgaccctcatgaaggggctgatattttaagttgactgtttgattgtaaattaatcctttctaatttttaaagacttgcttgactgttttccttgttaaataattttaaaaaaataaaaaactggaagttctttgcttaactgtattttccctactgccatagggtttctactgctgttaagagacaccatgaccacagcaactctgataaagaaaacatttagttgggctggcttacagtgtcagaggtttagtcagttatggtcacggtgggaaacatggcagcgtgcaggcagacatagtgctggagaaggagctgagagtactacatcttgatgtgaaagcagcataaaaagactgccacactagacctaaggagcaccttttggagaccttagagtctatccccacagtgatacacttcctccaacaaggccacacctctgtgggccaagcattcaaacacatgaatctgtgggggccattcctattcaaaccaccaaacccaccaaggtctgtattaggaaattatatttcagatattgatgttctttttgggcagtgcaggggagactcaagctcctcatttgttctcagtatagtcagtggcctcctccgcctctctaaggattctctttttgtggtttttgtttcttaggatccattgtgttgaaggaagcattccttttgagtagcataatgaagtttgtcagggtcctgtgtcaccctgccagagcttgagtcttcccttgtaccaaccacacagctacactgttcgttacctgttctggggttctttggctcatcgatgtatcagtagcacagtttacctagaggctcaacatgggagagcactgtactcattttactgtgttcattatgggagctgttaagctcttactgtgcctactttttagattgatttttatcatatatgcacatgtatgtctgtccaggaagaaacagtgtacaaacagattaaagtttgtgtgttgttccttgcaattgtacgcatccagggggagacacaggatgcatggatcctgacctcatggacaaatggagaccaatatataagtcaaggtttgctttggggaattaatcaaaattatttgtcatgtcctcatttatgaataagactgttgagccaggtgagatggcacacatttacaatcctagcattggggaagtagaggcaagaggagaaaaccaaattgaagtgacaaaatacttgtaagtagaaccactcaggatccaaatattttagactgacacgacgcctacctggagaaacgaggttgctagggttcagctctgcagctcttgtgtatgttcgcctctcatgacaagcaatactcaaggtcatcaaagcccagtgtggttgcatgagttacctgatacccataaattcatggaaagcggccaagacgtcctgagtgatcatattgcaaaactgcctaagaaggctttgtgtgcttacaaagtaaccaggcactaacacatccaccagatgaaaaccaaattgaagaatataccaaaatagattaacaagtacactttttagtgtcaaacttgagctgaaggtggccttcatccttgcttggaaactgttctatcacagggataacccacacacaccatcactgtaatccatttggaaatgggaactggttacctctcaacccagatggtgggatccagtctttgctttaacaaatacaaattccagttgccaaaactttgtgtaggaacatttgggggtcaaagtgataccagcagcttccaaagacaggcagctccatgcctacctgggcagatgtggttggaaactggcaactgtcagaacatttagagataggagtttggagtcttgccctgttcagaaaaagtgttcttccaaatggctatggatgtgaaaaatggtggtattctctgtagtagcttgagatgtatagactatgatttttaagtcaaaaaagccttgcacattattttaaacattttgaggggtgtgtgtgtgtaaaatcagtttggtaaatacaaaatttatataaatttgctcaactgagaccaagcatacctgatctgaatggattttaaaatccatagtagatagaatttaaagacatcttgaaagttaggtcagaagatcttgtaaatttatgcttattttgcctgtaaaatttgagaaggttgacatttaagtttaaagttcagaaatgaaaccctagagtggcatacaaactgatattagtaaagcctgtgttcctttctgagaacagtacttgggccctgctgcaacagtgtgtgagagagagagagagagagagagaaagagagaaactctggccccctggaagagcagcaagtactaagcatctccccggcctgctcctactctggtttggaggaagatagctagatgacagcttctagctgcttcatgtttttatctgcacccctaaaactatgctctttatctgtacctcaaaatcagtaataaacagagtgggtgccaaagaggggccaagtctgctgtctgtgggcctcttccaactgtaaatcttttccggggtattgctccctggaacaattggaactttgccggggcttttctgacctcctcagctcttccatctgaaggtcctcccatctacttgggctgtctccctttttagctgttccaggcactgcccacacatagtacatctcttgtgtatctaatcttatctgagcatctcaccaagttaccagaagtccctgggactagttctaaagcccaggcaggccttgagtttacgactgacctgcctcagttcttgagtagtttggattacaggctcaagccactagaacacactagttttgttttccccctctcccgccccccccaagaaaggatctcatttaatagccctggctggtctagcattctcattatagcccaggttagccttaaatttgtggtactggataacaagagtgtaccaacaagcctgacctccaaacacagtgtcttaaaagctgttttcagctataggagcagaatccaaagatatggagagcaagctgttgatattgtcatgccattctgaaaaacagtggaactagatatggcagcacatagctctgaaggctgaggaatgagaatggagagttggaggttatactggacttcatgagaacttgtctcaggaagaatcaatcaaaatcaccaggcagtggtgattcatgctttttttttttttggatttttcgcgacagggtttctctgtatnnnnnnnnnnnnnnnnnnnnnnnnnnnnnnnnnnnnnnnnnnnnnnnnnnnnnnnnnnnnnnnnnnnnnnnnnnnnnnnnnnnnnnnnnnnnnnnnnnnnnnnnnnnnnnnnnnnnnnnnnnnnnnnnnnnnnnnnnnnnnnnnnnnnnnnnnnnnnnnnnnnnnnnnnnnnnnnnnnnnnnnnnnnnnnnnnnnnnnnnnnnnnnnnnnnnnnnnnnnnnnnnnnnnnnnnnnnnnnnnnnnnnnnnagtgctgggattaaaggggtgcgctaccacgcccggctcttctttttttttttttttttttttttttttttttggtgattcatgcttttaatcctagcactcaggaagcagaagcaggcagatctcttgagttcaagccaccctgatttacagaatgagttccaggacagagccagggctacaagtagaaacctaccctgttggaaaagagaggtggggggagaaagaggaggaggagaagaagagaagatgttcagaggtagaacacttgtatagtaggcatcgatgctctgggtttgagagagaacagacagagactgaaagatacacattcatgctgagtgtgtaccaaggaggcacagtgtcagatctggagctagagttgcaatgagttgtgagctctctgatgtgggtactgggaaccaaacccaaatcctctgcaaacacgcttaaccatgtctacagcaccagtcatttttgagagacgagcaggtgatcttctgggagtgctgccacacccactccagtaaagactgtatggcaggcccaaaagcttggatgcagtcctgaggccgagtttaacagaaactcagtctcctggaaccttggcacaaatgctccaaacctgttgctgcattagtcagtgaatgggtctgtgtgcgttctttcagtattgttttattataggggcctccaagaaatgattttataaataacctaaatcaaattaaactttgcttcctggccttcaccaatgtgctaggcaggccttgagctgaccctgagcttcgaattttgtaaaaatgttattcattcagacaaaatgccccagtgttgacagttagtaatcaggcatctcagtttgccagataggagcaagtattctcagggctagttcaaaacagtaaacgtaaaattctcattgcaaacatgaatggcagcctacattacataatagtagaaagaaggtgggttgtggttttaagaagaactaaagtattattcataaaaaggttagtaaaacgaaattcccctggtgcatgtttttcactaggcctagagaaataacataattaggtatttactaagggacccctggtggtgggtttaacaatagactagcattgcatcagatctttcacctggctcctgtaaatagctgattttagatagggctgttcctatctcagttgtaaacactgcctggctcctgccagctttttatgtatacattttctttgttttgtgtaaagaaccattatgcatctcgatgtcccatggctgatgtgttgcctagctttcttgtttttcttctgtattataagtctggtggttgctttaaaaaattacaatcagatacaacactctctctagtgtccgtgtctgctttctcatccactgaccccttgctcacctataccagtatcctagttccccacgggttaaaagaccaactgagtccagtctgtgacagagggcatgatggcatccatgggtgcagtcatggaaatgtgcacaatatctaaactccatcctagtaacaagcctgggagtcagtggcgaggctcagcaggaaaggtacctgctggaagcctgacaacccgagttccatccgtggaactcacactgtaggagagaactgactcccaaaagttgtactctgattcccatacagcacaaataaataaataaaatgtaatttcaagatgtttattgcaccaatatgtttgtgtgtgctctacaggtgtgtgactagccttagcggccagaagagaacatgcagttgcctagggctggagttacagatactagtgagatgtcataagggtgctagaaattgaacccaggaatttgacatgagcaatatgtactctgaaccttggagccaactctagcccccatttttcattaagcacaaggagagagtttcctgacctacattacagaattagcccaaatcctctttcaccactagaaagcagcatgatttgtttttttcatagcattcattaaaacctgatattattttagaaattttgtgtgatattgagccggagtttcctgtaccccaggctagtcttaacttgctacatagttgaaggtgaccatgaattcacaatcttcctgcttctactccctgagtgcaggcattctccatcccgcctaattttcaagagtgttttattggatattgtctgtcagaatttaagtaggagctttatctttcttgcttactatatgctactgcccaggccagtcacagctttcaaacaatgagatcacacaactggtaaaagtgtgtgtgtgtgtctgtgtgtgtgtgtgtgtgtgtgtgtgtgtctgtgtgtgtgtgtgtgtgtgtgtgtgtgtgttgagtatatgtagtgtgtatgagtgtgtgtgtgtgtgtaaaagagttgtgtgtggctgtgcatgggagtgtgtgagtgtggtgtgtgtgatagagcatttgggtgtataagtgtgagtgttaagtgtgtgagagtatgtttgggtaagagtgtgagcaaaagacttatgaacgtacgatgacattcaccaactgcagaaagccctcctggtgttaggatgctccttttcagaagcccctgacactgtgctgtaagtggagtggaaaataaacacaggatcacatcgagtaagaaaaggcacacttgatgagccagcatgtttgtggggaatgttgaaattcgatttctggccactatcgctaccttttctaaaattccaagataaagactggaggcttcacctgttgctcactgtcgttgcctaaagctataaataggtctgcagctcatctccccttttagcagggaagggtcagattacagggggcaaaacaaaataataaaatgagtgtcctggtatttcagagagtcattccgccatccccacagtctctctccttcctctgctgtgctatcctagaatcaaggatcccagccacaatgcctctattcaaactaacaggtaggtgtgcagaaaggatttggagaattttttggaaatcagggattttttttttttaattttccgtatgcaaccattcctttaactactgtgtcagattcagcaaccctttatgtggggttcataatagcttcagatggacacgtcaggccaaggccaagcattttcagtgtttgctttctttctggtagtgggaggagggttattttctcaaactatatctttgaatcccttagaaaactgatttcacagcccagaaaagggttgtcagtcctgtcctaaagatcatgaccatgggaggaacgttagcccagactgttccagtgttctacggtccacacttgaactcagaggattcttttaaaaaagaaatcagttgtatgcgtgtttcactgtaaaatgccagacatgtgaaataaaaagaacaattacaccaaatgttaaagtaataaacactcacttaggaaaactagaaaatagtaacttaaaaagtcacatagtcttgttgagggattcacaaaacatttccgagttcagcgtctcagtctgtgggttatgggagagtaagaacgccgttaagaatacagttgcatttctgttacacctgggattgttcaacttttgggcaggataaactttagcttaacataatgtgatgacgattatgtatttattccaagtgcttcctaaaaccatttgaaatggctggatgatatttgagttttcttagttatctcctgcggttttttttttaaaccatattttacatgtataaacgtcctcctgaccttatttgcatctaaaactttcagaaatggtggttccgtggatgctacccacttgttcggtgctaccaaataagctgctttgtttgcccagtcccagcattgtttgagagttctagtgctcttcaacagattaatcctttgtttccctttaaatttccatcctacaagtacctttagcgtctcagtagtggagtgtgagcttgacattagcacacatcccaggttcaattcccacccagcaccacagccctgcaaagaagtgctttttaaaggatattatatgcttaaagacatatgctaggaaggatgggaaagaaagcatttagtgaccttatccccacaatggccttgggcagtgcgtagactgaagatgagctagaacacttggcctactcctctctgtggcagcctacaggctgtttctcagagcctgggttcatggccacaacagatgcccagagttgttcatatgtcgtgtctcatttgtttcacttcacacaggtcaaggaaaacgtgagtattttggactatttttcctgccgattgcaagtatctgtaaaagaagtgacagtgttccttaatttacaaaggggcctatttctcagcagtgtttataaatggaaccactcaaagccagcaatgatcagtaataaccgtagatagcaaacaaccttcatggttctcctggatttccaaaacacaaaaactaaaaacaaaacacccactattttcctcccgtaaaggaaatgtgagccagggcatgtaatctcagcattggggaggctgaggcaggggaatggagagtccaaagctagcctggcccccagaatgaaaatctgtcttaaagtataaccagaaaacgcacaggcaaataaaggccacctcccaagtcacttgtttgctatttttaaataaaccatacagattagtaagcagagtgtactaaacctcgagttaggtgatcctctagtgcaaaacaaatttggttgtgattttttttctttttttggccagataaaacatgattttcgataaaattagctttagttgtgcgttctgcccactctccagttttaacgttcttttgctgactgatgtggttctgtctccaagttccttggtaaactgagatgtgggaggctggagcctgcaagttggcctaccccacacatgaatgaactctgctgggaaataggcctggctttccggacctgcgggctgtggaagtgagcatggcgatctttttctcaagagctgagtacttcctgcattggtaatcccgggtattagagagagcgctacacagactttaaatatttcacatttgatctccatggtagcatgccgagggtgacttgttattaacatcctccttctatgatgatgaaccatgaggcccctggtgactgtggtttgttcaaggctacccagatgccatggacaccctttcccaccttaatccagtgccctgttttgccattttacctttttcttttctatctgtcctgaaatagacatcctgtccctgagacaccaccacccctcagccgtctcatgatctcaaacatgctaagaaggggtcggtaattatctccacatgcccgaggagattttttttccttcctgaatttggattgtcagcacatcttatctacttacttttaaataccaacttcactttttcctgcctgaagtcaccatcatgcccagaagtagtgggaaaggcagtgccctcgaattagcgatcgaatttcagctgtgcttgcatggtgtcaaatctgctgtctaattctgtggaaccaaatagcaaccatatcattttgggtcatcacgtaagctacttgaggatataactttcagtcgtcgatagtggtttagagaaatgcagccttagtaaaaagctatactttttaaaaatgtatgaagcaagtggatataaacagtcccagataataaatggttgttccggaagagccaggatgtcaccagatgggatagggtctctggcatcaattctatacggtcccttcctaaggtcctcaacagcactgccacaggcgcagcacgacaagccattgacacctcattctcatcatcataaccaactgacctatctccatttgcccttcatggcgcatgaagcatctaacttcccctgccactcatctccgaggtgcccatgatactctgggaggaacgatgctatttctaggggtcagctggggaggcctcagccatcacttatgtctacttaccgttccatttgcttcgctgtgggctactgtgcttgccaatgaacgactaacagctcccaagctcgcttctcgattcgaggtttctggatgtgttggagcatgacaagacaaatgagtgttcgagattcaagtaacaccatcttccctattaactctgccatcaccggccaggattttaatctagtcacctgacatcgttggtgacattacaagtcactcgctatcatttctaatggatgctttattccatcccatcataactacatatcatccttaatggcccaaagctaaacaactgtgagcttgcccagcactgccaaataattacctcattcagtttaatctgatgctttgtttttcttgaagggtttccacacacattgtgtcacaacagccttgagagtgaggttgggtggtgttagtacccctacttaacacgaaacggttaaggtgaaacagagcagggtgagggagttgataagcacaggacttgaactcattatccactacatctgattgaaaataatcaccttttggaggcctgcatagacccgggcacagaggccattctcactgggtcaattgctctgtcatctccatggcaaatttctgtgtctgttgctccagtagctctttgctgttctcagtactgctcaccagctgttttctagaaataccaaaaggctcttagaagtgtgagttagaagatggctagtgagctgggtatgtagagaagacagtggaattcaacagaaaaacagacacttttgggccaccgctaccccaaatgatgaaactgggtcttacatcctgaaggtctggggattattcactgtcagggttgtggagctcagccttgtttcttcattttaagaatgggaaaactttggctgggtggtggtggcgcatgcctttaatcctagcacttgggaggcaggggcaagtggatctctgagttcaaggccatcctggtctacaagagtgaattccgggacagccaggatgacacagagagaccctgtcttgaaaaaagaaagggaagcaaaacaaagcaagcaaacagaatggggagatgtgggctgagtccatgcagtccctggaacccaccacatggtggaaggagcaagctgacaccccaaggtgtgctctgcctctctctctctctctctctgtctctctttctgcctctgtccctctgtctctgtttctttctgtctctgtgcctctgttctgcctctctctgtctctgtctgtctgtctgactgtctgtctgtctcacattcacacacacacggggtgggggtgggggaatataaggaacaacagtaggttggctttctaagggtcactcattgtcaaaggccatgcccacaaggaatggactcccatcacatactactaagctttggcaactcccttttaccacataacaacatatcatagatgtcaagcttaaaaaaatcaaaaaaccaaccaaccaaccaacaaacaaacatggaggttagctcccaggatcatcgatcctttttatagtgtcttcaaaactatcaggaagaaccagatgacccaatggaaaggactgtgttgtgtgataactataaaaccaagcttagccctgccaggaagaagtaatgttacatgaagagtttgtcctgtaggagtctagctgcatctgtagggttcttcagatgtgtgctccatacacaaccctgcagtaatgtgaaagccagcctggagctctggttggagatcagggaaaccatgaagccaacacacattgtcctaatccttgtgcctgacctttcaaggaaactcctgggtggcttttggacaagggtgtcaactaatatgtgaaaaaccttttttagaaattgatgatgcaatgcgtagctttgctgaaaaagtgtttgcctctgaagtcaaagatgagggaggtcggcacgagatctcccccttcgacgtggatgagatctgcccaatttcccttcatgagatgcaggcccacatattccacatggagaacctgtccatggatggcaggaggtaagtgtggcaacttgggacaaagtgtggcggctcctgaatgaaggtctggctgagtgtggatcacacggaaaggaagagctctgcccgggttccgagttctttctcctcctctttgcataggttagggtgagtcgagaagggacagagaaaaaaaagaaagcagtcccctcctgctgtcatctaccccgtaagctaaatcaagcctttctatcacccccggaagagaactggagcctccggagtgggctgacagctgcagttagcactctcaacatagacatagttggcacgggagctggaacacaaatgcctcatcttcagccatgtcccctagtcaacagcgctgctgctctctgataggaatccctctctggcaagtctgaggacaccttgaccttagagggacatgtcttcatctctgcccattattgcacctgtcatgcgtgttaccctcccctcccccgccggagttaccagaggtctttcatgaaaagaataatttccctttatttcactccctatagctctgtaccacacagttctctcgctttcagcagtccccagcccactggtctcctgtgctgtctttttcttggttttatacctttaaaggagaaacagcaaatcgtctcctttgagatcctctgaaggacctcactcagggatagtctctcttcaaagtagaaactcaaaaacaaaacaaaacaaaaccccccaaaacaaaaaactgttcatataagaaaacagtatcagccaggagtggtggcacacaactttaattccagaactcgggaggctgaggcagacagatctctgtgagttcaagactagcctagtctacaaagtgagtttcaggatagctgggactacacagaggggaaaaaaacaaaaaacaaaaaacaaaaaacaaccaaaatagcaacaacaaaaaacaacacgaaagtttctaataatatgcaaggcatttgatatgcattacatctcacataacataaattctataaggtagctagctactttagcttgtcatcattgtgacaaaacacccaaacacgtggacttaaagaaggaacagtttatttgagctcagagtctcagggttttcagtccacggtcagttgaccctgttgtttgggcctgtggtgaccagggacatcacggagttcatgatggagcaaagctggtagctttatggcacaaagagggagaagggaggaggaaggctcggggtctcagtatccccttcaagagcatgcccctgataagcacctcattcctttccatcagctgctgagccttcagctcagggtgggatttcagacgtgagctgtaacagaacttcctcagccatggtactgagctgccagggaatagaagttcagagaatgtaaggagcgtgaatacaatgtcacaggatacagctgccaccacctgagttcactgtaacagctggattgctgactctgttcacaccagaccactttggaaggagtgtgttatgttgaaggccttctaatatattcccagccttgagtcccctgtactaaaagcggccttcgaatttgctgggtactttcttctttcactatggtagtatcttgtttctgacaaccagtccatattttaattttttactttttttgtcctcaaaataaaccagcatagtgaaaaatccatctattccaatggaactcctgaggaggaccaagctaattattattattatttgttaatttcaaacccagaaaaaggcgtttccaaggacggaagactgttaatttgtccattccacaaagtgaaacatcttctaccaaactgtcccacatcgaagaatttatttcttcatccccaacctacgagagtgtgcctgacttccagagggtgcagatcactggagactatgcctcgggggtgagtcgtgctttgccgtgcagatgtccccaaagacagacacgtgcagctccatgctgtcttgccttcctgtgaaagcgggtatcgcttgcgtcacttgccctgcttcctctgcatctcagtcctaatgaatgtcacattcctgtgttgctccgtcatcccacacaatgtcttctttatctgaattgctaatacactgacaccacgaagaaggaaaggattcactgtagataacccagacagcagtggacagactgggcaaatggactaaagcgagcagcagggaagaacacttggttgtagctgactgcaccataaagtaaaaacagaggtgaggggatgagggcggagggcactgcaggttagctgagcttgccaaggaggctggaggcctgagttcaagccccagcttccacatggtggtggagagaaccaactcctgcagttgtcctctgacctgcatatatgcaccatggcacgtgccccaaacaaacaaacaaacaaacaaatcaagggaaatctagcggagggggtgctggaggaatggttcagcagttaagagcactgactgctctggcagagaacctgggttcaattcccagcacacatgtggtggctcacaactgtctggaattccaatcccaagggatgcaatacctttgaccggcccgccccaccatgggtatgattgtggtctcacacacacaagcatgcaaaacattcacacacataataaaaaaaaaaaaaaagataaagacgaaaaagaaaattccaccgaagccattgtctttagaccatataaagcccccggggtttgttgcagtagcttacacagcaggtatcccttggagtggattctagtatgtcacggggatactgaactcaggttactaacagtgtgccctgcttgtcttatcctaacagttggccagttaataaatctctgctacagggacttgcagtatcagcaccatattggtgaaactgttatcgagcgctcagtctctgctccaaatacggattccgtgcctatgctgagcccctgcctcatgtaactgacccagcagggtaaggcctgagacattcccaaggctcagtgtgctgaaacacaagccattcttgtctgtttattttcttcagtatggtaaccagggcgccgagcagtcggcaggaacagacggtaaagagctgacatgaatttcttgatgaaatgttaaagacgtgataaacacaatttgggaaactccagatttcaaagcttaaagctcaggagacacacttggcacccgtgcgctcaggagtcacgagaacagaaagaggagagaaatgtacggaagtcagggaagagtgacctcacaccagagacctgggcatggggtcttgtggcttcacttagcagctgagtaaggttatgctgctgagcaatgttcctcttggctgtgctcggtagccaacaggagcatcctcgaagagtaagcacggagatggggaggggagtctcaggactaaggtctcagggcctatggagcctgataagtaattgacccaataagggccttattgctaggccttattgcatctaggccttaaatgctaaggtgccgagggctgggcacattcaggtgagtagaagcccaccctagtcggtgaggagctgtgaggagctgatagaacaagtgtctttggaagctgacctcagacctaggcttgctctgggttctttgagctaatgtaagcatctatctttcaaaatagactgagtgtgagctgtctgtctgtgacatatgccaccctgctgattgccagggttcattcttggatctggctggctgggtgtctccttcctcaccggctccatatgtctgtgtcattccctgagttgcacagtcagcggaagaggaccccgaagaggaggaccccacttcagtcaagggtataccagccagcagctgcactcccctgatagaactccaaatgagctctcaaaatagacttaccagtcaggatccgtcatctgtatctccagcctttgagatcacacttatgttgtccccagagagaaggtctttgaggctctgatagttcagtaaactggaggtaaggcagcaaatttccagcagctcaaaccaggttttattctcttttaacacagagataaaattctctacgactgtctaaaagaagctgggcatggtgacacatgcctgtactcctaagaaagatgaaacaggaatttgaggtctgggctacatagtgagttcaagacagtgtctcaaaactttttttaaagctaggtatgttgtctcagacctataaccccagcaccagggtggaaaaggtagggggagtttagggccattgtcggcaacatagtaagttggagacctgtctggctacatgagaccttgtctctaaggcaagaagataaggaattggaggtcaagcctcagctataaagtgagaccctgacttaacaactgctggtcctcgtcaatataatttgacagttgagatactacactcagaagtttatattttattgtattgggtttttttttaaaatatttatttattatatgtaagtacactgtagctgtcctcagatactccagaagagggagtcagatctcgttatggatggttgtgagccaccatgtggtttctgggatttgaactgaccttcagaagagcagtcgggtgctcttacccactgagccatctcaccagcccatattgggtttttttgtttttgttttgagataagaccttgtcctggaatgcttgtgtagatctggctggtcttgaacttacagcctcaaccttccaagtgctggaattataggcatgtgccatgatatctaatttcagaagtatgtactttcagtgtgcaaatgtctcacgaagggaagaacacatatgcaatggtagactgggtcttcttacaaatggaatcgcacggcctggggatgactcactgagtgcttaaagtgtacccaatgcgtgtacttaaagtgagtactcaaagaccacttaaagtgaaagcaggaaggatctgagttcaaatccccaggacccatgtaaaaagctggacatggccacacttgccttgtaaccccagtgctacaggcagcagagacaggagggtccctgggtcctattacctgtcaacttagctctaggttctctgagaaaccctctctcaagggaataaggcagagactgacagaacaagacacttggtgtcctccttggtcgcacacagttgccaactgtgcacctacaccacacacacaattgtgacatcatggcatattcagaacagatgcaattataaagcacaagcacgggaggtgaaattccacattttctcatatgcagaacctagttttaaaattgtgtgtgtgtgacaaaaccagaaattgggaaagggatcatgaaatggggaagaggtccgaaggaagggggagatgagaggatgcgctaggaaagcaggggaacaagatgagagccgggagcagctgtgggaggaaggggcgtagggtggggcacagcgcaagggagtgggtaagaataaagtatatcggcacagatgtgaagacgccatgaagaaacccagtgctttatgtgataacctaaaaccaaacagaaaacagacagtgataataaaaagttctttttagccgggcctggtggcacacgcctttaatcccagcactcaggaggcagaggcaggcggatttctgaattcgaggccagcctggtctacagagtgagttcaggacagccagggcgacacagagaaaccctgtctggaagagaaaaaaaaaaaaatgaaaggaaggaaggaaggaaggaaggaaggaaggaaggaaggaaggaagaaaaaaaatagagtatttagccccgaatttttgagtcctaacaacaaaaaacccccagaaacaaatgcaaaactcatagggaagatttctactgcaggtaaggtatggtacagaattaaaagaggtaggaaaaacggcgtctttcctgcagagagtcccagggtcccagggtcccagggcaggaggaatcagcagggcaggctggacaggctcaacgaggccacagcacacaggaaagccacaactatgagaggtcagcctgtccactttcttgggtctcacaggctcagctctgacactttcttggcaggtaaccgttgaagactttgaggtggtttgtaaaggtctctatcgggcattgtgtatacgagagaaatacatgcagaagtcattccagaggttccccaagaccccctccaagtacttgaggaacattgatggcgaagccttggtaggaaacgagagcttctacccaggtaaccgagtctctcatgaacataaggatacggctttaggcttatctactaaataggattttggtttttgtttgtttgtttttttttttttttttttttttttgagacagggtttctctgtgtagtcctgactatcccagaatttgctttgtagaccaggctggcctcaaacttagagatcctcctgcttctgcctcctaagtgagtgctggaactaaagtcatgggccaccaccgcctggctctaaatatgaactttaacatatgatcttagatgatcagtgacccagccttaaaagtatctcggttgccattggccctaacccgcggcccacatcggtcactcgattgagcccttataatacctctcttcaggatctctgaacccccaagttagacctgtgtatctcgtagtctcagtggttgtaaaggtgtcctaattacttggctacgattcagcctcgctctctttgtctttgtctctttgtctcattctcgcttctctgctggttattaaagcacagttctactgtgttattttcctgatttaaaaaaaaaatgtccaagctccccatcccctctctacatagccagtcagaatcacctgcctccatccaaagggcgtttcagccattcaggttcctactggctcacttaacctacttctggaccaacacttctatcccctccctacctctttgttatggatgggcgtgtctgtgacaggacctcaagttacccaggtaactccaaactagatttgtagctgctgatgtccttgggctctttgacctaccttctcaagttcacgaaagacaggctagcacactacctccagctttagttagaagccttcctagatctccctgtagttctgcactttcttgcagttgttctgtttctagcttctccccatctctggtttgcctttttccttacttatttaccctaaatctacaagtctagagtcaacccaagtcttcagggtacaaactgaacactattgtttctttctctctttttcttccttctcctcctccccggttctccttccctcctcttctttttttggagggaaaggattttatttatttatttattattattattattattattttaaacaggaaaggggtattacacaggacaagcactccaaactctttttttttttttttgatttatttattattatatgtaagtacacagtagctgtcttcagacacaccagaagagggagtcagatcttgttacggatggttgtgagccaccatgtggttgctgggatttgaactctggacctttggaagagcagtcgggtgctcttacccactgagccatctcaccagcccccgggaaaggcttttaaagacagggtttcactatgtagctctgactgtcctgaaacttgctctgtagaccagactgaccttgaactcacagaaatccacctgcctctgcctccctagtgctgggactaaaggtgtacatcaaaagtatctggcaagaggctgtttttgtttttgtttttatttttcgagacagggtttctctgtatagccctggctgtcctgaaactcactttgtagaccaggctggcctcgaactcagaaatccacctgcctctgcctcccaagtgctggggattaaaggcatgcagtttttgtttttaagtaacactctggagttttatcacacctttatataatttttcaataaagcaataaactgcaccaagcagaaagtctgtgtgaccaatttcaggaaattaaaagtctttatcatcacatctggttacacctgcctggaagcccagaaaccagaaatcaggagtataaggtaattccttaactacagaacaagttggagaccagcttgggctggaagagccactctagaaagtccaccctccactcccatctccttaactaactaactaactaactaattaactaattaactaattaactaaacaaacaaacaagaaacacatgaatgaattaatagaaataagaagtagtgacctacacctttgatcctagcactcgggaggcagaagcaagtggatctctatgagatggagggcagcctggtctacacagcgagtgagagaatagccaaggattcataatgagactttgtctcaaagataaaatttaaaaagtatttctaagtagtgtatttattatataaatactactaaataacttgaaaatcatccttatgataaataaaatattatcatagttgtttgtttgtttttgttttttgagacagcgtttctctgcatagccctgcctgttctgaaactcactctgtagatcaggctggcctcagactcagagatagcctgcctctgcctcccaagtgctgagatcaaaggcgtcagcaatgcctggctcctagttatttctatactaacaatttaagtcactttgggagaataagctttgtttaaaggacaaatgaagctgagtgttatggtgcatgactttagtcccagcactcgggaggcagaggatctctctgagtatgcgtttaggctggactggtttacatagtaagttctaggacagccagggttacatagtgagaccctgtctttaaaaaaagacaagttattccacctatagggttgcagatccctttagcttctttggtacagcgaaatacctaataaaaaaatggaaaaaaaaaaaagacaagttaaataatgttggactataactgatgaagtatgagatgacaaacgaatgtaatttgcaatatttcttatttgggttattttttacatggtcattcctcctatgtgctgatctattactctgtgttttattgaaaaagtatttacccctcctccgaagaagggtgaagacccctttcgcacagaggaccttcctgcaaacctgggctatcacctcaagatgaaagctggtgtgatttacatctaccctgatgaagcggcagccaacagagatgagcccaagccctacccttacccaaatctggatgacttcctggatgacatgaattttttgcttgctctaattgcacaagggcctgtgtaagtgtttaccgagatctgaacattagcagccagtgttactgatggtcataagaatgcttttcacatgcttatcattgtcaaatactgccttcaactccttcattccttgcaagggccttatgcatgcacatttctatctatctatctatctatctatctatctatctatctatctatctatcatctatctatcatctctatctatctatctatctatctatctatctatctatctatctattctctatttatctaatctatctatcatctatctttcatctctatctatctattctctatctaatctatctatcatatctatctatctatctatctatctatctatctatctatctatctttatttctctatctattggctatttatctaatctatttatcatctatctatccacctatctctctatctctctatatctatctatctatctatctatctatctatctatctacctacctacctacctattatctgtttatttatttgaagtgtctcaagtgggccaggttaacatcaaacttgctatgtagtcctgactgaccttgaatttctaccctcctgcctctacatcccaggggctaggactacaggtttgcaccatcatttgcagtttatgcagtcctggggataaaacacaggacatcttacttgctaggcaagcattctatcaactgagctacaaccctactctttttttctttagattttattttattttttattttatcatcattatctttattatcttgggttgttttgttttgttttgagacagggtttttctgtgtaaccctggttgtcttggaactcactctgtagaccaggctggccttgaacttagagaacctcctgcctctgcctcctatgtccaggatcacaggtgtgtaccaccatcactgcccggcttcttttcttttttttaattatgtttatgtgcaagtgtctgcatgtgagtgcagatcctatagagaccagaggtatcagatcacctggcccagtggttacatgtggagtggtgagatgctacatataggtgctaggaaccaaactcaggtcttcttaactacagattcctctccccagggttccaccctaccctgaaataccttaattacagtttaaggagttgaagcatctgaaagtggagggagccagtaattagctcaatgtcacacagtgctggaccaggatggtgcccaagtctacggactccacagccagggcccttacccttgacctacacaggcctcatagatttttaaatgccatctctagtgctccctcatcaccatgtccagctctgatggaaagctgggtactttttcagtgggattaactggaagaaagcagtatctgttcctgcaaccactccctcttatgggtgagaagagtcctggaggctttgaaataccattttccttacatgtcgagaaagatgcttaggatcctgtgtgttcactttccacagtaagacttatgctcaccgccgcctgaagttcctctcctccaagttccaggtccatcagatgctcaacgagatggatgagctgaaggagctgaagaacaacccccaccgggacttttataactgcaggaaggtaagtgtgtcagctcagagctgctcagaggggacacctgtgtggagacttctgagggaccagatgccgcttgctgaggaacctacaacttctgcaggttacgtggattgtagtgaaggcaggtaaattatatctagcagatttgaaaggccatgctgttgcttgtcgaagagagaaagaaagagagagagagagagagagagagagagagagagagagaaagaaagaaggaaagaaagataaaagaaagagagagagagaaagggaaaggggaggagagaagaggagagaagagaaagatgaggacacaggaaaattataattaagaagaggagcccactgggaagaagctgagtagcagagagattgtccaacttgaggtgtgcaaggcccttagtttggggcccagaactgcagaaatataatcaccagtagagtacaaacccgaaactttgaagagttactattttaagcgtgggagagcttccttctcaccaccacccagctgttttttgaagcagggtcttgtgtagctcactctgtcctcaaacttgatatatatttgaatgtggctttaacctcttgatcttcctgcctcctgctctccagggctgagatctggctgggattacaggcttatgccagtgtacccaacaagcttcataacttcaatcttaacttctttgggtacaaaagccatgatagcgtattggatgcgctgatgtttgagagacgcaaacatcttccctacatcctgctcacatcctggctcacattcttgcacaggtgcacagagtacacaagtgggtctttaccactgggccacctctaccgaccatcagtgtgatcagttctcaccactatctgtctctccctccttcctcagtggggtctgcaggccttgtgatcactgacgggggtatacagaaggctgatcgctgcattttctttctctgaatgtgtgcctaggtggatactcacatccatgcagctgcctgcatgaaccagaagcacctgctgcgcttcattaagaaatcttaccatattgacgccgacagggtggtctacagcactaaagagaagagcctgactctgaaggaacttttcgctaagttgaatatgcatccctatgacctgactgttgactctctggatgttcatgctgtaggttgggaagatgttcgttttactcgctctaatggcagagaaccccaaatgtcccaagccgtccctcccttagcacatccctcgtaaccccttggctactgtgatgactgaaagcacacctgatgagttttgaggtatcactcaccctggacttcattcttagagcccagcctctttccctgagattggtctcctgttctgcttggttgtccctggggactctgcttccaggaagctctgataatcaaaatttctgctcttgtttcttcgttcagggacgccagacgttccaacgttttgataagttcaatgacaaatacaatcccgtgggtgcaagtgagcttcgggacctctacctaaaaacagacaactacattaatggggagtattttgccactatcatcaaggtgagacaaaaaaaatacttggtaaggttcatgaataggggaggagagaaagacaggaaagaaggaagggagggagagaagggggagggggaggggccacaggggagggaggaaccttgggggaaatgtctctgtttctagggtagagaagttaaggtgtggtttagatgataaggacctggcctgaggtttgggcagagctagaagcatccttgtgatgtggtttaagaagcaagagtagcaagtagactaggggtgaggagcgaggaggtgtggggttgtgcgggtggagtagggggttgggtgggggtgtatatacagctgcactgtctagaaggtcccatggctatcttgtcttcctttgtctgactcttgaccacttgagtcttttgtcctcaaccaatccttgactctctgttcccttagctcttcaatagtttttcttcctccctttcacatttacatgacttctctttctaaatctgactggtctagacctctgggggcgctgatgggagtttctggccttcgacccctctcttggttttgcaggaggtgggtgcagacctggtggaggccaagtatcagcatgcagagcctcgcttatccatctacggtcgcagtccagatgagtggaacaaactctcctcttggtttgtctgcaatcgcatctattgccccaacatgacgtggatgatccaggtccccaggatctagtatgtatttgtcccttcccctggggaggcgttctgaagcccatttcctcttacctgcctcttctccccacttgaaccagaaagttatagctcatttagataaaagtcagctttgctgaagggaagtcactccagaatcaatcaatcaatctctctctctctctctctctctctctctctctctctnnnnnnnnnnnnnnnnnnnnnnnnnnnnnnnnnnnnnnnnnnnnnnnnnnnnnnnnnnnnnnnnnnnnnnnnnnnnnnnnnnnnnnnnnnnnnnnnnnnnnnnnnnnnnnnnnnnnnnnnnnnnnnnnnnnnnnnnnnnnnnnnnnnnnnnnnnnnnnnnnnnnnnnnnnnnnnnnatacttccatagttcttactctaagtaacaacagtagctagaggaagaactgtgtgcatactccatcagtcttctctgttagagtaagaactctgcacatcacactctggcttctccgtgttacagtttgtctgtactgtattggcatataactttattttatttttattttttggtacagaaactctctctatagtcctggctggcctggaactttctatgcagatcaagctggctttcaatttgaggagatctacctgcctctgtctcccaagtgctgggggtaaaggcctgtatcaccatatctggctctttatttttagttttgagacagggtcttactatatagcccagattagaattgatctcataatccatctgtctctgaatcctgaacgctgagattacagaattgtgccgtcaagtcagactccaattgtagttgccttatttctgaacctttgccaccaccggctgactcacccacaggagcccaacctctttataatcagattatttatcggcagtgcggctgaagaagcccactctctttcctatcataggcagtcacccctgcctgcagggatggcttctctcctatgagcaggatcattgatctttggtctaacttacatgcttacacgctctctggcagcccactgtgtgccctcactgggactgcggagatggctcagccggtttagtgtttgctccacacccatgaatctctgagttcagatttctcaaaacacctaaacatggcacctaatgtattgagttgttactagaaaaaattttgtcatatatagagtggtgtcatttattattaccacaaatgaagtgtgtgtgtgtgtgtgtgtgtgtgtgtgtgtgtgtgtgtgtgtgtgtgtgtgtgagagagagagagagagagagagagagagagactctctttgagtgctgaaattaccaaattccaggcatatgccccttcttctgtctggtttatggagttcaggggattgaaccctaagacaagcactctgccaactgagctacatccccagagaggtactcttctttttagtgcattgatgttttgctggcatttgtgtctgtatgagggtgtcaggtcccctggggctagagttacagtatgagctgccctgtatgagctgggaactgaacttgggtcctctggaaaaacagccaatgctcattaaccacttagccatctctctagcgccaagaggtactcgggatagccactcccgtttgctgtcttgtgaccacacatgtatttgatcgctgatatctctatgacgcaattactatagtccccatagctggactcagttgtaaaggttgagttttcttgccacagagtttgtaaaagagcaggaatatgttgtacagtggccaatcctaagcccagttcaacccaaactcctcttcatgtgtatgcacagagaatatctgggagtgggtgtaggaggaacacagcaggtctttttctggcctgtaacatttggtcctctggctcatgcacagttgtcctactatgctctctctcctaattcccttcccttttgcctttagtgatgtgttccgatccaagaatttcctgccacacttcggaaagatgctggagaatattttccttccagtgtttgaggccaccatcaacccccaagctcacccagacctcagtgtcttcctcaagcacgtaagcatgagcctccgggctcctaacttctcctcacaagccatttagccttgctggccatcactgactctcctgcttagttatctctttacatccgcctcccctttggagctgtctgaggagtttcactgagtgcagagcccctgccctcagactgaacccacagtgtggctcacttttctgacagatcactggctttgacagtgtggatgatgaatccaaacacagtggtcacatgttttcctccaagagtcccaaacccgaggagtggacaatggaaaacaacccgtcttatacttactatgcctactacatgtatgcaaacatcacggtgctcaacagcctgagaaagtaagtatgggagaaatggggctgaagcactgtcctttgcaacatctgctgtgagtgtgtttctttattagcgtgtgtagtgtgtattgctgctgctgtgccatggagggcacgaggaggtcagacaatgaaggcttggttcttttcttgcaggttattgaggcagggcccctcttgtttctaccatgctaggtactagatgatttgagagtttcctggcagttcttgccccagcccccatctcaccacgggagtgctggcatcacagatgcatacgaccgcatcttgttgttgtttttattattaaagatttatttgtttttattttacatgtatgagtgttttgcctgtatgtatgtctgtgtctgtgcactgtgtatgtgcctgatactcaaagaggcacatactgaggctgaagatgtccctgcatggggtaggtactctattttccattctctcttgtctcaccatatcctctgctgcctcttaaaaaattatatatatatgtgtgtgtgtgtgtatatatatatatatatatatatatatatatatacatatatatacatgtatatatatgtatatatatatatatatatacacatacacatatacacataatgtacatgtacttaggaaaaagtacaatgaagagttacaattatgttttgcttgacctatggttgctgttcccttcccaagtgttaactctgccaatggattttcttgtaaatttctctgctgtgagaccccactttccttttcacagggaacgaggcatgaatacatttctgtttcgtccccactgtggggaggctggggctctcactcacctcatgacagccttcatgatagcagacaatatttctcatggactgaatttaaagaaggtgagtttagctcgctctttgctcattcctctcttctcttctcttctcttctcttctcttctcttctcttctcttctcttctcttctcttctcttctcttctctcctctcctctcctctcctctcctctcctctcctctcctctcctctcctctcctctcctctcctcccctnnnnnnnnnnnnnnnnnnnnccctcccctcccctcccctcccctctctctctctctctttctttctttctttctttctggagacaggatctcatgtagcccaggctggactacttgaatttgctctgtagctgaaaatgatcttgatttcctgattctcctgcctcaacttctgactgctgggatttgggattacgggtgaatatcactgagtcaggcttggaatctttcttttcttttctttctctcttttttgttgttgttgtttttgtttttggagacaggctttctctgtgtattgccctgtagaactatctttgtagaccaggctagctttcagctgacagatctacctgtctccacctcctaagtgataggattaaagcagaatctttactttcttagttcttggttttttgttgttgtttgtgtgtgtgtgtgtgtgtgtgtgtgtgtgtgtgtgtgtgtgtgtttggcagggggtggtggtggtgttcaagatagagtttctctgtgtagctctgtagaccaggctggacttcaactcagagatccacctccctctgcttcccaagcgctgggattaaaggtgcatgtcaccactgcctggcaagggggaatctttttctttctttctttctttctttctttctttctttctttctttcttttttttttaatttttgttgttgttgtttaaagatttatttatttattataggaagtacactgtagcggttttcagacattccagaagattctttaatggatagttatgatcagacactccagagattccgttacggatggttgtgagccaccatgtggttgctgggatttgaactctggaccttcggaagagcagtcggcactcttaaccactgtgccatctcaccagctcgggggaaatcttttcttaacagtaataataattctatattagagcctataacaaatgaatcgtgatggtccattttcagtatgagatacattttgagcttgacatcagcaaatcaatgctttttttttttttttttttggtttttcgagacaaggtttctttctctgtgtagccctggctgtcctggaactcactctatagaccaggctggccttgaactcagaaatctgcctgcctctaaagatttttgtttttgctttttgtttgtttgtttgtttgtttttttcaagacagggtttctctgtatagccctggctgtcctgaaactcactttgtagaccaggctggccttgaactcagaaatccgcctgcctctgtctcccaagtgctgggattaaaggcctgcgccaccactgcctggctataacctgaatgcttttaaacttcttagggttgaaaagttctggtcagctatgagaacaagtccaaggtatcaggagtggggaagatctgcactatccttagtgcagatctcaagccccaggagggtcgggaacttggggtgagctctatgctagattagtgggcaagttcctaactccttgaagagccagcctgtgactctgagggcaggacattttcgtgttcagggactacagaactcactctctttcaccagccactgctgtcttttctgtaggctgatatccaactttgcaaggttgaaaagtgaacagcttcgattgtgctactctgagtccttaggactcttattgtgaaatgaggatcattgagcgtgatacaccttggggttactaaggtagctccttctatgacagccaaaggggttcttttgaggttaccttgttaattgccctcagagaggaattaccacatatctcccaacttccatcttggagctctcacaggcagagtcagagtcagttggcttccctcaggctacttttgcctggtttcttgttgtagcatgcttttaaatgtctcttgtgatagtcataactttcatgaagcaaaaaaaaaaaaaaaaaaaaaaaaaaaaaaaaaaaaaaagaagaagaagaagaagaagcaagtttcggggtgagttccgaggtgtaattacttagatcagaccatttaactttgacaacttagtactcagatttttaaaaagctgatttagcctaattcttctgaaagcaataccagaacttttaaaaaagattattattattattattattattattgtgtttttcaagataggatttctctgtatagccctggctgtcctggaactcactctgtagaccaggctgacctcgaactcagaaatctgcctgtctctgcctcgcaagtgctgggattaaaggcatgcgccaccactgcctggctgttttttgtttttctctttctttcgctctttctttctctctctctctctctctctctctctctctctctctctctctctttctttctttcaggatttatttattttatttatgtgagtacactgtggctgtcttcagacacaccagaagagagtatcagatcccattacagatggttgtgagccaccatgtggttgctgggaattgaactcaggacctctggaagagcagttggtgcttttaacctctgaggcatctctcctgtgtttttgtttttcaagacacggtttctctgtgttacccttgactgtgctggaactgagtttgtagactaggctggcctcagactcacggagatccacctgcctctgcctggattaaactgtgggattaaaggcgcctgtcactgtcactgggccaccgtgggatttttgaggttttgttgtctgtccctgtccacgctccttattgttgttctcgctgtcttttcagagtcctgtgctacagtacttgtttttcctagcccagattcccatcgccatgtcaccgctgagtaacaacagtctgttcctcgaatatgcaaagaatcctttcttagatttcctccagaaaggcctgatgatctcactgtcgaccgatgacccgatgcagttccacttcaccaaggtgcgccgcacgtacgcacgcacgcgcgcacgcgcgcacggaagcttgagcatggtttgctgagctctccctcaccacgcagaaatggaaagtcaaatcagggcgcttctttctccgctttctgtaggatgtgtactgtttcttttactaatgcacttcctcccttacgtaaataactacaggagcccctgatggaagaatacgccatcgctgcgcaagtcttcaagctgagcacgtgtgacatgtgtgaggtggcaaggaacagtgtcctgcagtgtgggatttctcatgaggtagacttgaccgtggctccctacccttctgagagttgggtctaacaatctaaccactgaatcattaatgaggaaaacaggcaggaaagcttttgcacagaccacatacagctgctatggctagggactagaagactgtcctgggctgggaatacagcttagtggtagcgcaagccttcgaggaactaatttgagtccctacagctcctccgtcaagccctattctctgccatggctccacctttgatttctcaggaaatgtgcccatggagggaggcactacagaaatgacccctggtctcctcttgtttatgagtaacatgaagattacggtggaggagcaatcgctgcctatcccggtataaaaagagactcagagacctcttttcccattgtcttacaggaaaaagcaaagtttctgggcaacaattaccttgaggaaggccctgttggaaatgacatccggaggacaaatgtcgctcagattcgcatggcctatcgttatgaaacttggtgttatgaactcaatttaattgctgagggtcttaaagcaacagaatgaataaagtaaatagactaaataacaccgcgagtgggtttttcattgaaaatttgaatcctatactacttgttattgaggccctattcttatttatttatttattttcttaaaacttattttatgtatgagtgctctacctgcatgcacacctgctcaccagaagagggcatcagatcatattataggtggttgtgatggctcacaccattgctgagaattgaattcagtacccgggaagagcacacagtactcttaacctctgagccatctctccggcccgagaccctactcttaaaataagccaagtactgtattaagccttccattgatactcttttactcggttcctgtcacacctttgtacagtagatataatttctattttggggataatgagccaatgtaaggtagatgatgccctcaggacactcttcatgtagggcagctgcgggaacaaagtttgtgtgactccagagtctgcacaaccttcaggcaggacagttatcagaagaagccaaggacataagccactggcttaatgctaagaagatgggctttgggactcagagactagaagagagttaaagcacctggaaccatttaaaagttttttgacaaagcataagtcaaccatggctttcttaggtaaggccagaccagttatatgaaagcttagaaaataagcacttagccgggcgtagtggcgcacgcctttaatctcagcactcgggaggtagaggcaggcagatttctgagttcgaggccagcctggtctacagagtgagtttcaggacagccaggactatacagagaaaccctgttggaccaccccccccccaaaaaaaaaagaaaagaaataaagaaagaaaatgagcacttgtgagcagtactgagggaagagctatcctagtgggggagtcttagcttgctgaagcaggagacctctgaaacgtgttagaaatatccctactaggtacagtggtgcatgtcttcagtcccacactctggaggcagaggctctgagcttaaataagcctgttttacatagtgagttccaggacagacaaagctacatagtgaggccccatctatagatagatagacagacagacaggaagacagacgagagaggggaaagaaggaaagagggagagggggagggggaggggagggagagtacttcctgttaggagatgctccagctatccagattatatttgctcacacacaactgtgttgccatctagtggttgggttgataattcactgtttattaaaaagggggttatggactaaacataaagattttttttttttttggacaccaaaagtataagaaagatttcattctactttcaagtttttcacccctgaggttgtgagatgtgtggagagcacatccctcaagacttatcacaatgaaattcgagcaaattcctgagtgttttcactttctgcacaggtagccgtgagcttaggtgtgccccttgggacgtgctcatactagctgtggggtaagactcctcttccccattcttgaagttcaaattgcttttcggggaatatttatcaaggacctgattttatttcatgttggcttcctagtcactaaaataatacaaattactatgtattatcttcagacttaaaggacacctctcaccattaggtgtagctccatcctacccatgagagggcagtagaacacatgcatgttaattaacgttcatcttggaattcaaatcttcatcctgctaaagaatcttcgtggatgcaaacttcaaaatgtaaatcttaaaaacgctgttttagtcccgaatttcaccttgtacaactatctgtgatactttccaaacagactagattaaatgccacttgtgttggctcaggactatgcttgcaccccagaagcaggggtaggaggataagaagtttgaaaaataataaagaacacacatgtctacatttaaagacatacacattaggtaagggatcaatggagtttgcaatgtattccaaaccatatttacatttatttcctcactggagtattttaaaggaattgtcaatacttctccctcaggtagaaagtaatccttttactgtccccacctcatgtccccacctcatagcttcacaagggattgggacttttttttttttttccaagtcttggttgagttggctggtgacagtcatccgcgatgtgtaattaaacacctctctgtggcagtcttctattttggtacctctgtgtgaacaagccagggaagtttggttaccagacacaaggtcggatggagtgggtggggtggagtggggcggggcgcggtgaggtggggcagttagatcgtgctgggaaataggttccactcatcccagtctcgcagagtgaaactgggctattcttgcagcaggcacagagccatgtgcatacctgagcaagatcgtgtggtagggagaatttaagcgtgagtctcaagtgggtgtggcaacccagtcggcacccggactaggcaccaaaggcatccggcttgtgattccaaacccggggccaggtgcgttattggcatctctttactagctggcattcccgatgaatgtttgctccctgagctgctttggggttttcttaaagaagttgctgtttggctcctctggttctactaggctctgccttgctgtaaaggtctgtctcgtgtagtcgcacagaccgtagatccggagatagagctttggctccaggcctgggcaggggctgcaccgtggaaccagcgcggtgcagcgcacactggtaccccagcgctgggggcggagagaccgcctggcgtgggttccgagccttgaggagagccctggaaggacagagccttactgggtgagctcgggggcgtgcccaggcaaaagagggcgtgtcttagcctggagggcggggactgcggaacctgtgggggcgggacgaagatgtgggcgctggatcccagaggccaccgacgcgagtctgggatccctgcgcgaggcggcgtcgcggcccaggcaggtaggcgacgggatgcagcgagggagtggggccatggggcctctgccgctcagctgttggcgtcgccccatggcgtcccgtgtgttcgtggtcagccgagagctgggtacctcgggccaggggaaggcgggtgtcagcctgcgagccgcgggcgcggtcgggggtgcagggccggggagcccaggcgctcgccgccgcgaggaaacgcgcctatcaggcggtcttgaacttggacgtgcccggacggagcacttcagacaagcggtaaagcgtgtgttcgcgcgctttgcttcggaactacggggcaggcacgatagaggaagtcgtcaagtagttttttaagataaaattcctacagtgggactggagtaggactgtggagtaaccaggagagaagatgatgattagattgtgagtcaaaaggcttcgctctggagctcagagccgcaaacaaaccgtcacacctccgtcagggttaactctaagaggtgtgtgtccccggagtgcaaaactgggacgctcatgggttctcatgttctgagaggaatgacagtgttctacaaatgtcaggcattgttgtttgatacacacacacatgcaccccggagcatgtgtagtttgtaaaactactaagtgcctagtacagtaggcaccctggtaaacctttatcccaaagctactactgattcgcctgtattgttagagaaagttctaacttctgtttactatgtaaataagttatctaagcgtcatttccacataatcaccattgtttgaagagcagagctattcttaactgagtcatgacattttctaaaatagcatgctatctgtataccgtagtgcaatcatttaccatgaagcttgtaccaatcagaaaatctgttactttgccttagattagctgaaggtatttcataaagtgagctgagagtactgcctcaaaacaagacttttattttgcaaattcaggggctgcttataaaaagatctgagttctctaaaacaaagttaatgtgtggctgtggcatttgtacagtttttattatagacatttgtgttctctacttgtgtgtgtgtgtgtgtgtgtgtgtgtgtgtgtgtgtgtgtgtattttagggagagatgggaaatttaaaaaggaatagcagtctgtaaccatgaggtttctactagggatacgtaagagtgatctggagtattttcaaagacagaaaccagcaactgtagtaattgtgtctcaaggcctcttgttagtctgttaaatgtggcaattgactttttttagatgcagaaatatcagtgtttttgattgagaacagtaggcaatttctttccttttcttatttaaaatttaaaattagggcatgtttgtcaccaacgtgcaaagaatcctgggttcaatcccagtacttcataactgggtatggtggtggtcccatcccactcagcataagagaggtgcaagaagggactcagaaactccaggtcactccttactatgtaatgagtttgaggccagcctgggatagtgtgactctgtaaaaaagcaaaacaaaacaaagttaaaaattcctcatattacagggcttgcgagatgctttgggaaatgagggcacttcttgccaaatctgaagacctgagttcaatccccaggccatgtagaaggacttagccagctatgtagattgtcctctgaccacaaaatgtgtcccaacacattgccccttccccaaagtaataaatgtaataaatttatttatttattatgtgtatatgtgtgggcacccaaggtgcatgtatggaggacagagggccatttgtaaaacttaatttctccttctcttgcatggtgctggggattgaacttgggctcagtggcaagcacccctacccactgagctaagtcactagtccttcctttctgtccttgtaggatgagactagggttctgtgactactgctatcagtgaaccacatccctgcctccaactggaaatcatattactagtaaaagatttgtagtgatccttatgtgctaggcaaggattgtagagcattgtgtaccacagtggagtttagtggagtgcaagagggaaaactacgagtaaataatccgatccggtgctgctttaagagttttatttgtggggctggagatgacccagtggttaagagcacttgttgctcttccagagaacgtcagttcccagcacccatgtctggtagtttacagctgcatgtaactccagctacatgggatctgacggtcgtttctgccttccaaggacaactgcatacaggtaacatgtgctcacatatacatacatataaataaaaacaaatctctagcccagtgtaatggtgcatgcctttactctcatcacatgggggaggcagagacaagtggatctctgtgaggtcaaggccagcctggtctacatagtgagagtttcaggttagccaaagtagagtgaaacctgtttcaaaaaaaaaaaaatcttatagaaaaagaattttatgggctggagagagcactgcctgcttttccagagggcttgggttcatttcccagcacccacatggcagctcacaattgtctgtaactcctgttccaggggatccgacgccctcacacagacatacgtgtagtcaaaacactgatggacatagaaataataaatacataaaattttaaaacaaaaagttttatttaaatattttcaacaattcacttgggtttttgaaactttttttttgtttgggtttatttttgtttgcttttcaagacagggtgtgttttgcatttgtgtgtgtgtgtgtgtgtgtgtgtgtgtgtgtgtgtgtgtgtgtagccttcactgtcctgaaattagcttggtagaccaggctgtcctggaacttacagagatctgcctgcctctgctttccaagtgaaacttaatttttgaaacaggatcttactatataacctaggttagcctttaactcattatgtcgctcaggctggcctgaaatatacagtaattctgtctagatcccagtgctaggatttcaatgtttgccactatctatgcttggctaaaactattttcaaacaagctttaatcctgtactgaataatgagttcactgagaatttataatctgttgatcttacagggctaataccttacattcatcctacttactgaacaactatccaaggtgtagcttagaacctacattgcagacatgcacaggaaggatgctctcctatctaggagagtatgtagtccttctacggagtgggctaaggaagtactgaaaagctattttgaaagctgactaacaataagagtatcaactgctacttgtgggtcttcctcagtgcaggcagtgccctgaattcatttcatgtattagcttatttagtcctcctcacaaaaaggctctcctgagggatgctgccattagctcctcactgggaggcatagagaaactgagtaacttgcctgccacccctttatgtagaaaggggtcaggctgtcaggccgcagtaacactgaatgcagccctcaacccctgcactatactgagtttcaaatttagtaagacccagtgcaatctaacaggtatttaaaagaagcacttttatgaactataaatgagacagacacaaatacatgagagagagagagagagagagagagaaagagagagagagagagagagagaggacagacagaaaaactggtattacaagatatagaggcatgtccaagctacaatttaattatactttgtatgtaaaactttttttttttttttttttgctgatgaatgacatgggattcttcttgtttttaaactcccagccacttagggcattctcttagcaatataagaggtgtctgtttttcaataagaagtttaaaatacttgttctcaaaccgtgacttaaatgttaactacaagaaaagaaaatgcgccaagcatggtgaacatacctatagttccagcacttggaagactaaggcaggaggctaggacatttggtaggctcacctgggctaagaatggaaatctgtcccaaatcagtcagtcaatcaatcaatcaaccaatcaagtcattatgataacaatggtctagacagaatttaatgggaaacaatgatgaaagcagttgttctacatgtggtaggaaggagggctgtagaagggcaccatatttgagtttggttttgaaggatgattaggggtctgcagagcaaggggaaggtatgagtgagaaccaggaagctgtatgactatacggtatgtttgagaactgtgtcttagtttctaaagtcaggggtacagagatgggtggttcagctaaaaataatctagaaaaagaaaattacagagcacagttgtttgttacattagatcactgcaattgctgggtaaggtctctggaataaagaagtgagtgactaagttcagtttggggaaaaccctttcactgtagactatggtattgagggtatttttttatactgagaagtatcacatatttttaacaaatactcagtgtaaagctatgattcggggtaggggagagagatgaaagagtctgttgatgtcgttattggagaaaagctgtatattgtaagaactttgcaattttgtctagagacaatagaaccagagaaggctcctttggaagtagttaagattgcaccgtgatgttctgtgtggtggctggattgaaagaagccaggcaaaaggcagagagagaagtctgaaggttgataagatagataagtagatagatggatgggtgcggccatgtttgctgttgttgaagtactcctggtggagcagatgaggacctggagaaagaaacaagtccagggcagaaagaggagagggcagacaggaaaccggggattgggagtgctcaagacctgttagctgtggagggcaaaaggcagtggctttacttcttagctcagggacacagggcctggctgtattatcttttacatgatgggatgataattgtctctgttctgaacttgttgggtttgaagtgttctatagagcatgggggtgcagatgtcgggcaaggtccagaggccaggatgagcttggttggtgaggtttcagacctaactagctgaagttcacacagtagagactcactccgaagagatttactcatcataaagcattcaggtgaggtttagttgaaagttcaacagttttcaggctgactaggtagcctggttggtagagtgcctgcgtcacttgcttgaagacctgcgattagcctccactatcatgcagaactaggtgtggtgggccttgcctttactcagcactaaggacgtgtggaggcaggggaatcgtcctggcctactgggagtttaaagtcagcctgagccttactctctagccctttgatatttcctttaaaacaggccctttcagatattttcaaagagaggctgggagtgtagctgagttagtagagtgcccgcctagcatgcaaggggttttgggtttgatcccagactcacataggttggttgtgttgaaaatgtttgtattcctggacatcaggagaccctgtgtcacagacagacaaacagacaagtaaatggagttggaaagattgctcagtagttaggaacacttgctgcgattgcagagactctggcttcaattctcagcgccaacatgacacaacagttcagggaatctgatgctctcttctggcttcccatggcgcagcacacatgtggtacattggtatacatgtaggcaaaacactcatacgcataaagtgaaaatagataaatcttttacaaatttttttttcaaattaaaaataagagacttaacttaccactctcccctttatttaaggacagatttgaggaagagccattattggctaatttagttatatcagaaatattggaaaccttgaaggagaatgtggctttttaaggtcagtcttttagcttgatcttgcctgatcccagcagaggcacatgggtctcttggcttgagaccaggctggtatgcaaagggagccccaggccagccagggatcagcagtgtgaccatgtcacagaaagtactgattcctcgacgtgacgtgacggtgtgttctagaaaccatggaattctggtgtttgtcctttatttactgtgaagaacgtgtgccatgtgttctgtattaagaccgaaagcagccattactgagcctgttgctattttgaccacttaaggcagctcgctgttccggctgggatttccaacccttacccagtgaagtgcaaaagaatgaaacagactcctcggagaacctgacacgtgcatcatccacatgttttccagactggaagtaatttatgctcaggaaagttgcctaatgaatctttttttaattttaatatttacatgatttatgttggaattgaaaataacaatgaaataatatttgatctaaactccatgctgtacttacatggtgacgtgtgcatgcgcgcgcgcgcgcgcgcgcgtgtatgtgtgtgtgtgtgtgtgaaactacaccagcattctctactgctgttgttgcccttccacaactttccgttgattccgtccaccccacatcatggctgcccacagtctcctccccttttgctgctgtgtgtctgctggttgcttccctgggactcagtctctccccacacacatcccttttcttagccccttagtctaggcgtcacatttattgttttgagccggtctcctgtaccccgggaactttgaggcaccatcttcccttgccctcctgggctctgggttagagctctaaccagcacactgaacccagacttcactcctgccctcatcgtatcttgggctcctctgttacatcgacattccatgtacacacttgggaagcaaggcattccctgagataagcgtagtcgctaattttcctatctttggtctaagtttat

SEQ ID NO: 768 - DNA, 2320 bp, Mus musculus
cgccatccccacagtctctctccttcctctgctgtgctatcctagaatcaaggatcccagccacaatgcctctattcaaactaacaggtagaaattgatgatgcaatgcgtagctttgctgaaaaagtgtttgcctctgaagtcaaagatgagggaggtcggcacgagatctcccccttcgacgtggatgagatctgcccaatttcccttcatgagatgcaggcccacatattccacatggagaacctgtccatggatggcaggagaaaaaggcgtttccaaggacggaagactgttaatttgtccattccacaaagtgaaacatcttctaccaaactgtcccacatcgaagaatttatttcttcatccccaacctacgagagtgtgcctgacttccagagggtgcagatcactggagactatgcctcgggggtaaccgttgaagactttgaggtggtttgtaaaggtctctatcgggcattgtgtatacgagagaaatacatgcagaagtcattccagaggttccccaagaccccctccaagtacttgaggaacattgatggcgaagccttggtaggaaacgagagcttctacccagtatttacccctcctccgaagaagggtgaagacccctttcgcacagaggaccttcctgcaaacctgggctatcacctcaagatgaaagctggtgtgatttacatctaccctgatgaagcggcagccaacagagatgagcccaagccctacccttacccaaatctggatgacttcctggatgacatgaattttttgcttgctctaattgcacaagggcctgttaagacttatgctcaccgccgcctgaagttcctctcctccaagttccaggtccatcagatgctcaacgagatggatgagctgaaggagctgaagaacaacccccaccgggacttttataactgcaggaaggtggatactcacatccatgcagctgcctgcatgaaccagaagcacctgctgcgcttcattaagaaatcttaccatattgacgccgacagggtggtctacagcactaaagagaagagcctgactctgaaggaacttttcgctaagttgaatatgcatccctatgacctgactgttgactctctggatgttcatgctggacgccagacgttccaacgttttgataagttcaatgacaaatacaatcccgtgggtgcaagtgagcttcgggacctctacctaaaaacagacaactacattaatggggagtattttgccactatcatcaaggaggtgggtgcagacctggtggaggccaagtatcagcatgcagagcctcgcttatccatctacggtcgcagtccagatgagtggaacaaactctcctcttggtttgtctgcaatcgcatctattgccccaacatgacgtggatgatccaggtccccaggatctatgatgtgttccgatccaagaatttcctgccacacttcggaaagatgctggagaatattttccttccagtgtttgaggccaccatcaacccccaagctcacccagacctcagtgtcttcctcaagcacatcactggctttgacagtgtggatgatgaatccaaacacagtggtcacatgttttcctccaagagtcccaaacccgaggagtggacaatggaaaacaacccgtcttatacttactatgcctactacatgtatgcaaacatcacggtgctcaacagcctgagaaaggaacgaggcatgaatacatttctgtttcgtccccactgtggggaggctggggctctcactcacctcatgacagccttcatgatagcagacaatatttctcatggactgaatttaaagaagagtcctgtgctacagtacttgtttttcctagcccagattcccatcgccatgtcaccgctgagtaacaacagtctgttcctcgaatatgcaaagaatcctttcttagatttcctccagaaaggcctgatgatctcactgtcgaccgatgacccgatgcagttccacttcaccaaggagcccctgatggaagaatacgccatcgctgcgcaagtcttcaagctgagcacgtgtgacatgtgtgaggtggcaaggaacagtgtcctgcagtgtgggatttctcatgaggaaaaagcaaagtttctgggcaacaattaccttgaggaaggccctgttggaaatgacatccggaggacaaatgtcgctcagattcgcatggcctatcgttatgaaacttggtgttatgaactcaatttaattgctgagggtcttaaagcaacagaatgaataaagtaaatagactaaataacac

SEQ ID NO: 769 - protein, 732 aa, Mus musculus
QVEIDDAMRSFAEKVFASEVKDEGGRHEISPFDVDEICPISLHEMQAHIFHMENLSMDGRRKRRFQGRKTVNLSIPQSETSSTKLSHIEEFISSSPTYESVPDFQRVQITGDYASGVTVEDFEVVCKGRALCIREKYMQKSFQRFPKTPSKYLRNIDGEALVGNESFYPVFTPPPKKGEDPFRTEDLPANLGYHLKMKAGVIYIYPDEAAANRDEPKPYPYPNLDDFLDDMNFLLALIAQGPVKTYAHRRLKFLSSKFQVHQMLNEMDELKELKNNPHRDFYNCRKVDTHIHAAACMNQKHLLRFIKKSYHIDADRVVYSTKEKSLTLKELFAKLNMHPYDLTVDSLDVHAGRQTFQRFDKFNDKYNPVGASELRDLYLKTDNYINGEYFATIIKEVGADLVEAKYQHAEPRLSIYGRSPDEWNKLSSWFVCNRIYCPNMTWMIQVPRIYDVFRSKNFLPHFGKMLENIFLPVFEATINPQAHPDLSVFLKHITGFDSVDDESKHSGHMFSSKSPKPEEWTMENNPSYTYYAYYMYANITVLNSLRKERGMNTFLFRPHCGEAGALTHLMTAFMIADNISHQLKKSPVLQYLFFLAQIPIAMSPLSNNSLFLEYAKNPFLDFLQKGLMISLSTDDPMQFHFTKEPLMEEYAIAAQVFKLSTCDMCEVARNSVLQCGISHEEKAKFLGNNYLEEGPVGNDIRRTNVAQIRMAYRYETWCYELNLIAEGLKATE

SEQ ID NO: 770 - DNA, 42061 bp, Homo sapiens
  misc_feature (1)...(42061): n = A,T,C or G
gtataaaacgtggtttttaggctatgtttgtgattgctgaaaagaattctagtttacctcaaaatccttctctttccccaaattaagtgcctggccagctgtcataaattacatattccttttggtttttttaaaggttacatgttcaagagtgaaaataagatgttctgtctgaaggctaccatgccggatctgtaaatgaacctgttaaatgctgtatttgctccaacggcttactatagaatgttacttaatacaatatcatacttattacaatttttactataggagtgtaataggtaaaattaatctctattttagtgggcccatgtttagtctttcaccatcctttaaactgctgtgaatttttttgtcatgacttgaaagcaaggatagagaaacactttagagatatgtggggtttttttaccattccagagcttgtgagcataatcatatttgctttatatttatagtcatgaactcctaagttggcagctacaaccaagaaccaaaaaatggtgcgttctgcttcttgtaattcatctctgctaataaattataagaagcaaggaaaattagggaaaatattttatttggatggtttctataaacaagggactataattcttgtacattatttttcatctttgctgtttctttgagcagtctaatgtgccacacaattatctaaggtatttgttttctataagaattgttttaaaagtattcttgttaccagagtagttgtattatatttcaaaacgtaagatgatttttaaaagcctgagtactgacctaagatggaattgtatgaactctgctctggagggaggggaggatgtccgtggaagttgtaagacttttatttttttgtgccatcaaatataggtaaaaataattgtgcaattctgctgtttaaacaggaactattggcctccttggccctaaatggaagggccgatattttaagttgattattttattgtaaattaatccaacctagttctttttaatttggttgaatgttttttcttgttaaatgatgtttaaaaaataaaaactggaagttcttggcttagtcataattcttatattcactgaagtgcctttatagaatgctaatattaatttcaaacttttggatgtgacatttggaagtgttggaatatctgagttcctcatttcatcataacatcaaatatatcaaagcctgctttaaagtattaccttggggatgattcatagctatttgtcagatttgcatacattaagatgccattggagctcttttgtctcgtttttgcattactgcacaatctagccatcttggtataggtggaggagcattgatgctaggggctggagaacttgaggcccgatataattttactacgccggcccagtttcttcaattgcaaaatagaagagttgaattaggatatatcagatttcccaaccttaaggagactttaaaaagaataatatcaaacctaggcattttcaactaacactggaatactaattttggagaccttggtttactctaccaaagacatcaaaattttttttcacttttttttcttgaaaaggaggcagggaaggtaggtcattaacatgtggctgaagtaagcttgggaaaaccaattttaaatgacaatattttttctagctaggacaactagaaagagtaaatattttaattataaaatgtatttgaaaaagaaatagaattagggaatttgtatctttcaaactatcacctcatatagagacctaggtgatagtttgagagagaaacatacaaagtccacagttctatttctttttcatatacattttacaaaaatttgttctaatgtttgaccctctaataacggaaaagaggaaaggatgttttctggtgagaactgctgttctgttcagcaaaataaagctacagaaacaaataatgagaaggtacctaaagaagcttgtttatttggaatatgagggaaccacctgtgcatctctgtgctattaaggtttctgttctcataagcaatatttaaggtcactgaaaggccaacatagttgcatgagttatttgatacccataaatacatgagaagaggccaagaggccttgctagtgatcatttcgcaaaactgtctgaggatgtccagctccatgagagcacagagagaatcactgtccagtttccaagtgggaagggtatgctttgtaatgcttttaaaagtaactgggcagtgaaatgtgaccctttaccttaataaaagacagctggaacttcaggaacatacaaaatagaaatattctttccagttgcaaaaggaacataagagggttcagattcatgaaccaagagttgagttgaccattcttatttgcagttgaattctaccatatgatttacttcacacttgcaccgaaatagtctattataaactactggtgttgggggtggggcgggagtgggaatggggaatgaaggggaggaatgaacttagtttcttaactagtataaattcagattaccatcaacttgtagaagccatatgaagtaaaaatgggtagcacctgcaacactgggacttagcgtgctattaaatgtttctaaagatagaggcacgtagctacatgtctcataggggaggatgtggttgtagctagcagttgcctactagcaggcttctttatttgcagcagcctgaaatacccaggttaggaaaagcaatcttccagaatggatgctgtggacatggtacaattggcgctattgatactttctgtaggagcttgaaatgtgtggattgtagttaagtctgaaagaaaacttgcacttgattttaaaacattttcttataaatcaattcacatttataactgagacccaacattcctgataggaatatttttgtaaatcaatggtatgaagtgtaaagacatgttgaaagttagaagaagagatcttttaagtgtatgcttgttttggctgtgaagctgaggggtttgacatttactattaaagttcaaaataaaactagcatggcatatgaagtagaattaccaaggcctgtgtttctctaagagaaccatatttggatcccctgtgaggcatagccataagccctaacaaaatgtttttgttacactggtttggtacattttccttaagactttcctacctaatttatttatgtatctagcccctgtgctgctctgggcatacagcagtgaatctgacagatactggttccttatgaatcttttatattctactgagtctccccagaaacctctaaaacaaaatttcttaattgcaattttgtgattatttcaaaggtgaaggacggtgtttactctgatatagctcgtttaacctcagtgttctggctgctgacctctggacactgtccatagtcaccttccctgattttcctgcaagtcctcttggctatccaagatgcagcatatactgactcacaactcactgctacttgggcctctccttttcaagtcaaggctatgtagaaacagaaaccaatatttttatattgcttcaaaaatgtcaaagtgcttttgcatatcttattttatccttcacatccatatcaagtaggaatcatctccattttactgatgagaaaactgaatcccctaaaaatgtattgattttatctaaaattcaaacccaggtctcccgatttccagaatctgctttttttgattcactagtaggtttttttgtttgttttgttttggtttttgtttttgttttgagacagggtctggctctgtcacccgggctggagtgcagtggctccatctcagctcactacaaacctccacctcccaggctcaagcaatcctcccacctcagcttcctggtagctgggactacaggtgcaccaccatgcctaggtgattttttgtagagaaggggttttgccatgttgcccctgctggtctcgaactcctgagctcaagcaatctgcttgcctcagcctcccaaagtgctgggattacaggcatgagccaccatgcccagccactagtagtttttaaaccatgctgttcaaagtccttggagtgtaaagaagactttgcagagaggctgaacggctgtggttctgctcctcctcccttgtcccccaacttcaaggaaggaggaggaggtagggtgaagagcaggttgggaaaaagtgggagttcccaacaagtttcacaccagattaattccacgttcatctctttcattttaggctttcattcaagatttagtttgaggctgggcatggtggctcacacttggaatctagcactttgagaggccaaggtgggaggatcgcttgaggccaggaattcaagaccagcctgggcaacatagcaagaccctgtctctacaatgttttaaaacttagctacccccacacctgttgtagtcctagctattcaggaaactgaggcaggagggtcacttgatcccaggagtttgaggctgcagtaagctatgatagcaccactgcattccagcttggcccacagagtgagaccctgtctctagtggggggaaaaaatctttagtttaaaaaaaagatttcatacgtaaaactatgaaaaccacttgacttcaccaatctacttctacaaccatctatcaaactgggaatcactagatcacatcctcatgtctagtccagatcccaatattctatagacacaatcatgttcattgcactctacataatagtgagatggtgtataatacagtgcttaagagcccccactctggagccagaataccttgccttgaatgccacttctaccacttattagttgtatgaccttgagcaagtcaacctctccacacctgaagtttttcaactgtaacatggaagaaataatagttcttcaaaagactattgtgaaaattaaataatatatatatagtatgaatatatatatagtataaataatatatagtataaacaacatcaacaagaaacaataacttagaacactatctaacactgtttttattgcagggaccccatagtatgcctccctccctctctcctctaacagaacatagtacactgctgaagtacagcttgttttgtttaaagcaaattgctgaatttcatttccattccagagacaggaaataaagtcagtttgtctcacggaaaaggatgtgtctcaaaaatttgacttctttatttttaggcgtgtgtgggaaattattactgacaggaaaattagactgaatgcagtaaagtagcataaaattcctcatcattccacaggtttggttatgctccaaaccaaaacgcattccttaagtataaaggaattgttacacacctctaagaggatgacaaaacctatagttgctgctggcaactatgttccagttctattcctaaactggaagttgtaatgaactcagaactgctcccactgaagcaatgtaacaaaaaaaaatggagctggcagtttaccgatggtcaccctcagccccacagaactcttgggtatgctgtcttctcaaccacaacttactgtgggcattgaggcattgaaggatgtggggtgatgaacaggttggaaagaggtgggagccccagcaagtttcacagcaaggagagagacctgctatagcagaatggaggtaaaggctttctggacaacaaggagccaggcacagtaatctgtgtacagttaagtcctgtacagcgtcatctgcttcccgcagagcctcaggtatctccaactcaatgaactacaagaaatctcctatttaaaaagtacctttgtaaatttgatatttggatcttagaatgatttccactaaaataatgttgtaaacaatggttaagtccctaggttagctccaactgatgtggtccatgatatagctgaaatatttgcacaccaatcattttaaaggacataaaaaacaggtggggggctaggggagggataacattagaactacctactgtaggtgacgggttgatgggtgcagcaaaccaccatagcacatgtatacctatgtaacaaaactgcacgttctgcacatgtaccccagaacttaaagtacaattttaaaaaaagacatagaaaacaatatttttgctaaaactaaaacaaaaatagaattcagtgaggctagtttatcttatatgctggtgcctgaagaaaagcatgcttaattagagaaaaagaatgagtagatagacttttcccattagagggaatttctgggcattttccttgaaggctgcggatgatgatacaattgagatttttattatcgttttcctttaaatttagagtttgtttcctgatgatagaaataatacttgttcatggcagaaaatgtacataagccaaaagaatggggtaaaaatcaccatcatcacactacccagaaagagtaagagtgtaaactacacaagctgctttcaatgcctagagtgatatgtaaattaatacttttctttttttacaaagacaagattatactatatatacattgttgtaatattattttcactaataacattttgtgaatgtttttcatgttaatatgtattcatctacatcattattttattgtgtggcattttattttatggttataccatgctttattcaatcttttattgtagacgtgtgggtttttcctaccttttgactattataaatgtttagctacaataaacattcttgaactacatttttgattacttacataaaaactttcttaagaaagtcataaaaataaaggcacggtggctcatgcctataatcctagcacttcgggaagccgaggtgggcagatcacttgaggtcaggagttcgagacaagcctggccaacatggtgaaaccctgtctctactaaaaatacaaaaattagccaggcgtggtggcgtgcacctgtaattccagctactcaggaggctgaggcaggaaaatcgcttgaacccaggagacagaggttgcagtgagccaagatcaccccactgcactccagactgggtgacagagcaggactccatctcaaaaaaaaagagtcactgaatgtttccgaactgagaatataatgatcaagtggtttttcagaagatttaacctggtggtattatgcaatatggattggaggcaggggaaataattaggaatctattacaattatccaactttgaggtaactcatgacttatcaggtagaattacattggcttctaataataaaaaaaactgactaatcagtgactaaaacaaatttacttttcccttttttttttttttttttttgagatggagtcttgctttgtcaccaggctggagtgcagtggtgtgatctcagctcattgcaacctccacctcccgagttcaagtgattctcctgcctcagcctcccgagtagctgggactacaagcatgcaccaccacacccagctaatttttgtatttttagtagagacggggtttcaccatgttggccaggatgatctcgatctcttgacctcgtgatctgcctgcctcggcctcccaaagtgctgggattacaggcatgagccactgcgcccaaccatttttcttatgtatcaagaagtcttgctgggtatggtgatgcatgtttgtactcccagctactcaggaggcttgggtaggaggatcacttgagtccaggagttctgggctatagcaatctatgctgatcaagtgtccacactaatttcaacatcaacagggtgaccctccaggagcgggggaccaccaagttgcctaaggagtgaactagcccaggtctgaaacagagcaggtcaaaactcctgtgctgattttagtagtaggatcactcctgtcaataaccactacaccctggcctgagcaacatagtgagaccctgtctcttaaaaaaattccttaattaaacaagaattctaaatatgggaagtcctggactaatatggtggctttaggatgccatcagggaccctaattatttgtttctgttcagatagtcttcatgtggctcttgtcctgctcaccatttgtgttaaaacaatggttggtttggaggcccctatccacatatttcctttttcaggcaggaagaagaggaagggcaaaaggcaaaacatatgccagctgagctggtcccttttaaaagaacttttggagacatcccacccagcaattctgcttacatcactttggccaggctgtgtcaaatggccgcttctagccacaaaggattctagcaaatgctgttttttggctgagcacattaatgctcaaaccaaagaagtttttgtttgtaagaaaggtagggaaaatgatctctgggtaggcaactagggtatttacacaattggaatgagaaaattggagtgtaacttatataaagataggaattactgaaggagaagcaggttcatggaggaagatgcttggtttggatgtatcaatttgtggatactgttgggaaatccaggtaaaaatgtaacaaaaaggagttggaaagaaatgaacaaatattttggttcagtaacacctttgtaatgtgttgcaatattgttgattgagaggttggccataaggctaagcactaaaatattgttaagttttgccaacaaaaaggcttgtcccaattttcaaaaagaaatagttaatagtaaaaagatcatttggtctatgcccataattctgttgctaatctgaagtgccaagctcatcttcaatataagctgttataatttaaaatttctgctgagtctagcagcgtactttctttacctagcagtaactatcaaatatttagtcataactggccgggcgcagtggctcacgcctgtaatcccagcactttgggaggccaaggcaggtggatcatgaggtcaggagatcaagaccatcctggctaacacagtgaaaccacatctctactaaaaatacaaaaaatattagccgggcatggtggcaggcgcctgtagtcccagctactcgggaggctcaggcaagagaatggcgtgaacccgggaggcagagcttgcagtgagccgagatcgcgccactgcactccagcccgggcaacagagcgagactctgtctcgaaaaaaatatatgtatatacacatatatatacatatatacatatatatacacacacatatatatagtcataactaagactgtgtgttattatggaaagagcgtgagatttgggtccagagagccttggctttgccatttatgatgaacagaatgactttgagcaagatacctgtcagagccccagttttcttatttgggaaacagggataaggtattacttgccttacaggattgtaattagtatcaaatagataatgtttgccaaatgttttacatacaataaaatgttatacaaaacaaagctattgttcttattataacaataggtagagaagtggtaactggatactctggaggacagttgagtttctgtaaaagacttgaagtaaatttaacacttaattcattaaactgtcaactgaagttctgctaagtcagacacattactaataaaaacatgcattcctgagcgtgtgtgcgtgtgcgtgtgtgtctgttgagagcttgatgaatgtaccagcatattcaccaaccacagaaagctgtttgcgtgatgtgaaaccctgaggatcatagcttcagaaaccggaaagacttcactgtatttcactagggtgggatatcaccatcagtggtcctacacttgccaaagatccagtctgtaagaagatttagagagtattgaaatgcaatttttggcccaccacagatatcttctaatcccaaagtaaagactgaaagcttcacctgtttttcactatcaaatgcctcaagctataaataggtccaaagctcatctctctccacttagcagagaagaatcaaatttccgggggcaaagcaaaataataaaatgaatgtcaggatattttatagtgtcagtcagtcaccccacagtctcctctctcttcttttctactgtgctatcctagaatcaaggatttcagcaacaatgcctctgttcaaactcccaggtaggtgtacaaagtgtttggagagctcagttgttgttgttttttttttttttgacaagcaactgttcctttagctaccatatcagctttgatcattcatttagggttcgtgatagctttaacatacatttcaggaaaacacaaaatattttcaagggttttttgtttgtttttagttttgggatgtgggtaagtttctaaaactgttatcatgtatattgcatctttgatgatcccagtagaaaactctgtgaaatatttaatatctattctgctagtctaaacaaaacctgtgctgccatagctctgagacggcttctacataatgactctagctatggtattggctgaaaatcatgaacatgacaaaaataacccatgtgtgtattctgatggttcacgagaatagctttctgttgtccaggtttgtacgcagagtaatttttaaaataataatgttataatttttaaatgataaaagcaatacatgtttcatgtgaaatagaaattgtgctgaaaaaataaaagtaataaacattcgttttgaaagttgggaaattcagtaaaagtaataattttattttttacttatttatttattttttgagacagggtgtcactctgttgcccaggctggagtgcagtggcacgatcacgattcactgcagccccaatcttctgggatctggtgatcctcccacctcagcctcccgagtagctgggactacaggcacttgccaccacgcccagctagtttttgtattttctgtagagacagggtttcgctatgttgcccaggctcatcttaaactcctgagctcaagcaatctgcctgcctcagcctcccaaagtgctgggattacaagtgttagccactgcacccagccaaaagtaataattttaaaaatctgcacatccattatccaaagatattcactcttaacattttagtgtttttttttcttttcaatctattttctgtgtaaaattaaagagtttttttttaaaaggcactgttattatattgcacatgtaattttatatcctgcttttggcaggataatgttttggcttaactttacaacttatccttttaccatggtatcccaaacctttcctaaaaaccattttaaaagactgcatattctattttcttaattaatcccttaggttctttatggtttgggggtttttttttgtttgttcgtttttgtttttgtttttgtttttttagagacagagtctcgctctgtcacccaggctggagtgcagtggtgcgatcttggctcactgcaagctccacctcccgggttcatgccattctgcctcagtctcccgagtagttgggactacaggcgcctgccaccacgcccggctaatttttatatttttagtagagacggtgtttcacatataacacagtgaatatctgtattagccaggatggtctcgatctcctgacctcatgatctgccagcctcggcctcccaaagtaccaggattataggcgtgagccactgcacccggcctctttatggtttttttaagtataagtatgttctgataacaatattgacacctaaagctttttccatgtttaaggatgatttccgtaggatagcttctcagaaatggttgtttggtaggtgttactaaattgtttaccaaatgagctgttttaagtttactactaccaacatcatatgagcattcccatctttcttcatcagatatttttaaaaatcatattttatagagagtgccttttaaaaagtatacttataaatgttaagagacatattagaaaagaaaagaaaatgaagagctgtataatgaccatattcccaagctttctgatggcagaaaactgtagacaagctggaaggctgagctgaaataacagcaatctacatgtgtctaccccaaagcagtgattaatagccaccatgattacagaaagttgttcacatattttatcttgttttattttacttcatacagctgaagagaaacgtgagtattgcattacttttgctgccatttgtcagagtatcaatttaaaaaaatgatactattccttaattcagaaacatggctatttttcagcagtgtttattaaataatagccttgaaagtcaacaaagattcataatgaccatagatatcccatagcatagcaaataagctcatggcttttctggattctagtgtgtgtataaacatatatatatatataattatatataattttttaaaagaaaacctcatgcagtgcttttacttacttacttatttatttatttatttatttatttatttatttatttattttgagatggatggtcacccaggatggagtgcagaggtgtgagctctgctcatcgcaacctttgcctcccggattcaactaattatcttgcctcagcctcccgagtagctgagatgacaggtgcacaccaccacacctggttaatttttagtagagacagggtttcaccatgttggccaggctggtctcgaactcctgacctcaagtgatctgcccgcttcagcctcacaaagtgctgggattacaggtgtgggccaccacacccagcctgtttaatattttgaaataaatgacatagattagccaaaggggcctattgaatcttgccttagtaaagcaactccagcgcaaaaaaaaaaaaaaattgttgttcatttttgtgaccagataaaataaaaacctattttatttatttgtttgtttatttatttattttttgagatggagtcttgctgtgttgcccaggctggagtgcagtggtgcgatagctcactgcaacctctgcctcctgggttcaagtgattctcctgcctcagcctcctgagtagctgagtttacaggtgcccaccacccatctgactaatttttgtatttttagtagagacgaggtttcaccattggccaggttggtctcgaactcctgacctcaagtgatccacccacctcagcctcccaaagtgctatgattacaggcgtgagccaccgtgcccagccttaaaaacctatttgagataaaactataactttggttgtatattcccctcaatctcaaattagacttgtccttttgctgactgatagtaggtctgcctctgaattcctttgggagatgaaatgtggcagacgaaggcctacaaccttgtctttcctacacattaataaagcactgctgagaaacaagcatgtttttctggacctgttaagaagaaagcatgatattcatcttctcaagagtcttgcacttcctgtgttaataatagtaatctccaacttctggacagtactgcatagttttaaagtattttttgttaaatcttcataacaattctctgaagttgacgttattattattaacattcccctttatgatgatgaacactgtggctcccagttattatgtggtttgcccaaggccatccagctgttaatacacacattttctttttttaattttaatttttatttttatttttgagacggagtcttgctctgtcgcccaggctggagtgcagtagcataatctcggctcattgcaagctccacctcccgagttcaagcaattctcctgcctcagcctctggagtagctgggattacaggcacgtgccaccacacccagctaatttggtatttttagtagagacgtggtttcaccatgttggccaggctggtctcaaacttctgacctcaggtgatccgcccacctcagcctcccaaagttctgggattagaggcatgagaaatcgcacccagcctatctacttatcttttgaaatataagtttcactctttcctttctataatcaccaccattccctgaaatttgttttgtttgtttgtttgtactctgtcgcccatgctggagtgcaatggtgcaaacgtggcttactgcagcctcaaccttctgggctcaaacgatcctcccacctcagtctcctgagtagctgggactacatgcgtatgccaccatgcttggctaatttttgaaaaaaaaaaaaattttgtggaggtgaggttctcactatgttgcccaaggctccaaagtcttgaactcctggcctcaagcaatcctcccacctcagcctctcaaagtgctgggattacaggtgtgagtcaccatgccaggcccactccccgaggtatttttgaaaggcagaactcttgaattaagagtcaaatttcagctgtggttacatgaagtcaaaacaagtggttgcttcagtggaaggaaatatcaaccatataatttctggtcatcatgtaagctgcttcttaagagtagagtttctaattttcaactgtctacagtggcttagagagatacaatcttagtaaaaacaatactgttttaaaataggaaacaaatagaaatgtgcagtcccagacaatgaatgcttgttctggaagagccagataccaagcaagtaggatttggtttctgggcatccatttccatactgtccttcctgaggcctccagcattattgctgcagacccagcatgactgaccagtttcatcatcatcctcattctcatctttataaccaactgtcctgtttccatttgcccttcatggtacatgcagcctcttccaacttctgcttgccactctcccttgagatgcatgtgcttgctcgtgatgcttaggaagtagtgacattatttctggggatcagttggcagtagggtgtggaggcattatcaggccatcgaatgcatttacttggtgttccatttgttccttcatggatcatgatgtttgccaaagaactacttatagcatccaaagatgcttttcggtttcagttgtttgagtttaacaaggcaaatagatgcatgaagtttggccaacatagtgggcttctctgttaactttgctgtaacaaaccaggttttaaaaactggctgacctgactgttattgttggggaagttatgaatcaattcctgtcatctccaatgtacatttcatcatatactaagtcatatcatgtattatctcattcatagtccaaagctaaccccacacaccaaatgtctgtttgaccaatgctacacattacatcattcaatttaatctggtgctttatttgtcttaaggcatttccacatacattatctcacttagtgtcacaacagccttgccagcgaggttgggtaggtattagtattcccactttacagattaagaaatggaaatagaggaagatgtaggaggtgttaagtgcagagcagggagcttgaacacatgacatctacttaatttagaatagaaaatatggacttttgcaggtctgtatagacattaatagctgggggcatctttctctctacatacagtttgctctgtcatcctgtggggaatgtttctgtcttctactgttgctccaaatagctagctatttgccattgtcattattgctaccagctcttttctggaaataccaggaaaagtattagaggtaataattattcagacagaaaacactgaggatctggagaacacagtggaacttaacagaaaggcagatacttgatggccatcaccatcctatatgatgacactggttttcttttcttttttgagatagagttttgctctgtcacccaggctggagggcagtggtgcagtctcaactcactgcaacctctgcctcccgggttcaaatgattctcttgcctcagcctcctgagtagctgggattacaggcatgcactaccatgcacaactaattttcatatttttagtagagacagggtttcgccatgttggccaggctggtctcgaactcctgccatcaagggatccactctcctcaccctcccaaagcgctgggatcacagggatgagccagtgtgcccagagacactggttttcttatatcctgagggtcttggggttattcattgccaaactaagaagcatcatttccccccattttaagaatgggaaaattagggtatgtacaagtaaaattggccttccaaggttcattcattattgaggcctatgtccacaagaaatgggacttccagcacttggtagtaaatgttagtggtcccctccctgcatacagcagcatatcaccaagttgtctggatttgaaaaaacaaggtttgatgtgtgagagaaacacagtatctgtcttaagtagaagaaaggccctacagtacacatttatttctcagaactacttagatcaccggaatcactggttctccttagcaagaaaaactccaaggaccaataaccctatccacatatttaacaccatcagaaaaactccaccaacctaatgggaagaactgtgctgcatggttcaaactatgaaatcaaacttagccttgccagaaacaggtgatcttactgaggtgctagtcctacaacagcccggtctcatctttaggaccatctttaggactgttctgaaatgtgctatgagaatctgacccatgtttctgagagcatattttcaaggtacccacacagaaacccactaaaaggagagcaggcactgagctctgtgttggaccctggttggaaagcaggagagccatgcacgcagcacagtccttgtcccatgccttacacatagcagaaactctcagctgacttttgaaaaggggcttgaacactaatatgtgaaaacctcttttagaaattgatgatgcaatgcgcaactttgctgaaaaagtgtttgcctctgaagtcaaagatgaaggaggtcgtcaggagatttccccctttgatgtggatgagatctgtccgatttctcatcatgagatgcaagcacacatattccatctggagactctgtccacctccacagaagccaggaggtaagtggtgtaaggggagtgcttagtatattggcacctaaggaggggtatctgccagggaagatatggttcaatttatccaaatgatggttcaactcagaggaagaactctgccagagttagcaattcctaagactgggcacagtggctcacaaatgtaatcccagcactctgggaggccgaggtgggtggatcacttgaggacaggaatttgagaccagcctggtcaacacggtgaaaccctgtctctactaaaaatacaaaaattagccaggcactgtggtgcatgcctgtagtcccagctacctgggaggttgaggcaggagaatcgcttgaacctgggaggtggaggttgcagtaagccaagatcaccccactgcactccagcctgcgtgacagagcgagagtctgtctcaaaaaaaaaaattccttttccccccaacactgtatatgctagagtgagtagagtgaggggccaatgatgaaaaaagaagaaagcagtgggcctcctatctcgtccatatctcccttgattgaagcctccctacccatctaagcaagaggacttcgagataccatagaattatttcagaccaaagtgggcaaatggctgctgtgaacatattcaatttacacacaatggtaatataaactgggactcaagagccttcatcttcagactctgtccctagccaaccttagtgttatgctccctgacatgaatcctgccctccagttagtctgaccacctcctggccttaggaatactgctctccaattctgccctcatgacctgcccatcccatgtctatgatgcatacttgctgcctcccccgagcagtctttgaaaatccctctccaccaagtctattttcctttatttgaaccactctaggattcactaccagccacactttagtccccaaacctcaaacctatactaactactttgctggaaccccctccttaggtcctccccccatcccaccagcttcatggggaaaagactattctgctgtctttctcttgattttacatctttaaggaaagaacagcaatccatctcctttggtgtcccccataggacttaacacaggacttgggtcaaagcaataaacttgggtcaaactcaacaaatacttgttgatttgagaaaataatattaaataccttataagttccaggtactgtgctaggcattttatatacattaaatctcatagaaatcctataaggtagtcatttttgcaccatttgttttagatgggtagatgggagctcctttatccatgtttaaggaacatgaataaaatgatacaggtagtaactgacatagcctgtgttttctgtagttcctagactgcctattctgctgggagtggactgcctgggaagaagggtgtcatggtgaaggtcttctagtaggattgctaaggccattccaaggtagaccagggagaggggcacaaggtcatgtgtcttcagtgatttctcctcccactatgcttggatcctgtttctgatacccaaccacattttaatttttactttttgtcctcagaataaaattgtatagagaaacatctatctatcacaatgaaacgcctgatgaagacaaaattaactcttacttttaaatttcgaacccagaaaaaagcgtttccaaggacggaagactgttaatttgtccattccactaagtgaaacatcttccaccaaactgtcccacattgatgaatacatttcctcatctccaacctaccagaccgtgcctgattttcagagagtgcagattactggtgactatgcctctggggtgagttggtccttgccactcagacttagcaaccaggaagccattcagcttgacagttctagctccttgccttcttctctttcctgttgagggaggtattagctcacctgtcctttgttacacttcattattgcatttcaatactaatatggtggtatgtcttatgtttctgttgtttttatcatcccacataatttatcctctatctcatttgcttgcacatggagaatatggagtagaatgcagtgtgtatgttacagaatacaatggacagattttggcaaaaaggaccaaagagagcagtagagtggtcaagtctcactgatgttgtcataaatcagaaaagggagcctctggggaggcacggagtctctggggaaaagaaggacccaagcagacctaggatagtgagaagggttgcagatagcataaaccaaccaaagaaaacagatccagagaaagagagagggaagagaaaaaagaaggaaccagagaaaagaaggaagatgagagagaggttagaaaatcctaacgaggctattgtttttttgacgacctgaactctccaatttcattacagatggttacacagtagatcattacttggaacagactctaggatgccacagggatagtaaagtcatgtcacaaacaacttgacctgcttgtctcatccagaacagttggtcaattaataaatctctgccacatggacttgcagaatcagcatcatattggtgaaactgctgtgcagccgtccgtcgatgctccaaatatagttttaatgaccagtgctgggtccccttctcatgtaactgacccacttagggtcagtcctaagatacttaaaagtgacaaggcaattaaatgcacctcattcttgtttattcattttctgtataacatgggtgctctctaaatggcagggggtttagacactaaataactaaaaggaaatgcctaatagagatgagtacaggggaaacacagtttggagaactccagaattcaaaataacataaacatttggagataaacttcatacctgcatgcttgatagaaatgaaaacaagaataaaaacaaagaagttaggaggacgaacaaaatgtacacaagtcaaggagtacttctcctcctgtgaaagctggagggcacctgaaaccttgacctggagactgggaaaaacgaagtatgtttctctaccagttggctgaatgtggctgggctgctgagcaacactctacgctctacctggttgtagtctgtacccaaattagtcttcaccctagtaatttaaacagagaggcaaagaggaaatcagggctcagttctcaagattattaattcctggtaaacactcgattcagtttaatcagtcttattgagcatctattctgtgctaggcattgtgtgctgagaacatgaaggtgaataagacccagctctcattcttgaggacctgatagactagtggcctattaggtggcaatgagctacgcatgccattggaagcagggaagcagacccccagacctagcatctgtgccagacgcttttggccaaggacagcaggtctttaaaatagttaaactaattcaggatcaatatctggaccttaaactactggggacaagcatatggtagtcccacaggaaaagtctttgggttctgataatgaacattcagtgatttcaagttataactacttgggcatgcctggcccaaccaggagttgggaatgggggcaggggaaatttccagcagctctaataaagctttcctctagaatctctcaagttttacccagaaataaaattctctttaaaatcatctaaacgactaacttctcacagaatgatgttgtgatccatcgtagctgaagaaagccgtgcatgggtttgagagatttgtgaccccttattcatcccaaaatatttccctcactgaccgagtggtttgaattctcacaatttgagtcacatggtctttcagttgaggtattgtcttgtacttaaaatgttcacacgtacttagaaggaagaaagtatataccatgttggaatggattcttttaatcctatttgctagataatccctgctatgtaacaaaaaccagaaacaaacaaatacaggactacaagggaaagactagtaggacaggtaagtttggtagaaataaagaagctagaaaagcttcaggacctgctctgggagggagatccaggtcccaagtcaattaagaagcagccaggtgagtggtgagtctcagaatgggctgcgatacacaggagagctgggaggtgccaaggataagctttactcacttctcagtttttcgtgggattgactctgatatgctgacttttttttttttggcaggttacagttgaagattttgaaattgtttgcaaaggtctgtatcgggcactatgcatacgtgagaaatacatgcagaagtcgtttcagaggttccctaaaaccccttccaaatacttgcggaacattgatggtgaggcttgggtagcaaatgagagcttctatccaggtaacaattctcttacataatgtatgaaacatattttatttaaactactaaatattaaatttaaaatatgcctctagattataagtaatccagtctaaaaatatcatagtcataatcatctttggccccatttcctcacgtgtccaatcacttgattcagtctgcacaacatctctctgaactttttctcttcaccattccctaaaccctcattcaggcttatccttctccttgcccagattattgcaagagcttcgtaactactctgcaaaatttcagtctccctctcttttggttcatctttactttggtgctaatttttaaaacacagatctgagcacatccttctcctgacaagaacctttagctgctccttgctacctacaaagcaaagtccagtctttagcctggcatttgaggcccacaccctctggccccctaactacattttgtttgttttctgagacaggctctcattctgttgcccaggctggagtgcagcggcaccctctcggctcactgcaacatctgcctcctgggttcaagcgattctcctgcctcagcctcccgggtagctgggattgctggtgtgtgtcaccatgcctgtctaatttttgtatttttttgtagagatggggttttcccgtgttggccaggctggtcttgaactcctggcctcaagcgatctgcctgcctcaacttcccaaagttctggggttacaggcatgaggcaccacacccggcctgtttatttttgaacttgcacactcaacctatttctgaacttactttctctgctccatttttatactgttggttctggttggaaatatttctcgttccctacatagttcaacaccttcctgctcctggattgctgctctgcttccctgtgctcaggctgtccttcccctcacttattcaccacatgcccaagtctccagagccaacccaatctttcaagaggcagcccaaatactatcatttcttgccttctggatagatgtaaactacatgttctgactttccatagcactttatttacttatctcagtttttaccttctgccttgtagaaagttaagtacgtatttttcaacaatcagattttaataattttacagatttctattatataactggaacataattgacttaattcctatttttaggcaattaaatttctgactttttaaaacttgtttctaaaaaaggtacaataagcatctttatatacacatcttcctgtaattgtcttacaattttaggattacactcctagaactaaaatttctggggaggcaaatatttaagatttttgaggccaggcgcggtggctcacgcctataatcccagcactttgggaggccaaggcgggcggatcacgaggtcaggagatcgagaccatcttggctaacacggtgaaaccccgtctctactaaaaatacaaaaaattagccaggcgtggtggcgggcgcctgtagtcccagctactccggaggctgaggcaggagaatggcgtgaacctgggaggcggagcttgcagtgagctgagatcgcgccactgcactccagcctgggcgacagagggagactccgtctcaaaaaaaaaaaaaaagatttttgaagttccaaattgtaatattattaaagatctccagttctacaactccctgtctgtaattccttttaatattaaaatcatattaaacatgtctccagtttggtaacacataacagtggttttcccatcctctataatatagacatttagtttgtcttgtctttatttctcctaagttacgcttcaataataattatatcattaatagtgagttattaatccttaagtataaggatttcaaaattaatatttgatagtagtaacaaatattgtagtaacacgctgtttcacttctcttatgttccttatctcccaattttgaataggaaatgtgcagactgttttttttccctatgctatttttctcactttggctgctgtgggcatcacttgtaaacaggaggctttctgatgccttcctcgggcacagcagtgaagaggcataaatgaccatacttgttgaaagtcaaaaggatgaattcttaaaggctctgacggtgcgaaatgtgttcatggcttccttaggctgaaatcgctagcagtggaaagaagggaacacatccacttaatctcttctcagttcctttagcagaaattgtatgtgctttaaaaggtgggaaaaataattctcataagaattatcactcttacaataataatttattttatatctcttttttacattaaaaccactttaggtggagcacagaggattcttaggggagtgaaactattctgtatgatactataagggtggatacatgtcattatacatttgccaaaacccataggctttgagtgaaccctaatgtgcactatggactttgggtgattacaaggtgttaatgtatattcatctattataacaaatggaccctctgatgcaggatgtctagagtggagactggctgtgcctgtgtgggtaacgggctgtggggaaattgcattttctttttctttttctcttttttttttttttttgagatggagtctcactctgtcacccaggctggagtgcagtggcacaaactcactcactgcaacctccatctcctaggttcaagagactctcctacctcagcctcctgagtagctgggactacaggcgcacaccaccacactcaactaattttcgtatttttagtggagatgaggtttcaccatgttagtcaggctgattttgaacttctgacctcaaatgacccacccaccttggcctcccaaaatgctgggattacaggcgtgagtcactgtgcccagcctggaaacggcattttctactcaattattttactgggaacccaagactgatctttaaaagcttatttcaaaaaacactctaaattacgcctaataaaaaggattggcttaaataaggtaaagatctaaactctatttttttaactgtagtttgacttttattcttatgttattatctaagagctaataatatgctctaaacagaaagcctttgatgacaaacttcagtaaataatgaagattgtttgtaagtagtatatcgattactttatgtaaatagttcttccaaagaacttgaaaaatcattcttacactagacaacatattattttatttttcttttttttgagacagggtctccctctgtcgcctaggctggagtgcagtggtgctatctcagctcactgcaacgtatgcctcccggattcaaatgattctctcgcctcagcctcctgagtagctgaggtaacaggcacacgccgccacagcctggctaatttgtgtatttgtagtagagacggggtttcaccatattggtcaggctggtctcaaactcctgacctcaggtgatctgcctgccttggcctcccaaagtgctgggattacaggcacgagccactgcgcctggccaatatattatttttatagctattttatactattatgtcacctttaaaaaataatgcaaaaataaaggttagcttaattccagataattacaacttaagtaccggattccaagctaatgagatgttgtagtatttcacattttggttatttttatgtggtcgttcatcctatgtgctaatatattactctgtgtttgattgaaaaagtctttactcctcctgtgaagaagggagaggaccccttccgaacagacaaccttcctgaaaacctgggctatcacctcaaaatgaaggacggtgtagtttacgtctatcctaatgaagcagcagtcagcaaagatgagcctaagccacttccttacccaaatctggacaccttcttagacgatatgaattttttacttgctttaattgctcaaggacctgtgtaagtgtttagtgagacctaaacaacaacaactagtactacaagacctaaacaacaactagtactacttctactgatagtgagactaagtatttactaaatgcttactatgttcaaacactgtattaagcccttcatgcacattgttccttttattgcttacacttttcactgtgaggtggttattttcataattccagttttatgagctgagactttgatgacttaagtaacttgcctaaagtgacacagctggctgagccaggattcacactcgaatctgctgaccccaaactttgaataacactctctccattgagttttaagatacctttccaagttctccctcattcttatgtccaacattattgaaaagattaagcctttggagcccactacttctcagtgggattaactgcagagtaaactaaaaggtttgttccaataattatttcctatgaatgataaaggtcctgatagttttgaaattgtgactgtttttcttgaatgcctgaaactttttggaattatgtgattttatttttcacagtaagacctatacccaccggcgcctgaagttcctctcctccaagttccaggtccatcagatgcttaacgagatggacgagttaaaggagctgaaaaacaacccccaccgagatttttataactgcaggaaggtaaacattttagttgctcaggggtaattcctgggcaaaaacaattcaattatttattgagaagcacaagaaaagagtgtgtttctgattaatctaagatttctacaggttcagtggattttagtaaaaacagataatagattatgtccaatgggttagggttaagtgccatttctatcgttttccccatagaaaggtttgccacatttttggcacaaaaaattatagttatcctcaacaacgaaaatagcaacaacaacaaaacatcaaaaatgaccattctagaatttgaaagatcttccttctagtcctttttctttgaattcctgactgtaagaccttggaggaagggatgacatattttcatttcagtgtcttcatttgtcaaattgggaactacacctgcacaatccagttcacgtgaggattgtgaatatcaaatgagctagcctagagattgtgaaatccaataaactagacacacttccaagatgtattctgaccattaaaatgattacaaggaagtgggaataggaaatatatgagcagagattcaggcccaaatcctggctcagctgcctatacaactttggactaattacttaatctgctgaaatttcagtgtataaaatttagttataagaatatctacctcataaaagccatcactgtgtcatggcttcataatttcaatcctttctccttaggggctgaaagttatggtagttacttcacttccagctgtgttttaggagtgaagaatggtccagaagaatgtgtggatcagacgtaggaaataaattggatgtacagatatacagaagaagcaagcattcttattgcctctagcctaacctttcacatccttgcatgggcacgccacagttgtaatggattttttattgctggaccacctccaccaactgtcagctcacatcctcattattcactttgtcccaacgcagtgggatttgcagcaccatatcctctaaacagagtagcataactaaggctgattgatgtttttttctttctttgaatatacatacaggtggacacccatatccatgcagccgcttgcatgaaccagaaacatctgctgcgttttattaagaaatcttaccaaattgatgctgacagagtggtctatagcaccaaagagaagaatctgaccctaaaggaactttttgctaaattaaaaatgcatccttatgacctgactgttgattctctggatgttcatgctgtaggttgaaacggcaatgtcagtttcactctaatactcagaaccccacatgtctttctcctacaagccctcccttctcagaggtctcttaaccatcttggcttaccacgctgcctgaaagcaccacagacaattttgaagtttgctcattgtcacctgtcccaaattccattcttggagcccaatgccctcccccactaccagaccccagttctgcttgactatttcctagctctctctgtccagacagctctggtaataatacatctctgctcttttttcctgattcagggacgccagaccttccagcgttttgataagttcaatgacaaatataatcctgtaggagcaagtgagctacgggacctctacttgaagacagacaattacattaatggggaatattttgccactatcatcaaggtgaggcggaaccaatcacatctatggtatctggcatggttcttgaggaaagggaagaaggaaggaaggaaggaaggaagaaaggataggaaggaaggaatctcctctccagaaccccaaaggaacttgtgggaatccctggcttggacttctctcttggctttgcaggaggtaggtgcggacctggtggaggccaagtaccagcatgctgagccccgcctgtccatctatggccgcagtcctgatgagtggagcaaactctcctcctggttcgtctgcaatcgcatccactgccccaacatgacatggatgatccaggttcccaggatctagtatgtacctgcccatcagaaactctagagcctgcccttgtctcatctgcttcaagtcccctgtatgaacaaggaacgtgttgcccatctagaaataaatcagctttgttaaaacagcattcactatcgggtcctgcatgcttggttttgtccactctgggtacagcactcttaaccacagacaggagttaagaagatcatttcggatcagtcctctagctttatgaagatcataaataactcactgagaatgattaaaactaagatagaataagaactatgtacagtttggtatacattttcacaaccatttagctgtgttaccttgggttaagttatatcaccccattgtgccttagtttcatcatctctaaaacaaggttaaaaacaatacctaacttattgagttgttatgaggattacattagctaatatttctggtcacttagaagagtgcttggaatatattaaatgctatatcagagtttgttaaattgcagatcagaggtattcttggtaatcatttcctgttcactgtcttgtagttacacacatatattgaagcttttatgacgtaattgcatattcctctatgaggacttagctgtgaaggtttagttttcttatgacaaaggtttgtaaaaaagatggggacatagggtccaccaaaaaatttttatttcctatgtgctgcccaaactgaatccctctctataggggaccaaaaagaatgtatgaggagcatggacctaggatagatataccacgtcttttcctgtgcatgacattcgattctctggttccctcatactggggctatcagtcctaaaaatctttttttctcctaaattctcttcattcttgcctctagtgatgtgttccgttccaagaatttccttccacattttggaaaaatgctggagaatattttcatgccagtgtttgaggccaccatcaacccccaggctgacccagaactcagtgtcttcctcaagcatgtaagcatgacccttcaggccttcatactgctgctcatgaaccagccttcctacctggtcatgactaattcttggtgcttatctctttatgtttggtctgtgcctttggacctgaaagtttgtgtgaggactgggaccctgaagttggactgaacccattgcatggctcacttttcctaacagatcactggctttgacagtgtggatgatgagtccaaacacagtggccacatgttctcctccaagagtcccaagccccaggagtggacattggaaaagaatccatcttacacttactatgcctactacatgtatgcaaacatcatggtgctcaacagcctgagaaagtaagtaggagacagctggagctaggagggtctatttgacacagctctttccacatatattggcaattaaggtggtcaggggcctcatgcattactgtgatggttccaattggcccaaatcagaaatttctttctcttaacttttttcttcagtttatttattttggggcagaaatcggtatttcgatgctttcaataactttcacagttcctttttttttgagatgttgatattggtaaatttcctattgagactgaacgtatttccatccaggcaatcaacactttatttgcttccttacccccatatcctctgctgcctctttttggaaactttgtatttagcaagaattaagattatgatttgggactgttttgctgaatcctttggatggcttacttccttccagagtgttcacttttctactgaattttcttgtgaatcactccatacccagaacctgcgattccaatagcagttctatttccccagggaacgaggcatgaatacgtttctgttccgacctcactgtggagaagctggagccctcacccatctcatgacagcattcatgatagcagatgatatctctcatggcctaaatttnnnnnnnnnnnnnnnnnnnngggaagtttaggaatttatactaatcattgtgcaattaatgataaaacttcatatattttgcccttcttgatatatttgggtaaggaataagtagaggaatattatactggagttttctggaaacatttctcccttaaaatttgaatagaatagaataaatgatgagatgttgatattggtaaatttcctattgagactgaacgtatttccatccaggcaatcaacactttatttgcttccttacccccatatcctctgctgcctctttttggaaactttgtatttagcaagaattaagattatgatttgggactgttttgctgaatcctttggatggcttacttccttccagagtgttcacttttctactgaattttcttgtgaatcactccatacccagaacctgcgattccaatagcagttctatttccccagggaacgaggcatgaatacgtttctgttccgacctcactgtggagaagctggagccctcacccatctcatgacagcattcatgatagcagatgatatctctcatggcctaaatttaaaaaaggtgagttggaagctctcttcttaacttttacattggagctagaggaatcttttttcccttaaccaaccatactgtcacaagtcattatcgacactgcaatcataatcaagtagagcataaaagattttttagtttagtgcagttcattctacagaaagaagtaaagggacttgctcaagattaccttaagctagtttttgcctgatttcatgataaagcatgcttcaagatgtttttttgtgagagtcagaactttcttgtagagagagagagaaaaaataatgtttcaaggcaaagtcttttgcctgagacagaccatctaacgtaggccattatagatcaaataaacaatctggtttgactcaatgtttctgaaaattaatgtatcctaagtacatttattctaaatagcatttacattgaaaaactcctaaattctccttactaagagacttgaagaacaagtgataattttgttgaaagctgaagcttaaggcagaccatgagattgtagtgtttctagtttgtattcctttttcaacatctttaaatatttttttacttttctttttcagagtcccgtgctacagtacttgtttttcttagcccaaattcccatcgccatgtcaccactaagtaacaatagcctatttctagagtatgccaaaaatccttttttggatttccttcagaaagggctaatgatctcactgtctacagatgacccaatgcaattccactttaccaaggtatagtatggacttgggcaatacaagcatattttgctggactgttgtttcccgtccagaatttgaaagtcaaataaaggtatttcattattttttcaggcaggatgcatattatttattaattcactcctcttttttcctcatttaatataactgcaggagcccctaatggaagaatatgctattgctgcacaagtcttcaagctgagcacctgtgatatgtgcgaagtggcaaggaacagtgtcttgcagtgtggaatttctcatgaggtagacctgtcttcaaatggcttcccttctgagtatagggtctgctaacttgaataccgaaaaagtagttgggaaacacatgtagaaaaattgttccacgaatcatatgcagttactatggacagggactagaagggattattctatctctttgcctgtgccttttgggccagggaagtaaaatacacttgatttctcagcagactgtgaacactgaggcactagatgggtgcttttaatggtctattattattattcttttgtcagtggctaacataaggaaggaatttttgtaaagaatgcaattattgtctataccagggtgaaaagagacaacaatcattctgccatccttttctcttataggagaaagtaaagtttctgggcgacaattaccttgaggaaggccctgctggaaatgatatccggaggacaaatgtagcccaaatccgcatggcctatcgctatgaaacctggtgttatgaactcaatttaattgctgagggtcttaaatcaacagaataaaaaaaagtaaaccaaataataatatgagtgagaatttcattgtagagtttgaataataatagttacctgttattgagtccctactataaaccaaggaaagtattagatgttccactgaaattatttcatttaatccttctcacaacctttataaagtagatattattatctccattttgggggaaattagtacactaaagctaataaggttaataacctgcacaaggatatacctggtgaagggtagcagtgggaacgtgggtttctctgactgcagtctctatgactttcaggcaaaatatctattaaagctgggcaaaaatacaagcaaatgactttttgggagataggcttctggtttatagcatgaaatttgcttaaggcacttagaaccactaaaaagttctttgacaaggtataagtgaatagtggcttttttagacaaaaccagagggcgtacctcaatatagaaaatcagtatttatgagttattatattgagggagaatttatcttacaaaaggattcttagctttaaggatgtaattgacaataagattatagtgagctaaactggtacattttaaatgattttgcttaccaaagtaaaatgtacatataacttttaagaagcatgcctattacttaaggtcaggtgaaattccaaatgggcagatgatacttccacacatacaactgtgttggcatctagtggctgggctgacatttcattcaacttattcaataaacaattattgatcaaatagctaaattatcaggtactattctaaacaccaaaggtatacagaataagatttcattcctatcctctagttgtcctcagcatgaagttatagtgtggctacaagtaaaaaatagaattttgtgaaatgtcttcaaaagtaatgaacttttttcttttttttgagacagggtcttgctctgtcacccaggctggagtgcagtgcagtggtgtaatcacagttcaccgcggcctcggcctcccaggctcaggtgatcctcttacctcagacttccgagtagccaggactacaggcacatgccaccacacccagctacttttttgaaccttttgtagagacgcggtttcaccatgtcaccccagctggtctcaaactcctatgctcaagcgatccatgtgccttggcctcccaaagtactgggattacaggcgtgagccactgtgcccagcctgaactttcaaatggaaaaaaaattgaaagcaaatttctgcacgtttctatattctacacatgcagccataagcataggtgtaaccctgatggcatgtttgtactagctctggtgtaagaatctcttcctgatttctgaagttgaagttttgtttgttgagtatttgtgaaccctttaaagaaccagattttattttaccttggcctcctcatcatcaaaatagtacaaattgctacattaaacactgtattctcagacttcaaagggcattaactaccattatgtatatctccatcttacccatgagagggcagtagaatacatacatgtgaattcatttattaatctataaatttggtttcatacgtgatacttggaattcaacctgccttattttgccaaataatcttcctgaatgcaggggtcaaaaaatacatttctgggctgggtgcagtggctcatgtctgtaatcccagcactttgggaggctgaggcaggaggactgcttgagctcgggagttggagaccagcctgggcaacatagcgagaccctgtctctacaaaaaaataaaaataaaaatattagccgggggtggtggtgcatgcttataatactagctgcttgggaggccgaggtgggacgattctttgagcctaggaagttgagacttcaagtgagctatgattgggccaccgcactccagtgtgagtgacacaaagagaccctgtctcaataaataaatagatagacacattatataagaatttttttttttttggtgggggaagcccataatgatcagtgtgcaaaatttactacaaacaatatccacatttatttcctcattgggacatgattttttttaagtatgtcattacttttttttcccccatcatagaatgtaatttctgttttactgtctacaggtgatagtttcacaacggtttgggatatgctacctttattgtttgggttaagtttgcttgtgacagtcatccgtgatacgtaactaaacacctctctttctggtagtcttctattttggtacctctgtgtgaacaaatgtaggaagagtttggtcaccagacccaagaggctctggctgggtggggtggggtggggtggggcggggcgaggcggggtggggtggttagcgagtgcctgggaaacaggctcaactgatccttgtcccgcagcctcggtgaaactgggttacagcttgcagtaggcacaacaccacgcacatacctaagcaagagcgtgttgcaggcggagcgcttaggcatgtgtgtctcaacagggcgtgggggctgacctcacgcactgggagtatcaaggcacccccgttctgagattccaagcctgaggtgccgcgagagttatttgcttctcttgacgtttcaagttggcaccgtagtgcaattgtttgctcactgaggtcagcctaggaaacagtgcttggattccctgattaagccaggctttatcttgttgagtagttgtgaagagtaaaccttcacatgaagcatagggccgtctccgtggggccgatgcgacggcaggcgaaggcgatggagctctggctcgagggcttggccggacgacggtgacactggtcgcccgcctgctggaactgcagtgaccgaggtcctggcaaggttctggccatacagcggacttgaggcgtggtggttcccctcaccgccggccggggcggtgtcggaggcgggcatagcgtgaggggtgggaataggagccaataagaactgagccttgccagggagggcggggctagggggtggggctgcagccgggacggggccttcggcagggcctgcgggggcgggacggagcggacccgagtgatacccgggagactagcttggccacaggagacaacgttgaggtacagacaggtaagagtcggggtgattcggcgcggggttttaagccgcaggggcttcggactctcggggctgtcggcatcacccttctgggcgtcgggtgcggggctgtggcgccgcggcgtagtcctcggacggtgcgagccgagctggcggaggtggtgtctccgcgccccgctgtctcggcacctcctccgtccggaggagcaaccggttgttgggcccagctttgggacgtcctctcgtggccgcacgggttgtggcggagcctggctgaagacctcctcgctacctcaggggcttggggacccctaggctgggcgccgctctctgctggggaagagggagggagcgcccggcagcctggggaaacgcgggctttctccaaaattagccagtgagcttgaacttcgacatgctgggacgatgcacttccaaacaatattttgctttttttggtgttttgattcttaacagcatctaatacgcacaataccgaaagttgtcaagtagaattttaatttaaaagtctgacagtggaacacctaagagcttttgagtaactagagctgtatagcagctgatgattagattatgagtcaaaaggctcaagtctagggccagaacccgcggaaccagatgtgatacctcggccaaattaacttcctgggcctctctttccgtaactgtgaaactggcaagttcatgcctatgggtattctcagggtcaaatcagatgagtgacagtattctacaaatgtcagatatttgaacgtgcgtgtggagcgtgtatattctgtgaagcaactactacttgcctggtacatagtaggcactttacaaacgtttaccctaaagctagtgattcttctgcagtgttttagataaagtgatagatccttgcttactgtgtaaataagttgtttaaacttttcccacaaagtgacccccattgtttgagtgtgtcctatttttaaatgattgatgaaattttctagaatagcacagtggtgttatctatacactgttgctgaatcatttaccgcgaagtctgtagcaatcaaataatctacttctttgtcttagctaaatagttgtagtttaagatacctgctaaagtaagctgggaatattgttccaaatcaagactttaatttgtttttgtgaattgacgggctgcttataggaagatttaaatcttccaaaatattgttaatatatagccatattttttcatacagcctttattatagacgtttttgttctttactatggatatgtgtgcgagggattttagcggggagatgggaaataaaaaagaaaatggcagttttgtaacctgtaggcttttgctggggatacttgtaggcctgttctgagtttgccaggcagaaaccaggaaatgtagtaattatgtgtcttggtctttcattagttggggtgtgtgtgtgtgtgtgtgtgtgtgtgtgtgtgttgaatgtggcagtacgttttttaaatgcagcaataaaggaagaatatttatttttcttaatgacaataagcagttttctaaagctggaaattatattacttttaaatggtctgtagtgagtcttaagttataggcaagaattttagaccactggataccaagatcaaattaaatgaagtagtagagggaaagttactagtgaatgtaatttttgtgtgtgttgctttagaagttttacttaaacatgtttcagcaattcagtggaggatgggtcttttgaagctactttaaaacatgagttttaaacgtactccatgtataaatttttctgtgatttacaatttcttgatcttggaggtctgaaaccttacattcacattgttttttgagggcctactacacaataggcacaagattatatttatgtaagagcagtatgtaattcctgtcatctaggagattccattctaccaagtgggctaaaataagtactgaaaaaacaaaagctgtttttaaagcggatggtaacaataacaacatcagctatcattcattggtacctattctgtgccaggcagtattctaaattctttacatgtattagcttacttaatcctcacaacagcaccatgagggatgttattatgattatctcattaagaggcatagagaggttgagtaacttgcccatgattagacaacctagatagcaaaagtaggattcaaatcagtcattctccaaggacctgattgtaacctttgcgctatactgagtttcaaattctgtgagtgagatacaaatgacatctaataggtattttaaaaagaggtctataaaaaactatttcaaaaagaaggaaagaaagaggaaaaaataaactggtattgcaataccagttttattgcaattaaaacgatgtaattatagtttatctgtgggaaccctttttttgttattgttgccagtgaatgacatggggttgattctaagctctcagtccctcagtaacaacagttatggcattatcttaacaatatgaggtgcttatttttcattaaaaagcacctcataacttctttcattaagaagttaaaaatatctgttctcagactgtaaattaagtattagattcaagaagagaaaatgcttccctgtctttaagaagcttataacccaacatgtaaataagtctctacaatttcagcatgataagagctgtaaagaagtatagatttaggtacgtttgaagagttgcaagaaaaagaaagaagtatagatagaatttaaccactgatgaggaaaaatcattctgcgtgtggtagggaggacgattagagagaagatattaaatttggctttgaaggatgaataggagtttgctgaaattgggtcaggaaacaggagatatgaatgaaaaccagggataagtgtgcaagtatatggtatgtttgaggaatgtgttgtagtccattgtactgaaggccagggtgtgtagaaatgggtggtttggctaaaggagatggtgcctggaaataagatgaaaaaataaaattgcaaagcttccttgctgattgcattaggatcactaaaattgctaggtaatgtggtatttcacttcccttcatttggaacaatgaaatgagtaattagttcagtttggcagaatgtttcactaaaaaatatggtgttaaaggtacttttaatactttgaagtacaagatataagataacattacagacttaggtaagtaaaaagttaagatttagggccaggcgtggtggctcatgcctgtaatcccagcactctgggaggccaaggcaggtggatcaagaggtcaggagatcgggagcatcctggtcaacatggcgaaaccccatctctactaaaatacaaaaattatacgggtgtggtggcgtgtgcctgtaatcccagctacttgggaggctgaggcaggagaatcatttgaaccagggagtcagaggttgcggtgagctgagatcgtgcacctgcactccagcctggcaacagagtgagactgtctttaaaaaaaaaagttatgattcagaaaaagagggaaaaaagtcttctggtgctaggtcttgaagagccagagtatcgtgctaaggactttggacttgattctaaagacaatggagagccagtgaaggattttagatataggtgtttaggaaagataagctgaaaatggtttggaggctgaattggatgaagagagacaaaaggtagggagataagttaggaggctgttgctattgaaatagtccagataagggaggataggggcctggagtaggaaaatagtaatagggatggagaggagaggatagatagtgaaggtgtagaatttgacagggctttaaaatcaattggctcaaaagaggaacagaaaagtaaatgacttagttttttagcttggaaaactgtttggatgaagggtcttgttttattttttaatattggaggaagataattgtttccattttgaattcatgttgagtttgaattgtctttggagcattcaagtggagatgtcgagagaggatctagagtccagaagccaggctaaaattggtgattcagatttcagaggtagccagtaagtgttaattgaagccgtaagagcagatgaaattgctcaagggagtatgtagaattagaagagaagagggccaagaataaatgatttgctttatgtaagtagaaggaattatttatctatgctaattttgtccaacaaattattattataaagcaatgaaatggattttaattgaaagttgaacaacttttacatccaaatgagtcctgttcttttaaaatttcatttggaagtcactcatttattccagaagtacagatgctcctcaattttcgatagggttatgtctgaataaacccatcataagttgaaaatattgttagtcaacatgtgataaacttacgaagggtttatccgaatgtaaccccatcataagttaaggagggtactgagcacatactgctttggcaccatcataaagttgaaaaattgttaatttaaaccatcattaagtcagggactgtctgtattgcccaaagtattattggagcttctctttgtaaaaagctttatagcaaattcacagctacacaagaacgtagatcttctggctttattatggaattgtttttctgtctctttatttgcatggcacatataacttatttacttttttttttttttttcaagagacagggtcttgctctgctaccctggctggaatacagtgatgcaatcatagctcactgcagcctggacctcttgggctcaagggatcctcctgcttcagtctcctgagaaactaggactacaggcatgcaccaccaccccctgctaatttttattttttattttatttttcttgagacagagtctctctctgttgcccaggctggagtgcagtagtgtgatctcagctcactgcaacctctgcctcccaggtccaagtgattctcctgtctcagcctcccaagtagctgggactacaggcgcacaccaccatgcctgggtnnnnnnnnnnnnnnnnnnnncgcacaccaccatgcctgggtaattttttgtatttttggtagagatggggtttcaccatattgatcaggctggtctcgaactcctgacctcaggtgatccacccgccttggcctcccaaagtgctgggattacaggtgtgagccaccacacccggcctgaccccctgctaattaaaaaacaattttttttgcccaggcacagtggctcacacctgtaatcctagcactttgggaggccaaggcggtgggtcacttcagtcaggagtttgagacccacctggccaacatggtgaaaccccatctctactaaaaacacagaaattagctggatgtggtggcgcgtgtctgtagtcccagctacttgggagactgaggcaggagaatcacttgaacccaggaggtggaggttgcagtgagctgagattgtgccattgtactccagcctgagagacaagagcgaaactctccatctcaaaaaaatttaaataaataaataaatacataaatttttttcttttgtagagatggggtttcactgtgttgcccattctgatcttaaacttctgggcctaagcactccttctgcctcagcctatccaagtgttaggattacaggcatgagccactgtgcccagcttccgttcacaatcaatcaaagcttcgaaagcatattcctatcccatcactggatctttagttcttggaagtcatagacaaagcttaaaaaacaacaaaagactgtgtccccatgcctataatcagcacgttgggaggccaagatgggaagatcacttgagcccaggagttctagaccagcctgagcaacataaggagacctcgtctctacaaaaaattttaaaaaattagctggcatggtggcacatgcctgtggtcccagccgcttgggaggctgaggtgggagaattgctagaacccgggaggcagagattgcagttagccaagatcgtgccattgcactccagcttgggtgacaagacaaaaaaaaaaaaaaaaaagaatagcagtatggtcttctaaggcaggggttagcaaatattctgtaaagggctagatagcaaatattaatattttgtactttgtgtgccatacggtctctgtcataactacccaattctgccaaaaagcagccatagacaacgcttcaatgaataagcatggactgtgttccaataaaactttatttatggacactgaaatttgaatttcatataattttcacatcacaaaatgttatacttatttgatctttccacccaaccattaaaaaatgtaaaaaccactcttaactcagaggccttgcaaaaacaggcagtgggccaaatttggcccacaggtaggccatagtctgccaaccttaacggatctttgaaatatttgaattcgtaagcttggtttagaaaaaaaaaatcatggttcttcgaaatcatacctcctgtttttaaattctagtacatttcttaaaataattaaaacattttcattcatcccccatttctcatttaaatggaaaatactccctttactggtttggaactttagatacagagaaatagattaacttgtacagagtcagaataaaaaagtatgtttgaaaaatgttttttgatattcagtgttctttactgaatcaataaaacattgatcttttcgcttcagtgaaagtggggacattgaaacctgggtgaaataaaagataaatttgaaggggtattctgcactggttcccagagggttggacaggatggaattttattctctttttcttctgccctgaatgaataagttttatcctaaagaaaagaaaac

SEQ ID NO: 771 - DNA, 2354 bp, Homo sapiens
ttttatagtgtcagtcagtcaccccacagtctcctctctcttcttttctactgtgctatcctagaatcaaggatttcagcaacaatgcctctgttcaaactcccaggtaggtgtacaaactgaagagaaacaaattgatgatgcaatgcgcaactttgctgaaaaagtgtttgcctctgaagtcaaagatgaaggaggtcgtcaggagatttccccctttgatgtggatgagatctgtccgatttctcatcatgagatgcaagcacacatattccatctggagactctgtccacctccacagaagccaggagaaaaaagcgtttccaaggacggaagactgttaatttgtccattccactaagtgaaacatcttccaccaaactgtcccacattgatgaatacatttcctcatctccaacctaccagaccgtgcctgattttcagagagtgcagattactggtgactatgcctctggggttacagttgaagattttgaaattgtttgcaaaggtctgtatcgggcactatgcatacgtgagaaatacatgcagaagtcgtttcagaggttccctaaaaccccttccaaatacttgcggaacattgatggtgaggcttgggtagcaaatgagagcttctatccagtctttactcctcctgtgaagaagggagaggaccccttccgaacagacaaccttcctgaaaacctgggctatcacctcaaaatgaaggacggtgtagtttacgtctatcctaatgaagcagcagtcagcaaagatgagcctaagccacttccttacccaaatctggacaccttcttagacgatatgaattttttacttgctttaattgctcaaggacctgttaagacctatacccaccggcgcctgaagttcctctcctccaagttccaggtccatcagatgcttaacgagatggacgagttaaaggagctgaaaaacaacccccaccgagatttttataactgcaggaaggtggacacccatatccatgcagccgcttgcatgaaccagaaacatctgctgcgttttattaagaaatcttaccaaattgatgctgacagagtggtctatagcaccaaagagaagaatctgaccctaaaggaactttttgctaaattaaaaatgcatccttatgacctgactgttgattctctggatgttcatgctggacgccagaccttccagcgttttgataagttcaatgacaaatataatcctgtaggagcaagtgagctacgggacctctacttgaagacagacaattacattaatggggaatattttgccactatcatcaaggaggtaggtgcggacctggtggaggccaagtaccagcatgctgagccccgcctgtccatctatggccgcagtcctgatgagtggagcaaactctcctcctggttcgtctgcaatcgcatccactgccccaacatgacatggatgatccaggttcccaggatctatgatgtgttccgttccaagaatttccttccacattttggaaaaatgctggagaatattttcatgccagtgtttgaggccaccatcaacccccaggctgacccagaactcagtgtcttcctcaagcatatcactggctttgacagtgtggatgatgagtccaaacacagtggccacatgttctcctccaagagtcccaagccccaggagtggacattggaaaagaatccatcttacacttactatgcctactacatgtatgcaaacatcatggtgctcaacagcctgagaaaggaacgaggcatgaatacgtttctgttccgacctcactgtggagaagctggagccctcacccatctcatgacagcattcatgatagcagatgatatctctcatggcctaaatttaaaaaagagtcccgtgctacagtacttgtttttcttagcccaaattcccatcgccatgtcaccactaagtaacaatagcctatttctagagtatgccaaaaatccttttttggatttccttcagaaagggctaatgatctcactgtctacagatgacccaatgcaattccactttaccaaggagcccctaatggaagaatatgctattgctgcacaagtcttcaagctgagcacctgtgatatgtgcgaagtggcaaggaacagtgtcttgcagtgtggaatttctcatgaggagaaagtaaagtttctgggcgacaattaccttgaggaaggccctgctggaaatgatatccggaggacaaatgtagcccaaatccgcatggcctatcgctatgaaacctggtgttatgaactcaatttaattgctgagggtcttaaatcaacagaataaaaaaaagtaaacc

SEQ ID NO: 772 - protein, 752 aa, Homo sapiens
NQGFQQQCLCSNSQVGVQTEEKQIDDAMRNFAEKVFASEVKDEGGRQEISPFDVDEICPISHHEMQAHIFHLETLSTSTEARRKKRFQGRKTVNLSIPLSETSSTKLSHIDEYISSSPTYQTVPDFQRVQITGDYASGVTVEDFEIVCKGRALCIREKYMQKSFQRFPKTPSKYLRNIDGEAWVANESFYPVFTPPVKKGEDPFRTDNLPENLGYHLKMKDGVVYVYPNEAAVSKDEPKPLPYPNLDTFLDDMNFLLALIAQGPVKTYTRLKFLSSKFQVHQMLNEMDELKELKNNPHRDFYNCRKVDTHIHAAACMNQKHLLRFIKKSYQIDADRVVYSTKEKNLTLKELFAKLKMHPYDLTVDSLDVHAGRQTFQRFDKFNDKYNPVGASELRDLYLKTDNYINGEYFATIIKEVGADLVEAKYQHAEPRLSIYGRSPDEWSKLSSWFVCNRIHCPNMTWMIQVPRIYDVFRSKNFLPHFGKMLENIFMPVFEATINPQADPELSVFLKHITGFDSVDDESKHSGHMFSSKSPKPQEWTLEKNPSYTYYAYYMYANIMVLNSLRKERGMNTFLFRPHCGEAGALTHLMTAFMIADDISHQLKKSPVLQYLFFLAQIPIAMSPLSNNSLFLEYAKNPFLDFLQKGLMISLSTDDPMQFHFTKEPLMEEYAIAAQVFKLSTCDMCEVARNSVLQCGISHEEKVKFLGDNYLEEGPAGNDIRRTNVAQIRMAYRYETWCYELNLIAEGLKSTE

SEQ ID NO: 773 - DNA, 115223 bp, Mus musculus
  misc_feature (1)...(115223): n = A,T,C or G
ccaaaaaaaaaaaaccaaaaaaacccaaactctctcctgcttcctctcttcctcagtccaacctggaagtccctcctacttgcccagtgattggctcctttattcattaggggatgggtcacaagatcagcatcaggcccatgcacaacagtgggtaatgcacctgcctctggagcctgaaggacctaaacttgatcccaaggacccatgtaaataaaggtgcagagtggtggtctgcacttttaaccccagtgctagggaggcagaaacaggagaagctctggggcttgctggctgcagttgagactaattggcagctccaggacaatgagagactctgtctcaatgaaggtgaacggtgtttctgcagatgacatctctggtttctgcatgcacatgcactctgtcacaaaaaaaaaaaaaaaaaaaaaagtaaattcctaagggtataatgtcctacaaaatatatcatcctaagcacacttgagaggacatccatattctaatagacacaaatatttataggcatatatacatataacgcagattgtgttaagtacatggcgaaacgatgtcacctgctgacactctacaggggcatgacagtgaacaggacacgatgagatcatagactttttttccccgatgaagagatggatagaattaactctgaagctttaccaagatagcacataagccaaggcagtagacagatgcagccgtcagcatacggcatggcctaattttagagtccctactctgcctgatcctgcccagaaaccatgacctcacagctaatctctttatttaaatttttttcacattcatgtatgtgtgtgtgtatgcatgtttgtgtatgtgtatgtgagtgtatatgtgtgtatgtgtatatatgtgtatgtgtgtgtgttcatggtggggtacaaatgcatgttcatgggaatggaagtcagaaaataatctgaggtgtcttttctttagagtcttccatttgtttggtgtttgagccagaggtctctcactgacccaaagcttgccagataggctaccctgggtgctcagcctaccctgggtgtccagggcctgcctgcctctaccttctcagtgctgtaggtataaatgaatgccaccacacccagcttttgtttgtttttaaatgtgggatctgggatggagctcacatcggcatgcttgcccggaagcacctcactgactaagccatcttcctagccatataaggtctgttaaaatgggcttgttaaatagcacatactaacctcaaattcaagatcctctacttcagctcccaagtagctggggtcacaggtgcctcccacctcttttaaacaggatgtttggctgcatccctgacatctttagagaatgcagctggacagacacctgctcggagcacaaccttctgaggcctgacatgacctgtggcctgggtggtgtgttatgaaaggctgagctagtgagtctggccctggaggtcactttgtatccctcccttcctctccccctttcttccctggaccttcaatcaagatgccaagaaacaatttttctgagagcttcagccaaccttgctgacctgtcattctggaacctgagtcaggattgtgacagacaggatcctgccattttgcaagcggaaactaggtaagaaggaacacctcagagctaagtggaagatgtttaaggttatggaaagagcatccatctacacagatgaggctctaaaggcacatttgtctgtgctgattttttttcatgcatgcatgtgtgcgtacgtgtgtgtgtgtgtgtgtgtgtgtgtgtgtgtgtgtgtgtgtgtcaatcaattaaaggactataccgcttaaataaataaatagcgaaatgcatgatgatggccatttggtgcagaaagcagagtagcaaagtcatgtcactcaatagtccccaaggatctcagttctgtgcagcatgcaataaagcagagtggatagcattgaccttgaagtcttcaagcagagactgcccatcattctgcatgtctaagaaggcactggagcacgcacacacttcaggctcagtttccctttaataaataaataaataaagtttgtggtgctttaaaaaaaaagattatgtttgtttttagaatggttccagggttgggggtgtggcttagggggttggaggtaggatgtttgcttggcattcttgaagccctgggtctgagctccagcatcacaatactgcaatgatgcatgatggtgcatagtaaaccccctcccctcactgaaggcaggatgatgagaaactcagggctagcctggaatacaatgagacccaatcttaaatcaatccacttgtcaagtttcaatgagtaaaggcacttgctgccaacctgacaatcttaaattggacccacccacgtggtggaaagctctaacctgtgagctgtcttctgaccaccacactggcgtgggcttccccctcctccgcatgctcacataaaaataaacaaaacgattctcagccaggtgagtggggatggtggcagtggtgggatacacatccatccatgcagggaaaatattcataaaattaagtctgaaaatttttccttaaaaacaaaaactgatattgaaggagaaaagaaaagcaagatgcagccacggaggggctggagagaaggctcagcagttaaaagcactcgatgctcttccaggcgacctgcgtttagttctggcttccatgtcaggtggcccaaattgcttgggactctagctccaggggttctagctcccttttctggcctctacaggcacccatacatataaattaataaatgttctacacagagtgaatccgagagacttggccatttgcaaagcttgcccctgcagtaggagacggggtggtattattagtagtagtatttgctccttctaagcactgcagggggagggtgtgtaggtcggtggtagaatgcttgactttcatctggagtgctgtaagtttgatctccagcatcagaaaataataagaaggataatagcagtgctgagggtggtaataatagcaacaaagaaacatcgggggaaaggtagggtttacattctttctataaaaatcaaactaaaatgggaagataaggaatacattgctttaaattgggaaatgatataattaggatggcaaaatggctaaaggagctttgttgtcaagcctgaatacccaccattggttcctaggatccgtgtggtagaaggagagagctgattccctcaaattattcttagacttccacacacaggttacggcatgtgagtggccacacttattcatgtgcatgcacacagactcacatacacaaacaggcacacacattttccttccaacatatgcatatatctctacacatttatttcaataatcactatgtagtacattgtcctactgaaattctctttaacaccatactttcaaatcgtcgtccaaatattttaggggaaaaacagtgtgtaaagttgggtgaaattctttatgtagatgtaattcttatttccttttgctttctgtggtgctgctgatccattccttatccattgtaagcacacttctccagtcagctgcactctagtaatccttactctatttcaagaaaaggtctcgtgtgtctcaggctggtcttgaacttgctgtgtagctaagaatgagcttgaacttgtgatcttcctgcctctacctccctagtgctgggattacaggagtgtaccaccaaattccgtttatgtggtgccggggttgaactaggtaggtgttacctgaactgagccccagccccagccccagccccagccccagccccagccccagccccagccccagccccagccccagccccagcccagccccagattcctatgttccatcaaaagcagtaatttttccaagaagcctcgatttggagacggtcaaggaatttttctaagtgtgcttctgttcacactgggcctgcattctggaaaccgtcctctgacgggcacttctgatgaagaagcattgcccacaggagaagagccgggctgtagggtcagggatttgatgcagggattttacttggacaagctacttcgagctttctctcactttagttttcattctctatacaacccttgtcgtgtctcactatgtaacccaggctgtccttgaactcacagagatccatttgcctctgcttacagagtaccgggattaaaatccaggtcgatttagttttcttgatttggaatggctcagtttagttttggagacttctaatggagctaagaaggttgtagggaagattaaatgtgatcctgctaatgcctagtaaatgtgaccacagacacctgtgaagacagaagcagggccggggaattaaacgggacagttcacatgatgtgacaagcctgtttcctgtgcatctgttgcaggctttcccctgagtaactttcttaaaactttgttgtgaatgcccgtgaagtgttctttgatgctgttgccatggaaactgattttctagcctaatcttattttaataagattaggggctactttaaaccctgccccacaaaaatgtattagcgaggacttgtattaaaatcgctatttgtttatataatatattttcataaacatttatttttgtatctagctttctttctttcttcctttgcattcaggctcagctacagcgcagttaattatgctaaggtgtctgtggggctcttacctgaacagcgcagtgccatcatgtgtttggagatggggggctcacctgaatggtgccttctgcaggggagggggcttatgtacacagcaccattatccgggagcagatgcacagagcctgcacagagctatcatgtgtctggggagtggggctcaccattatgtacctgggggattcacctgaactgagccatcatgtgtctaggctaaggtaagtttcacagttaggaaagaggcttcttcatagctcccaaggctttgagtgagggagcctcccttgagaaaatatttccatggagtggcttgtaatcaagtgtctgggtgcactttcttgattaattattgattcgggaaggctcagcccactgtgggtggtgtcatcctttggcaagtggtcccaggttgaatgaggaggaagcaggccgagcaagctatggggagcaagccggtaagtagcactactccgcagtccttgcttccggattcctgccttgagtgcctgcctgacttcccttcaccacagacttcagctgcaagcggaaacagccgcctttctccccagtttgcttctgactatgatgctttatcacagactaactagaacaaagggattttaaaaaatctttaagattattttaatttttaacgttaggggtgtgtgtctgtgttatctgccatttgtgtgcagtactcacaggggccagaagagggcagtgggtgctctggaaatggagtgacaggcagcggctgcctgacactggtgcagggaaatgatctttggtcatctggaaaaagcaggaaacattcttaaccgctgggccatctctccagccccaaagataaggatttttaagaaacataattcagggacagacagacacaacacttcaatggataaaggcatctgttgctaagttggacaacctgagttcaatccctgagaccacatggtggaaggcgaggacaggttcctgaaatctgtcctttcacacacacacacagacacacagacatatagacacacacacacacacacacacgtaatttcaaaagatattttttatgttacaacaaaaaatagtaaaaaaccaaaaacaaaacaaaacaaaacaaaacacaatttggctaaatatcttgagtacctatataatctctcattcaaactaatctaagagtaaaaaaggcacaatcagcaaatttatctaaagcttgtaggtttcttcacttgtaggctgaggcaggtctaatgactgaaatcaggtcaaggccagccctggggacatagtgagacccttaccccacccccagagaaaccgaaattacgtgagaaaaaaaagcacaatccatggctctcctagataagtcagaactgtgagcacactggtccaacctgacactgtacctccctaagtggagaggtcccaaggggattcttggtgaaattagtggccggatcacatgaccagttatggtcgattatacactcaaacagagacaaaggctcagtcaaccatgaaggagacagagaggaacctcgatagtggtgggatatcagagcactcccgggaatttcacaaatgctcatgcaacagtgctcacgactctttgtgcaattcaggggcggggctgcctgacgtcagagtcccacatctgaatcccagacctgaggcttggggaagggtagagggataagggaatcgcctctgtggaccgtttccatgtgcggttaatctctcactcactcacgtcagaatgtttcacaaaggagggaatttaaacggcagaaaaattaagatcttacaatttgtttcatataccaaaaagtctagttatctgactgctcaaactctagaaaatgagctagggtgggggtggaggtggggnnnnnnnnnnnnnnnnnnnnccctgactgcttagattaagagcacctcttgactagaaaagagagcagtagtgtaaataaagcactttgctcgtttgtttgtttgtttgtttgtttgtttttgcgcacagcccaggctggctacaaattcactatgtagttgaggattacttaaactcctaacccttctccctccacaacccaaacgctgagataacagatgtggaccacttcacacattttatgatgagctcggaatcaaatccagggctcagtgcatgctaggtaggttctgtaccaactgaactagctacattctttaagccctaaacttttttcttcttttttctttctttcttttttttttttttttttaattcagatctacgagttcgaggccagtctggtcttcgagcaagttccagagcagccagagctgagcagagaaaccctgtctcaaaaaataaaaccaaaccagacccctcaaataatcatcaaattgacaattagttttaatatataaactaatatattattagttttcaatatatcccatttaactggtaagttatgccccagtatcaatatagaaaagtttggaggtttaagaatagcctgggttatatagagaggtcttgttgagagagaaggagagacagacagacagagagagagagagatacagagaaacagagcccatggatgggatgacgacttaggcatgtgtcattattttggacctaaaacctactgttccttgtgttgtctgtaagctcagctttcttctttgggaatctctgttcccgagttcttaaaatacctaatacaactttgaaggtggagtgcctcagtgacataaggagccacatctgggcacatggaggtcacgcctgctgtgtcaaaggcttggctgtcatttttcttttttttacttccggttatattttgtttgtttttgtcttaatggggtctcactcttacccaggctggctagaccttctgggctgaagcaatcaatcctcctgcctcagcttccagaattacaaatggacaaaggatggtgaacagcacgtaggtataagaaatcgaaccccaagcccctgcaagaaccgccagtggtcttaaccactgaaccaccccttcaggcctctgccttttttgttttggtttttgagattagagtttcttattgacgtggaaatcatggagtaggctaggctgcttggacagggaatcctaagctttcctgcctgtctctgcctccccaacatcccacgacaccttaatatttttcacattggttttagggatctaactctagtcctcacactggcaaagcaaataggctcactagctccaggtgagccacccccaaccatttcttgttgtcttcctaccagatcataaagccagcaaggtgtgtcacggttgtgcgtcttgtgtctggcctatctcctgtggaaggaattcagttctttgctgcccggacagggggaatagtcacaaaaattcaaacatgacttcctttcaaattggtatgagatggctcagtggataatggcacttgccaaacctaaccacccgagttcaacccgggaaccaacatggtggagggagaaccagttcccacaagtcgtcctctgaactgcatctgcgcacatgctcagaggcgtgtgtgtgcctctccctcctttaaaaaattgatgtaattcagaagattcttactctaaaacgcacaattcagcggttttgggtatagtcagctttactaccaacatcagtacctaggggacatccttggaccactccccacaagacaaagcccctttgttccatcagctgtccctctacacaccacacctgtcccgagcagccaaccaagatctactactctctgcagcatttcctacccaccactgtaacacacggaattgttcctcctgaactttgacctcaacctctttcacataattaggtttcctgggtccttctctgttgcagggtgtatcagcattcgctccttttcctggtttggccatagtcctctgaaggtatgcaccacattaaaacaaagagcaaaactcgtcctagccaagatgatttgattttttactatccgttgcaactctaggatcctaggttcacgtgaatggggacgaccgaatctcaagattttctgtgctcttttcttcctgaactcttcttcctcagatcctgggagcgcagccccgcagaggccctgcgagtttacttcctcagtcttccctttcaccaggagtcagactccctaatactgttttaggaatccccgttcccctctctcctaggctacctggcttcctgaaaccggacaccgcgaggaccaaggtctctgtctctctcttttcttcttcttcttcttcttcttcttcttcttcttcttcttcttcttcttcttcttcttcttcttcttcttcttcttcttcttcttcttctccttctccttctccttctccttctccttctccttctccttctccttctccttctccttctccttctccttctccttctccttctccttctccttctccttctccttctccttctnnnnnnnnnnnnnnnnnnnnnnnnnnnnnnnnnnnnnnnnnnnnnnnnnnnnnnnnnnnnnnnnnnnnnnnnnnnnnnnnnnnnnnnnnnnnnnnnnnnnnnnnnnnnnnnnnnnnnnnnnnnnnnnnnnnnnnnnnnnnnnnnnnnnnnnnnnnnnnnnnnnnnnnnnnnnnnnnnnnnnnnnnnnnnnnnnnnnnnnnnnnnnnnnnnnnnnnnnntccctccctcccttcctctcccttccccaaggaaattaattcaggtacaaaagacgggtggaggaagtattttcgacttccctcacaatccagaaagaaaaaaaaaagagagaaagagagaaagagagagagaagaaaagaaaaaggatttcctttgagctgcgactttgtgatcttttaagcagttaaaaatatttctttaaaaaaaagaatctaggaaaatcatgcgacttgtgagtgggagctaagtcgatgctaagtttctccgtaaagagaagcgacaggagcgcggtttcctaacctccccaagtgttttcatcccttcggtttgggggtggctccctggggacggctaggacagcggcgcgctctgcggggtagcgaggccgcaggactacaggatccagaggcctttgtaaactcttgtagttcacgcttgttggctacctcggcttccctgaggagtgacgctgcgaaaacaaattctgattggtcaggcctgtgctgaattctccatttatggacagattgcccggcccgagcccagcctgagccagagaagagttcggattaagtgttaagagaaagcgggtccaggcaaagcagttggacaagcaatcccgcagagcgcatcagggtgcatctctagacagttggggatcgccaggtctgagtgtgcaccgggtctgctaagttttgccttcacctagcgtttcggatcccgcctggatggagtccctcttggatttccattggctcctgtgagtgcttgggtgtcgggagcttgttttttggcgaagggaaccaacttttgaagttcgcccaggagaccgcgttccagcctcagtgcctaggcagcgggacccggcggaggcgcgaccgcggcgggagtcaccatggtgagttggctgcgccgcgtcccaggacgcctgaccctgggatggggcaggaagccccggagcgggcacctaccttgggcaagctgcccaggccagggggtggagaaggtggacgcgggagtgtgcacttctggagcgctgatttcctgctgtttgctgtaaaccgggtcttaaacgggaagagggagagaggagggacaagaaaaactctctggagtgactttctgcgccgcgaaagttttggtgccaatgttgttgtggctgccagctgtctgaagcttgagagtgggcacgtctgttttcaccggcacagccgtgggaccggagacttttttctcctctagagaaggtgaggggcacgcctgtgtccctcgggtcctctcccctgggcaggcactggcgtgagctccctggcaggctgatcccgcagttgttctcctggcattggggaggacctaggcagccccgcctgcgctggtgatgggccgagcgctgcacaaaggcaggcaggggcgccaggtactgcggagcacctggcggtggcccgggctgcagggactctgacgacagcgcgcagcggcagccaaactggccgggagcccaggcctgtagggtccctgtgtagggtaaacacctcctgaggagggccccacccggtccccagctcgagaggaccgccaccctctcggagatcgttcctggttttgttctttcccacttggtacttgggggagtgtctgggttggacagcctctctgtaactcatttgagactaagtccccagcccagccaccctcctctctcaatcccaaataaccttagccacatcccctgggctttgccgtggtgtggctttcctactgaaggacaaaaacaaagattgaattttagagacattgccagccacccggaccgaaaggggggggactttaaaaacttaaaaaaaaaacttttaaaaggttttagaaggcttcaaagtttccacacttgcttcgtggtggaggagcttgtcctcctggctttctcattgtttactggcggtgagggtgaagcttactaaaaaagatgcctagcatagcgctggcttgagaaatctgtatcccagatccccagcgccaagcatccgcagcgcacgcccgggtagaacccacattcagttcacaaacagtccttgcccccccgcgctgtttattcaaaagaatgattttaaaaacaaacgaaacctttaaagggcatcctggccccaagcttttactttccacatagttcaaaattatgtcacctttgcccctgagagagaatacttcatttataaataagcttcccccgccagtttcgaggtttcagaagtcagtccaccctcatggtgtgcctcatgggtggagtttctccagcctctgaccgcttgaacttgaacagtgatagtcctggtgcctaagaattgctgtaattactttccgtggttcaatatttctaaaaaaaacccaaaatcaatgtgtctatggccaaggacttaaagaattttactgtatgtaattgcttaagtgctaccttgagaaaaatcctttgttaaactcacttttttttggctgcgtagaccctaaattagcctgtgatgccctttccagagacgtgggaaaacacgctcaatttggctccttgcagttggggtagtttatttggtccatcagatgtggaggtgtgtcttagagtccctttcttggttgatttatcagggtagacagggtgtagtcacctcctcctgggttccctgccaacagcacagatgggcatgttgtgggccactaggaggctatctgtgcatcagatatggttgcccgggccacaatttactgcccggaaaagttgaaacagctggctatccttaaatagatgtgccatggacagaaagaactctagtatctagagtcatttggacaaagttaaaggaaatgtgtttcttccatgacttggaagtttgagtgggcttatcagctgtgtgaagtcaccttagaacaggtacccacaactcagatagtcctgtgagaatgctcaatgtttctgtaagaagtctctcgctgaatggaacttctgtgttatgcatctgtctgggcctgcccagttgaatccttcagctgtttaaggacaggaagggatgggccattaccctcggtgggtgtggccaagaattagcacagagcacaggcccttggccaggctggaggaagaacacctgcactgtgaactctctgtgtgcttgtgcgatggttgctcttgattggcaagctaataggatttagaatcatcacagaacaaaacctttgggcatagctgagagtttctagcttagatttgtagaggctgcaagacccacagggtggcaccgttcctggggctgggcttgactacaaaggaaactgggagctgagttccagcagttgtctctccctgcttcctgcttgctggaacagcggcgtgatggctgcctctggtgttggctgcctctggtattggccgccatgcctcttcccccttgatcagattgtatccccttcatcctctcagacaagcccttccaccagttccttttgtcagggatgtttgtcacaatagaaaaagtaactaattgtgtgtgtgnnnnnnnnnnnnnnnnnnnnagagggggggagagggagagagagagggagagagaagagagagagagagagagagagagagagagagagagattggggaggagcgtttcaggaaggtctgggagcatattattagactcttcatctataccaactgacttactcagctgtgactcacgatgaaaattgccacttcatatttatgaacacaattgtatcgttcacttctccttcatattcattaactacggaatactagatcatcttggaaaacccagaatatattaccaggccatagttattaccttttcagttaggaggcttgaagaggtgagtgtgtgtgtgtaactctgtatgtacatcattataaatgaagaaatgttgtttagaagagtgcagaaatgccctgttggctaaaacttccgccatagactctggctttagggtccatgacaaggtattggtagccatggtctatttactgtatgattggactaaaacctatgtatgtgagtctgctctctgtcttggcccggagagtgtgattgataaggtttttgtgaacaaactatgcagagatgattgagtaaacctgacttggccattgcctttgaaaatgtctgagctatattcctttttctttactgtgtattattcttgagttgctagcaggtatagtacccacacacacaagaccgattcattcattcattcattcattcatttgagacggtgtttctctgtgcagcactggctgtcctggaacccactttgtcgatcaggctggccgtgaatccaaagatttacctgccctgcctcccaagttctgggatcaaaggcgtgcaccaccacatctggctacagaaccgatttataacttagagatctggtagacagtcgatcaaggggaagataggttccttcgggtggggactggtatgtatttagtaagtctggaatgcatttggaatgttttctgggaagtcaatttagttcatttattgattatcagattctagaagtcccctggccagaacaacacaattcagctaaactggagagggttagacttgatggccgtgggaaggttaaggaaaagctagttcaggatactactaccttggggtgcggtgcggtgggccagcccagggcatcctctcttggaagagaagcccatcaggcactggatagacagagaggaggcaatgggaaggtgaaagtcgtcccacccccatctctgctgaggactccgcaggtggaaacttcagtggagagtaaacaagaaatacacgtccggtccaaagaggaacggccatggttattacactgaccatattaccaggttctcttgtagacgcgcatgcagtctagagcctgtgctggactgctcatttttatgtatcctgatgtctctgacaggccaagcacgctcatctgtggctcatctgcccggagccactatgagctcagtatgtgtccgtgaaccacaatacttcctccctctacttgctagccacagggtttaaacagcagctgcgtactcagtaatgatgtcagtgttcattgctacatctacgtcttctcctacggccttgccagggaaggcggttgccgggtattttgtacctgtggaatttggcagcttaagcaagggaaggcttctgtacagctgcgctaattggagctgtgtgaacctgagtgaagatggctcgcgagtggctaggccacgccttcagcttcccttgttaccccttcatcccctgtttcagtgaaatgctccgggacccaaggttccgcagtgcaggaactcaagggctatcgccagagttatcagtaagggtagagagcaagcacctgcgagcgtttttttggtggccacagattcccctctcggcttctggtgtgtcgtgaagtcacgttagactacgtggaagcgtgcttctcgtccgctggtgagaggggacttgggtcccactgcctggaaagaacacgtgaaagcttttcgccatcatctctgttcatctccaacacacccaggcttaaatgcaattttaagacagcccacctaggttggcctctaacttatagtcctcttgcctcagcctcccaactgctggcaatacagacatgtgccacatctggctataatatgcagaaatattttgaaacctttagactaccataagatactctgaacctcacagtgggatatgtaggtgcatacagtcatgcttttccaggttcgaaatttgagtaatttgcttttgatatatattttttatatttaagatttatatttatgtttatataaaatttatgttaaaagttatataaaaattgaatcacatgtgcttgtatgtctgtgtaccgtatacatgaccatgtacatgcctgggcctgaggatacaagcagagggtatgttaatcccttgaaactagagttacagatggctgtggtccatactgtatggatgctgagaatcaaacctgggtcctttgcaagaacaaccagtgctccaactgctgagccaccttcctagccccattatttgcatatgtgtgtatatatcaaggatacagcaacttgtgtttttacccttatgtaattaaaatggtttcaatagtatttttttgcttcgtttttgggtttggatttgtgtgtgtgtgtggttttgttagtttttgggttttgttttgcttttttgagtcagggtttctctgagcagtcctggctatcccagaactcactctatagaccaggctggcttggatcagggatccacctgtctctacctcccaagtgctgggataaaaggtgtgtgtcgaaagataaaaggtgtggcttttttttattttcaattgattatttttgtagtgctaagactctgtccaggctttgtatcgatagcaagacaagaactgtggcactaaaccacgtccccagaccctgatatttttatttcccactttgcttggacttgacatttacagagcaaataagaggttaaagggtaaatgccaacggtattaaaaataaacatctcagccctgcaaactcattctataataatagcaagcaaatcatgttctgaattttgtagttcagaatttattttggcactgctaatagcttattggtcatcctattagaattttttttttacatatttttttgacagttaaatcaagacaagcagaatttatggtcctttcctaaaataatggtgctgactttgacaagccaggaacctttctctgtatatgacatggacttggtattcacttctgagttcctgccttgagaaaaaaagactgtcatcattcaaggccttttcggttttactttttaatccacaccctacagttatttctttatttctgtatgtgcacacgtgtctgtagaggttgcaaggcaacttttcagaaattacttctctccttccacctatatgggtcctggaaaccaaactcaggctgtcaggtttggcggcaagtgtccttacctgctgagcgtcttgccagccttccaagtacttttgaatagttgtttatgagccacaaaagaaaaaaaacattttcaataacaatttcctttctgacctaaaatactcatggccgtgtgactgccatcttgctcactgggagctctatctggtccctctccactatctcctgcctctgaggacagagcatctaccctactgtgggcacggagcaagcatggcagtcaaggagacgggtgctctgaagggaatccatgatgacttgggtgtttagaattctgatgtgtattaaacattcactcgtagtacttcacaattatacatcccgttgtagggtaccttctagaacacccaaagagagtttgagatttctgtcttaaacttctatagagaggggtggcctggaagatgacctagtgaatatggtgcttgtcatgtagacatcagatctccagcacccatataaaagccagcttatggcagcactggggaggggggcagatcctaggggctcgctggctggccagtctagctgaagcatgaagcctccaagctcagtgaaagaccatgtctcaaaaattaagggagagcagtgactaaggacgatatccctacatctacttctggcctctacatgtgcccacatgctatacatgcatgtattacacacacacacacacacacacacacacacacacacacacacacacacatacacgtggaaaaaaacaaagaaccctgagtcttcgtagggctaaggatgcagctcgctcagcaggatgtttgcctggcatgcatggagccctgtgtttgactcccagtactgcatatacccggtgtggtggtgcacacctgtaatcccagaacccaggtgatgggtttgcaggagcatccagggctcctctttagctaagtagggagtttgaggccaatctagagtactcgaaaccctgtttcaaagcccgaggagcagggttgggggaagagaggctgtcttccagtttaatgacttctgaaggctcatggctaggttttggctgagcttgtggcagcctatgaattttctgatctccgtctaagagggggacggattagaatcttattttctcaacggtctagacacgaccaagagagttttgtttctgcgctcttgctagaaggcctgtttggagatgaaagcttgctggttttgattcattgccacttaaactggaaaagaaagattctaagaaatcaagtctgaagcattcgcccataatacccattgctctgcagcacataattattttatgcctttgggtttccttccaatctcttccaaccacactgtttttatgtctcattgtaataaagaggcaacaatatcatccccgtgttctgtattttattttattttttcatttcttttataaatccttcaccttgtcatagtctttgctggtggaacacttctatgtagcctgatgatagacaaacctaagtcatacctgtagaaaaacctcccttaaaagaatgtacaagaaaaagttcccctgctaatcactacaactgccatggtagtggactgctcatctttctgggatgccagagaccagggcggggagggggaatctttttggtgtacagttggaactgccatgtacactcccatatccataacctccaaatatgtgttgatgatggaaaagacccccaatcctgccaccatctaaaggatggtacaagaccttctatttttttctgcaagtttcagctgagagatgccttccacatagtattagggggcctgagagccagaggtgatataaggcttgggaagagaatagagagaagttgagtcctctggttgaaaccttcactgctcctacaggcccctacatctctcctacgatctgtgtcctgtgatttgacttccctgcagatttatagcctctggagtgtaaaataaaatatcagaacatgaagattgggggaggaggttggggagcacctgaatggggaaagattcaggcagcgccttcgagaaatgagcagcagtattcaaattgccataacagacatggctggtagtcactgtgttgcctgcaccttttctgactcaccaaatatgtattaagtgtccgtcctacgtgctgcgctctgggaagacccacaaggctcatataactgtaatattttacttgctttatacttcaaaaaaaaaaacccagaatgcaaacgtgattaaatagcattatattttaagcagcatgaatgtaggtatttctttgttattctgtgctttctagcatcttttttcaattaagaaaaaaatgcatataaacacatacatacaattctttgtataattttaggagttgcaggaagcggtgaaactcacacagaatcatttgtagagttgaagcaaatgttgtgtctgagatggatattaaggtgaatggtcagctttgaacttccattaggttattttaattacttggcatacggtgatagcaagagtaagtccccactgagtgtggtgtaaagagtgagcgaggacatgtgtgccatgttgctcagttctctacttatcatcttagtcatcttgccttgctccagtgtgtgtgtgtgtgtgtgtgtgtgtgtgtgtgtgtgtatgtgagtgtgtgtgtgtgtgtttatgtgtgttcttgatgtagcacctgtcccagtcactgtgatttaaatattacttctcaggatgctcagatgtgctagctggccagttcctacgtaggctggctctttctgtggtcagctggtgacttggctggggatgggagatgcaggatggcctcacacacctgcctggcagttggtccacgtgaaggctgtcagactggtctgggcttgtttacatagtagtggtcacaccacagcgtcaccaggaacagtaggaagcgtaagtggcgagacacaaaagttttataagttttctgtgcatcatatttactgttttcctcgtgggcccaagcaattcacatgtctacaccaggaatcagtgggagaatggacttcctcagggttgagatatagtccctctccaccactgtctctccttccttgatggaatgaagtggggcaagaataaacccggaagctgtgctttttgagtgtgcgtgtgcgcgtggtgaatgtgtgtgacaggtacagcgttgctcctgacacatcctctgctgctcttcccaaggcaggacaaatatttgagacctcttggtctcatcccaaaattgcttctttgccgttgttgaaaagaaaaggtcaaaacgatagttaacgagaaaaaagaaaagttcttttctatttactgaagggtattctgtggaaatagtcagcatttaccttgagcccagacttagagcaccctgagtgaagccaaaccagacaggccagccgtccttttggactaaagaacggaactcactgccttccaaggtgagggcagagcgcgctgcctgatgctgcctctctagccaaccctgagctgttcatgtggagaaaagtattcctcacacagacaaaaatacagtttttccttggctgagaagcatttctctggcctataagatgattctcagaataactcgtgtcacttccacatcatgtgaaccacaaagtgtgccgtctgcagtctcctctgccacactcgaagacatgacgtgtataggattatgtttacagaatttaaagaaaaaaaattactctacaaatttctctatagcccttttctttctctctctctctctctctctctctctctctctctctctctctcctcttttatctcttttaatttttttttttgagacagagtcttactttgtagcccaggctggcctccaacaagcaattcctgcctctatcccctgagtgccagaattactcgggttgtaggcatgtgcataaccacacccaattcttttatttagaactacagcagtcggggaaaaactagctcaggataactcccgattcatctttttctgcttccaccttaccctggcttatttgaagtcaaatgctatcataggatttcatccacaactacttattctgttgggttttaaacaaagcaagacttggcgctttgctccttgggctggaagaaggggtttgtcccacacaaccaaagctgttgtaacaggagagcccttgttttatagaattgtggagatatctctgctcactaaggggacttcccaaagtgtgacccagtgtcattcacagagaaggtgtgtctggcaataatacctgggcatgtactatcgtgatatacaggacgggctgtctccctgacccttcagtgttggctcaggaactacatgtaagccttagggagttaaggcacttgtcaccaagcctgactacttgagtttgatcccagggatctacatggagagagagagaaccaacttttaaaagtgtcctctgaccttcacacatcaactgtgacatgcatggcacccacccacaccacagacaataaataaaagcaatcatttcaagacagagtttctctggatagccttggctgtcctgaagagtcggtatagctcagagatctgcctgcctttgcctcctgagcgctgggattaaagatgtgcatctttaattaaaaaaaaaaaaagtaacaaagaggaggaagaggaggaggaggaagaggaggacttcctctaagattccgagacacgtaaactagtaacgtaggtaaatgcatgactgcggtaggttctgtttccttgataactggaaacactgagagtcacagccttcgtcccacattcagatttaatattctcccatgatcgctaatagaaatgcatcaaatacaaattaggggcataaagtgtagattttaatattaaaagtcctgccatgcagtggtggtgcacgcctttaatcccaacacttgggaggcagaggcagaggcaggcagacttttgagttcgaggccagcctggtctacagagtgagttccaggacagccagagctacacagagaaacactgtctcgaaaaacaaaaacaaaaacaaaacagaacaaaaaattagaagtcctgttattaccctggtggaggattcatggaaacatagaattaatattttctaattgaggacacttgaggagaagatgggaggcctctagtttctggactgagttaggtttgtgcgcttttggatctccttactgagaagtggaggcagggatacagaaaggctgggctagcctcttccttccagttctttctctcacccatccccacttcctcacaccagccacaccctcccaggagtgccccttcttgccccatacaaagcctcttggcccattgttttaggttactttctagtactctaacagaactctgactaagagaaacttgggaaagaaagggtttattttatttgacagttagcttacagtccatggaggtaggtcccagcagaaactcaagccaacaactgaagcagaggccatggagaaacactggctattatcttcctcctctgggcttgctcagcccaatttcttatatagcttagggccacctgtccaggggtggcatcacccacccgttgtggtctggatcccaaacattaattattgctcaagaaaataccctcacagtcttctgaccaatctgaccaatctgagggatgcgttttcttaactgaagttcctccttttaaatgaccctgacttgggtcaagttgacaaaggaaaaaaacctacccagtacacccatcctcccggggtaagggcggtggggctgggaagcctgggtattatacagtgtgcacctgctcctctctcctcccacctcagcaacctttatcctcccccgcccagccctgcatagcacttctctgagtgagcgaagggtcaagccttgtctgttcttctgagacaatgaggcactgtcctcctcatttggtgttgtaaagacaatcaccagtacttagctgtagcagtgtttaagggtcagttggcagaggtggccctggatactgcaggggcatgatggagtgagtggcaggacccatcccagtggctctgcatcctcaggattcctgcctggcctcatagaaccacgtgaggtttcatttcaggctcggaggttgtataccatcaccttgtctgtagctagcatccactcttgcgctccatccccagcttgcctgctagttctcctttgaagccagccccgattccacttttctgtatctcacagttgcaagttattgctttcaaaattctgtctcactccatctgcaaagatcacagagttctgcacattttagtttagtttttttttttttctgatcaattactgtccagggtgacttcttctctgcatccagcatctcctgcccagtccattctgcctgtgtgacattttgtgacatgctatactagtataggatcctattttaaaattcaatgggaaggggctggagagatggctcataggttaagagcactggctgctcttccagaggaccctggttcaattcccagcacttacatggcagctcacagctgctagtaactccaattccaggggtctgacaccctcagattgacatacactcagacaaaacaccaatgcacataaaaaataaataaataaataaataatttaaatgaagtaggaagactaggaaatgagctcagtcactagactgcttgccttaaaaccgaggacctgagttcattttccagaactcatagggctgggggttggggcaagccatgtctggtgacacgctttaggaattccagggataagggaggtagagagggtggatccctggggcttgctggctaaaaatgcctagcctgcctgatgggcttcacacctgcgagattccttgtctcaaaaaccaagatggacaccacacccacacacacacacacacacacacgacaaattaaaacaagaaacttcatggaggacatgcttgcatttctctgtgctgtgtggaagtagagacattctttaaaaccgcacaccctacatctttatcttgaaaggcaggaggagagtgtggaactgtcaacacggcaaagtgctctcaaaacccacggcaggaaagcactgccagggttcctcagctgagtgaacagaggaggagtgaccctgtggaagggccctgagcctttctctttgatgggggcatgctgcagttgtctgagccaatacaatacagtgagaacttgtttaaaaagaaaagcaaacaaaagcagaaacaaaaaaaccaaccaaacaaacaaaaacaagctgaagcgattgcttgctgtgaaatctagaggacttgagttcaaatccccaggatccctcgtgaaagccagctatggccatttgcctgttaccacagtgttggaggatagagacaagcagatcacggaccagccagcttagacaaaacagtgaacttaaggtgcaaggagagaccctgtctcaaaatagtaaggaaaggagcaaaagaggaagacacccggcatctgacctccacatctgcacgagtacctgtccacgcacctgcagacacatctccacatataccacacacaagggctggggatgtcattgagtagagcagttgtctggcatatacaaggccctggcttttgttgccccccccacacacacacacacactgaagaaaaaaatcaagggtggggtgttgtggtgcatgcttttaaccccagcaccccggaagcaagggcaggcagatctcttgagtttgaggccaacctagtttacaaagtgagttccaggagggtcagaactacagagaccctgtctaaaacaacaacaacaacaacaacaacaacaaaatcaaacacccaatcaaccatccccaaggcactgcggggcctgactggacttttgtgtaagtagctagcaacgtgatttactacgtgtggatttagagggtggcttggttacttaaagtttctagataagccaaagcctggccaagtccatcaagtatcaaaataggcaaatgcacgctcaaaaagtgtaaaagaaagcggtttccagtgtgttgggagtgaactgggaagtggtccatgccactgtggaagccagaaagaggcctaatccccagtcacagttagtagtgaggaatattctgaaaggctcatagggcggagacaggcaagggcagttggggacctcctgccagtgggaggttttcaaatgacattaggtcattaaatacttgtttattgttctgtcttacttcagcagtaaactcccaaggaggacactcgtgcttatggctggatttggcttgttttggtttttttcatcacttcagaacgagctttggccgtggcaggatgggcaactcagctgaaccgagctattctgtttcctccaaagtgcagaagaccctcagcccatccagctcaactcactggcattaactgcacccttcagagaatgaatgattgatggcagtcagacaagtgcttgtaaactgaaaatgttttcaaagattaaaaatagccccctcgtataaaactgcacttgggtttcctcttcagtctgcttttaatagaacaggatattagtgagtgcggctggtgaaggaagctagggggtccaaaggggtttggcgtctaattcttgcctcttctgttcctatcctccctaatagggagaccataagacttgcctgaggccacactaccagttctgtcttgtcaccctaggcgtggtgctgctctttgctgagagaaatgaaaacaaaaatctattacggcaggcagtttgcactcaaccctgcagaccagcctgtgctcactctgactctcatccctcatccctgcagaccagcctgtgctcactctgactcccatccctcatccctgcagaccagcctgagctcactctgactctcatccctcatccctgcagaccagcctgtgctcactctgactcccatccctcatccctgcaggccagcctgtgctcactctgactctcatccctcatccctgcagaccagcctgtgctcactctgactcccatccctcatccctgcagaccagcctgtgctcactctgactcccatccctcatccctgcaggccagcctgtgctcactctgactcccatccctcatccctgcagaccagcctgtgctcactctgactcccatccctcatccctgcagaccagcctgtgctcactctgactcccatccctcatccctgcagaccagcctgtgctcactgaatcctgaacgagaggagtggtcagtctctttctgtaggtctgaaaaatcgatgccaggttaactggatgggaaggccccggagactttcagcatgtgagattcacagctgtgctctgggtctgttgtggcttaaatctgggggaggaggagtttactgcctatgttttccctgcagctaacaggtgcctagtggatcagttgggccttaggaggcctaaggacctgagtttccttggaggcccagctgacagcttaattgttttgtttattgtgctgatggcaaattccagttgattcatctgcatcataggaacttaatcgtttcttgcagtttcctttagcctcaaagatctctgatttttaaggacttcatattaggtttgactttctctcaatagagactgcagggccagtgatggcacctttaatcccagctcttgggaggcagaggcaggcagatttctgagttcgagtccagcctgggctacagagtgagttccaggacagccagagctacacagagaaaccctgtctcaaagagagagagagagagcgctgcatgaaacagaaaatgatccaattaaaaacaaaacaacagtatacactctgtctacattatcttggaacctgacacttggattcacagactttaagttttcaggggtaaatattaacatgtacaaaggaatggtaatattttgctaggcgaaagctacaaactcccagtaaatgtgattataatatatgttatatatatcacaggcaagagtttcctacttgcctgtgataataaatttttattatccacctttaagatgattccatgaagtaagtgcatttttataacttctgtacaaatcaagcatgttagatcaaaggactttatgatacacggaggagtgttctccctcgggctgtagtttggcatttgggaaggggaggctaagcagggtgaaattcattgatggtgcttctgtctaggtgtgctggcctccttagggaagaaaggcttcctcttcctgagctctggcctttgagaattctccagctaggaaatcctagggtaggtcttaatgtcataaatcactggaacaaacacaggaaaaggctatttttggaagtgtttgcaaccatgcaggcttatggggctatagctttttgtggctgctcccctgtccagggttttctgttctcagtcatttctactgcagacttcagaaccttccaggtgctgtgggtgcctcggaaaagagactgagttggaaaagtggcttggtatacgcattgaggacttaagttcagacccctagagcccaaattctggatgcagtggcatccatcttgtatccccagggatcctccagggagctggtggtgtaggaggtaaagatgagggaacccttgggaggtaaagacatggaaatgcctggaaatgtgtgtgccagctagccagagaccctgtctgagataaggtggaagggaatgattgacgcttggcaaggttgtcttctgattgccacagctgcaccttggcacatgaattccacacacacatgaacacacacgcatgcaagcacatgcactcgtgcacgagcacacacacaagcgtacatatgtacaagaaagaagagactttccttgacactcacagttactgagagttggcctatgctgtctcacaacggagcatcctttgtagttgatgtgtttgtcagattccctccttttactgaacaaaaggcaaatgagtcaagcaccctgcccaacatcaccgtcaacgaaatggcacaggacaggtacagattctgggttagcttcagagagttgctgtctcttcccacaaacatgcatttgcaacctttggcctgagggaccagcagcactgtgacccagggaacattatactcaaaactttcagctccaacccagggcctcttgactcagaatctgcatttaactgggatcctaagtgagcgcctgggaacactgtagctaagcaagggaacgtgggtctgatcatgtctccagaggcagtctttgctgactagcatgtcatcttctaaggacaggatacagggatatctcaaactttgagagacccaactaaccaccagcttaattatcctgctcaattaaccatccaccagttcctaggagtggtattgggggcgtattttccccctggacaattctagggtcagcttgttctctttagattacagagtgggttgcccatagcaggataggagacctttcagctcagaggatcctgtctgtggctgcaattgattccagccttggtaccttgaccaatggctctgaactagcccatcaaaacttctagaaccagtgagatagtcagaggcaagaggaagacctcagagagttcgaggctagccaggactacattgtgagactttgtctcaaaacaaagcaaacccacaaacacagctagctgtggtgtcagcccttgtaatcccagccggaaagggggagacaggtgggcagcagtttatgcctgaggagtgaatcctgaggttggcctctgacttccacacacacatatgcacatcatgtacacccaagttcacatatgcactgcccccccccccccggcaaggtgtactagcaggtagacgccttgtgttaatagggctaagcatagagcttagctgagggacagaaaacaggcttcataggtgaggccctgaattcaatcccctgcagggtggatttctgcctcaggtcacctgtactttccagaaatcctgtcatatgaaagctacagagagcatcttgaattctatgtcctgccaatagctcgcacaaacaggttctccgaaatactgggcaaatgaatggactgattttcctatgttctttgtagattggacccagccctcaggtcgtttgccatgggcttccctttcttgccaccgatctgatcctcagaagtctcactgcagcttgttgttttgttttgttttctagacatagtttctctgtgtagccctggctgtcctagaactcactctgtaaccaggctggtctcaaactcagagatccacctgcatctgcctcccgagtactgggattaaaggcgtgcactaccgccattgatgtggtctttttcttaattgcctgtgtataaacgatgtttgtgtgagggcaggcacgccacagcctgcacttggaggtcaggggacaactttgaggaattggttttcctcctaccgtgtgggtgggagtccatctatacctaggatggcatttaggtcgcccaggtttgtgtgacaagcgcctttacttgctgagccatgtcacccactatctccagccattaacaagttctctttgaaagagtttcatgttgactgttcaggaataaacttcaaaatgagaagtagctgagtcaggttaggaacgcttcaagaaaactgaagcatctatctcctgaggtgagaagtgacttccactcctgaggtgagaagtgacttccactccttggtgtattggagatctctctctctaaatattatatatatataatgtgtgtgtgtatgagaccttaccatatgtgtgtgtgtatgcatacacacacatgatcttatgtcttagttagagttttactgctgtgaacagacaccatgaccaaggcaactcttataaacatttcattggggctggcttataggttcggaagttcagtccattatcatcaaggcaggagcatggcagcatccaggcaggcatgaagctggaagagctgagagttctacatcttcatctgaaggctgctagtggaagactggcttccttccaggcagctgagatgagggtcttaaagtccatgcccacaatgatacacctactccaacaaggccacactttcaaatagtgccacaccctgggccaagcatatacaaaccacaccttaccaccgtgtgtgtgtgtgtgtgtgtgtgtgtgtgtgtgtgtgtgtgtattccccccaccttggctttcacacacctctgtactccatcaaccctccctggtcttccacagagcttggatatcaggttgagtcttttgctttttgaaactgagcctcaggtagctcaccttgtgctcaaactcactgagtagttggggctggccttgaacttgtggctcttctctctctactttccaagtgctggcatttccaccaccatgtcccagcactaaagtgagttgttattattatgatccttctctgacacaggtggtcccccagagtggatgggcatcatctggtcactctggttgttgttgctgttctgaggtatcccagagtttaacctagggctagcagacactctaccactgagctacaccctcagtcctgagttcccaccccacttccatccttagttaaacaatagctgttataaaatttgaatttttaaatttaatctgaatcttttttattcttctcttgggactcccaaatctggacttctggaagtaagatcatactgaataaaagttaatgaaaccatgactcagtgtgtcctccggtccgggtgtgaaagtgagtcagacagctgtgtgggatctactccaccctaaagtagagacaggcaggaggctagggaggaaggctctggagcccctctaccttgccccacccccactgtttcctatatgatttaactccaatttcatttgattataaaagaaaccagaactcaggtgtagtggtacatgcctttaatcccagcacttgagaggcagaagcaggcagatctctgtgagtttgaggccagcctggtctacatagtgagttctaggacatccagggacatatgagaccttgcctggggggcataaataaaataataatgtaaaaacacagggagcctaacaatgttaataataggattacaaatagtcagatcatctcggagcacatgtaattaattcccagtgtaatcacaagcccagtgctgggtttttcccctctccacccttctgttttctcttctgactttactacctggcccccagaatgagaggcaggaattgccgatatacttacctcattagcattttaaaaactaatttattgaactttaggggcactctgccatttctctctagtttttttatagattgtctctaagtttcaggttgtccactaaggaagtacttcaaattggaggccagtggaatcagtttagaaatgatttaagaaactggaccctctctgctccatgggccccggcacacaatttcccattggttggtttggcacaagatgaatgttctgaatagaagagctctctttacccttccacaagtggaaggtgcattacgaggctggaggaagcacactgtttgctgcgttcgtcctggctgggggacatgcacacagccgtggcttgaagcgtccttaacatgtttagatctacttcaaccacactaaaatcttttgttaattaggagataacaatgaatgtaagcaaaagccaggggtggtggtacacacctgtaattccttcactagggaagaagcaatcaggaggattaccaggagtttgaagtgacaaagtgagttccaggacagcctagggctactgtgtaagataacttacacagtaaattacaaactaaaaattagcaattgaaaaaaaagttaaagataacactagaaacatatgcatatccttagatattcagatttgaagttactggaggaaagtgacataatttccaagtaattattagtactaataagggtttaaatcattgtctccctcccttctgcctggggttgtctaccatgcccaggtcttaggtatgttcctaacgagttccccaaatccccacgcattcccagatagggtccttcctaatctatacattcgctttctttgtccatacattcatggcacctaccttttgtgagctgaacctgtctcatatagtcaaccttgggatacaaccacacagctttatgtccttagaaaattgaggtccagagattctctgtaaagtcacctttgcagctcttacgtcataccagactgggagtggaaagcagacgtagctgtgtgactttttgaatctccttggatgcttcccaaaagcagtcaaggttaagagccacagctggtgaatatttaagaattattgcattgggtatgtcgctcagttgataaagtgctccctcacccattatatgtgacgtcctgagtttgattttcccagcattgaataagctgagcgtggtggtatacacctataattccagcattctggggtatagtgctggagttccaggttgttctccagtttcattcagggttagcctgggctacatgaaaatatacattactgactatgctgtgatttggttcacaccaacgcacactgatcagggtgtatatttaccaactgcattaagcgcaatagcaggaggcttttcaggtttgccctgtgtgttttgcttttggaaaactgcttattgaatattcttacttttgtaaaaggagtcttattctgagggggtggaaggtgagcctttggacagccttgggcaccttcagggatggccacctagtccacttcggagctgtgccttatactggaaacctctgaatcttgatacggctaagaagcccctgagcaatttgagggtgtgacacagacttgtttgttacagaggctccaagcagttcaggtgggagtcttgtcacccagggccatggctttccagctctgtgtctggagatggagcccaggcctcgtagtcactgggcgagctctccgcctccgagccacacctgcaccctttactctcggccacagtctgcactttgcttcagatgccgtctcagctctacattcttcagctgcttttctggtcagtcaacctcctctgggccactccctggctgtttgaaggaggcagtgttcagctaccgactgcttcctagcctgaggcttccaaagtccactcttagggagaaagtagctcctggctcctgaggtctagggcacccttttcctcgaggtcctttcctctccataaagagttacgcatcttagtaactttctttctaaataacttatttcacaatttgattccataccatcgctatgaaaatagagttgaattttaagtaatgacttattcatttattcattcagtacgtagcccaggctggcctcagctcaggatctttctgtctctttgccctaagtgctgggattatatgagttaatttatttatctatttatttatttatttatttatttatttattatgtgagtacactgttgctctcttcagacacaccagaagagggcatcccattagagatggttgtgagctaccatgtggttgctgggaattgaactcaggacctctggaagcccagtcagtgctcttaaccactgagccatctcttcagcccctaatttttttttttaacctatgtatgtagacctgactgacctggggttcgctgtgtagaccaggttagcctcacagcctcaaactcatgtgatcctcctgtttctgtctcctgagcactgtgactgcaagcatgggcctcccataggatagaaaacattttttgacgaaccagtttgtttcacgtaatttaaatgtcctgcataatttaaacttctcatagagaaggtttttgtaaagttagagttgagagcaaggaaaaccactctttcttttcagcctttataccccaccagtcccaccctcctgagtttccacactacagtctgtctgcatccccaggaacatctcagcagaggctagagcccgccttggttgaagaatttgaaagtgacctccttttcttttctttgaagaaatttaatttattcccactcaattgtattttaataggtttttaatttttttcttttttaaaactattattgtaagattttgtgtttgtgtatgtgagaaagagatgcagacagacagatgcaggcgcagaagcagctgtgggtgtgagtgtgggggtcagaagacaatttgggggattgattctctctgtatagccctggctgtcctggaactcactttgtagaccaggctagccttgaactcagaaatccacatgcttctacttcccaagtgctgggattaaaggcatgcgcctccaccacccggctccctcccttcctttctttcttccttcctaccttctttcctttcttctgaagtcttttgtatcctaagctggccttaaatttgttatgtagcgaaggattatcttgaaactcctgacccctgcctctacctcctaactgctggagatgcagatatgcacagccatgcctagtttgtgtgatgttgggggcgggggtgtcaaatccagggctttatacatgttagcaaggactatactgcccgagacacatccacagcccctcagtatcatgcatatttaagttgtgttctggatgccatatatttaattctcaactttctgtagttgaggatctttagaaagaagaacctgggagttgactatgggaaagaaaaggaaaatattgataggaagaggcaagtgggtgatgggaaattaaaagtagagagagggtctgggaagagaagcctggggtcctggaactgctcttttgtgacttagaatgaggttgacccggaagagtgattggcaggcaactagaccactcagatgtggaggacttacctgaaggaaattccaccttcagttatcttgtattttaaatataatggttagaggcccaggcatggtgaaacatatctatgttatacagaaaacctatcccacaagtgttatcattccacagtatgatcaggacagctggagaagacctgggaagggtctctgtgttggaggaagatggatgggagctgtttagtacctgacaggactaattcaagatgagtaagacatcttggatcgtttccttatggagtgagtgccgaccgcacagcttaaaagtctgcctttaaatattgatgagatcttgtggtttcacccattaaactcttgcatggttttcccattgcatcataacttttactcaaaggggtcagagacctcgatgctcttgccttgtgataggttacagacctttggccctccctacccccggcagactctatttcctctccatcactgcagacggtgggctgtgtgaggacttccaccaagcacagtggccaatcctggtaattggttggcaaactcaagagagtttgctctgcccagcatggacccgagaatcaggaatgtactgtgttctgtggaatccattccatctcctctctgaagcaaaaggaaactttcaacactgacctagtttatgtggctattataaaactcccctatttaatgaaagtggagagcaattctaaacagaagcagctaccagacttctaaagtctctccccatctctaaagttccattctacttactcattgcacacacagctcttgctaaggaccagatgcagttacacctacttagtagccggatctgcctacatcaccaagctcaattcctgcagaagaactgagcttgattaacctatactcttgggtgacatttatccatggagaaaaaagaaacacagcttcctctaaccatgctagccacatcatgaagagagacaaggggtgtgctcaagccatttacagcattacccaggggaacggttgttctaagcttgggttttgcatagtcctgtaacagctttgtgagcatggtacttggagcaaggtacacagtatgaacattcttttaagtctggtgggtctgatctatgccaaaccggaacatgggttttacatgattaaaaaaaaaatcatgattattcatccttagaaaaatcgtaatcagatccattgttgatggatctggataatggcctccattgctgaacaaagccagttctttctttctttctttctttctttctttcttttttttttttttttttttttttttggggtggttttttgagacagggtttctctgtgtagccctggctgtcctggaactcactttgtagaccaggctggcctagaactcagaaatccacctgtctctgcctcccgagtgcagggattaaaggtgtgtgccaccactggccggcacaaagccagtttcttggtaattcctatatatgttgttttcagacctctggtggacctgacttagctagaggaaagaattgttctctaaaaagcgtgcaggatcagctgcaggcttgactcctgtttgtgtcttgggcagctctgtctgtttccatacctgtgagatggaagtattcgtgttcattttcagactcagggtttagagggtctactgttgaattattgtagagttctcatatggccacacaactaaagccaagccctacttatagaaagccataatttaaaaataaaagacatcatggtattctgagtcctaatagtcccatgataggcacaaacggacattaaacacatgggttttggtggtgtttgtttttgtttatagagatagggtcttaagactggttttgaatttttggttctccctcagcctcttgagtgctgggtttataggtgtaaatgcccctttctgctccaaggttttctgtttgtttgtttgtttgtttgaatggcagggggcaggggtgtgtgccacagtgcacggtggaggtcagagggcaactcgtgggagtcatccttttccttccactgtgtggatggatctcaagggttaaactcaggtcatcttcaggctccgtgctaaagtccctttacttatgagccaccttagtgagccattgttttgtttaatccagaaagaaaaatctctaagcctttatattcactgggtatatagtagggagaagatggcctataggacctgctgaggactctcttattctttcacactgtatacaatgtatctcgattgtatccagaccaagaatcctggtcacagatgaattccccttccactttcttgtcttttcttttgtatcatctgagagaaccttccacctgagtgtagccagcacggtgtgtatccttcttccacacaggttgagtcctttcctattgtccttggggattggcttctgtgcagaagagcccacctcatctttcatacaaaagctaattggtaaataaaggctcagctgtctgatagcaaccagtttcaggggcataaggtccaatgagctttaaaagtgagtccatcctagtgtctatgtaactagaaaaagcaggtgtcggacttcaaagagatgcgaggatagcccagccaggtctcttgtgtttttttttttttccagccaagagcatcatgtggcaaatgcaggagatgaaggtgcaaagccgcccttgatgtaggaccaagtccggtttttattgttcttcatattcgacatagatttattgatgtaaaaaccatgctgtcctgatgtggtcaccatctgctttcaaaatccctcaaatctcaaattctgacagtgtctggcaggtccctgtgtgtgcttgccagcgaagtgcctcagtgtggcttcaagtgattttaacaaattctttgatgatagtccaccttttactgggaaaaactcccgcacatctactaacctgtaccaaagcttattctatttagttttaccatctaatttatactttgtttattcatcaagaaacaaagttgtgggctattcaagagatgagagagaaaattttttcccagtagtcttaccttccaccagagtgtccttgtttttctcatgtatagtttgacaatgtgtgattagttttaactgtcaacttgctaggttacaacctataatctcctaggaagagggcccgagtgaggagttgcctgaattaggttggcctgttgtcgtgtctggaggtattggtttgattattagttgatgtgggaagacccagcccattgtgggtggaaccatcccctagacagaggggcgggaactatgtaaggccggagaaagctagaagcaagaagcaggcaggatgggtgcttttgtttctctctgatcagcactgtggatgtgatgcgaccactgcttgagttcctgccttgactgggacatagccaagtaagccctttcctctcctaaattgctttgatcagggtgttttatcccagctacagaaattaagctagcaacgcctattctggtatgaatatctctttaatatggtcctttttactttcccttcagtgttggagatcaaactcagcatagagtttgaatagtttgcataggcaagcaccctgccactgagctacacacccagccctgacagtctttgtactaactttttaatcaaagactatgaaagactccactattcctactaatgtatttgttgaaactttctaagtcctactctctgctagggtttgtagctatattttgtaactagttttctcctgtctgcatggtaatttcctcccaagcttctggaagcgtggcctgtagatgaagcatacacagatgggtggagcgaagtgttgagggttttatgctgatctagaaagcaaatacttctaataggtagcaagatttggtgagtttccagctgtcgagatggctcagtggatagaaagctcttgctatgccagcctgtcagtctgcttgagttcaacccccagagcccaaggaaaagtaagagagccatctgcgaaaagttgtcctctgacctccacccacatgatacacaagtccacatcctcacacacacacacacacacatacacacacacacacacacacacacacacacacacacacacatatacaagtatacacacatatacaataccatgcacagacacatacacatgcacaggcacttgagaacatacacacatacacatgtgcattggtacgtttaaaaggattggaggtgccttctctcgggtgttctctatatcttttctttgagacaaggtctcatgtagacaaggctagcctccggctctccctgtacttgagaacgaccttgagttttttgcgttttgtttttgttttttaattcttttgcctcttcagtgctggaattacagatatgagccgccacaccctcttcatatggttctggggatcaaacccaggacttcgagcccgctagacaagcattctaccaacgaagccatgtccccagccctctctacaggtttagaaccacactgctgtctgtgtgactggaaggactgccgaagcatttgtcaagtagcaccagcaatagtttgattactgccatcagatcccaccaatgccgtccgttaccagggcagtgggtatgagccattcagtagcgttttcctgtttaggtcccaggaggcatctgaattgttgaggctttgaagggcaagattctgctgatgttgagtggaggcatattcctctaatctgagattatgttagtcaagcaagctgaaccagtaggaagcaggctctgcactcctgctcctgtggtctgtagggaggcagaagctccgcctcccagcagtctttccctaggacttggcatactgacgcagtcccttagtttgctaagttagtaaattaattaatattcaaattaagaaaaactcccaagtataaaataagactccaagctggggagatggctcagtggataagaggacctgtcctgtaagcataaggacctgagttcaaatccctaacatagaaagtcaggcccaggtacttgtacccacatacagagacagccggatcctgagagttcactggtcagctagcctggcttacacagtgagacttctctcaaatgaacacagcagaagagcaatagagaaagacactcaccatcctagtctggcttctgcatgtgtgcacatccacatgttcacatgcatgtagcatgcacagaaatcccagctacaatagacagtcctcagcttcagttactttgtatataggatagattttatttggctggttggctacattttgatatgtaagactattgataaaaaacatagactcctggcagatatcaaacttatgtcctgacttatgatatggccccatgcttctgctgcacctcggatgttaccagctatcaccaaacacctggacttctattactgtcaagcaaactcatgcatgcatggctactggctacaatgaactacatgattggcttccagaagcgttttgcctattcacatgtctgtcgagggcagaaaaggggaaggaattatgtaaataataatttgagagttaggtgtgtgtgtgtgtgtgtgtgtgtgtgtgtgtgtgtgtgtgtgtgggagagagagagagagagagagagagagagagagagagagagagagagagagagagagaagaagatactttcagaggccagaaagaatattggatctctagaagctggtgtcctaggtggctggatgctagaagctgaattcaggtcctctgcaagaacaggatatacttaaccactgaaccatctctctagccaccccactcccacccccagagcaatattttttaaacacatcctctaccacagagtttcctgatgagggtaattggtcattcagtcaggaagttgctggcctgtcatacacttccctcttactggggtctgtgtctagaaaggctcactgcttccaaagtgtttacttagctatagaaacttaagaggaatctactgaaagtgctctttgcagtgtaaacacaggaatgggcataggggcggggagaagaactagaagctgaaggaacggcaggaggaaagaactggaagaaagtgggaaatcaatttgctcagaggaaagataaccccgtccatcaacgggaaaagggctgactgtgtgtgtggtcaggccgaggtggctaggaggcattctcccagtggtgtagaagattggcaagtttatgcagaacgtagtagaaatgaagcaagattattaaaggagcagctggaaaaacagcatgtggagtcagggtgtgagattgcagagatttttaaaaagtggcccttcttaggttgctccccagagggctccttgtaaggccatcgcagacagtagaccctccaaggcctcagagaaaggaaggccaaactcaaaactcacctcctgctatgtttacatcctcacctctgaggcgtatgggaagatgagcaactgtttagcttctttatataatagagacacccatttaagacccaacatgtaagtctgagatatagctgtcaatagtgcttgcctagtaaacatgaagtcttgagttctagtccctcgaactcatgaaaaaaggcagctatggtggagcatgcttgtaaccccagcactggggaggcctaggaaggtcgatccctgaagttcgctgtccagcaagtctagccaaaaggatgatctccaagccaatgagacaccatgcctcagaaaacaaggtcggttgaaacttgggcttgtcctctgacctctgcatgcacaagcacaccattgcacctgcatacaaagtaaataatcacatagaggactgcaggcgcagcttggtgatagagcgcttgctggcatgtgcaagaccttagggtttcttcacccaggacttcagaaaaagacaaaacactgtggggctggttgtggcaacaaaattagcgccaactaacagaaagcgagcagaatgaattctggagtcctcgcctgttctatggtagcacaaaggtctgctctaagtaatggggacaattggtgtgtgtggatttggcattagactgtacgatgaccattctgtggatttataggaggatgctccaagttgtcttgaggctgacactgctctttgggttaatccatgtgcattggtgtgcatgtgccctcctgtgccctctcatagtgaagtcttggactcctgtgctttattccattcttctctaattgcaagttgtgacttggggttcactttttaactctgagatggtcattgtgtttgtaagtgctatagaaagcctagatttcatttccattaaattggctacattattggatgcattaatctggtcatacactttatctcacatagggggtgacagcaactagaagactttgaattcccccttgcctacgtctttgcaatctgagttaacttctctgagaacatagttcctcatgggccaatcagaaatgctgtctgtctgtccacttgatctgcttccactttcaggcttttttttttttttaagttttatttatgagtatactgtagctgttttcagacacaccagaagaaaacatctgatcccattacagatgtttttgagccaccacgtggttgctaggaattgaactctagaagagcagtcagtgctcttaaccgctgagccatgtctccagcacctgttttgtttttagtctcaagtggccagtctggcctgaatctatatcaccaacagtgacctttaatttttatgacaataataatacttattattattatttgtattgttattactattattattagcctctaatctccaaggtgctgggactataggcatgcaccatgccactcagtttatatgatgctggaggatcaaacccagagctttgtgtgtgctaggtaagcgctctgccatagggtttgaaggttccaaaagataaatgggtggaaacaaatgctctgcaaaattgcagggtagcttttactttggcttaatttctacttgtgtgtcagttcttatctagtgcctacattccaggctaacaaaggagagctttgggctgcattctccttgaattagccttaccttatccttattttaaaatgagcctttctgtttcctttcatgtcttttgaacctcatctctaccctgcaataatacaagagctgcagttaaaggaagctgagaaattacaggactgcagagtgaaaactcccagaggtacagagagaagcaatctgagaccaatcccgaatcttacaccacaggcttgtgggcccagctttagacttggggtgctactggcaccttgtacagatgcgccaggaactaacctaattaagtttagattgtggaaggtcctgagttcaattcccagcaaccacatggtggctcacaaccatctgtaatgggatccgatgccctcttctggtgtgtctgaagacagctacagtggactcctataaataaaatctttttttttttttctctaaagacacattttggagctggacatggtggcacactaggtaggtaactgagatgctgtggcacaggttcagggccaatactcataacatagggtgtctcaaaagctaagaggaagaggctagacaaatggctcagcagtcgagagctcatactgctttgatagaggacctgagttctgaactcagcacccaccatgctgggtggcgcacaaccacctgtaactacagcttctggcctctgagggtactcacacacgtgcatacacacacaactaaaataaatccgttcattcatcttagaggtttgagaagaaaggtgcttgtgactaaaggggcagtttccatgtggctacctctaaccccagtgctgaggagcccaaggtgggccgattgcaagtttgaggccagacatatcccttatcccttgcaccatgtgcctgtgggttgctttaggcagagggctggcagcaaccctcaggactatctgagagtgtttacttttatgtgcaattatcctacatgaacctctgcctctgtttgcacatgtgctgtccgtttaacttgacggcactgacctaagatcgagtttatgctaagcctagactctgtattagagcagcggcaagggagggcggggagccatttaccttaaatgatccttgacttgaacatcaggtaccccagaaagcctgcctgctttgacttttaagatctttagttacagcactttgattcttacccttaagaaaattctcctccgagcatttcgagccacgtggaatatctattactgcttaggaattcgctgtggttttcattgatcgtggccccagactttggaatatgtattaatttatctgggcaaagagtgcagagctctacatgaagaatgctgtgaacgctctgctgaagcagacggctgaagctgggaatgattaattctcaagaaaaaaaaagtcctcgaaccgtcggcattaataaatattgacttataagaaggtatttttgtttgcactttacttcctaaagtatggaggtaattggactgacttcttgtttcaaagtgggagtgactccccccaccgcccccactgtggacagtatttgtttagagtcattggtaaattattaatccacgtttggatgtttcatgtttgaaataccagtccgccctctccattgggaactgtgtttacgctgtaggcagcaggggcttctgggaagtgggaatagctgtggcttgctcttaaagaccttaagagggaatataaaacaagcagtggctgtgcaggaagtggcctgctcagtgttcgacagctggcagtcaccatggcccagtcatatgatgccctccacttggatggaacactgacgtgctgtgggaaagtttgggtgggctttttttccccctctctgctttgactcacagaggcccttgagtgccctttaccaagttcctgtggcttctttgaacagatgtcaaaatctctttgggtttggagtgaccccaaatgcttataactctgagtctcgggtccatttttcttccaactatgcacaggtcagattgctacgtgggtgtctgaaccatttagttataagatcctagggccctccagcctcggctgcattccacgttctagctgaggtactcagtcatcgacctcgtggatcctgtcctggatggacaggaaggagagacctcgccctgatgctggttaaggaaggtggacgagccgagtcagacctagtatggggtctcatggcctggaatgcaagcttcaaggggaggctgtcttcctaacttcagagctgtgcttcccatagagcaaagaactcagatagagccagactgagcatagaggaaatgttggcttcttgctaactatttccatatatttactgcatgtgtaaccttttgactcaagttctattttgaatgtctatctggatggcagggctctggttttcttggtgggttgaactgaagctaagctgtgggatggtgacagcctctcggagcttgaaagataaaccaaccctgccttagctttgttcttttgaatatatacttatatataaaactctggtcccttctcttgccccaggccctagattttcacatgccttaagccttacagatctggccagtctgtgcacagacctaaagcagaaggccggccacttcctgtcttggggaatgacagtgtgccctttgctctcacctgctaccactgattgggcaaaggccaagttctgcaaggccttttgactgccagctaacattcagggccgcaggtttgctcaccctctgagtcaccagactctctgccatgctgtggggccatgggcttgggaattctgtcacctctagcacaggccaatcccagccacctagggtgtcgcctcagagggatgggagccttgaccctctattgacatggtgtctcagccttgtcatagatgtgtgcagaaataagagctgaccttgatgttactgctcccctccccctccctccacacacacacacacacacacacacacacacacacacacacgcatgcacactaaatatcagcttacctcaccatttccacgtataaagagacaagcagctcagcattgctctgttcctagtgtggcaattccttctagaataatgtagaatgttccttcttgtctcccttcttggcctctggaattctctacagagcagttcaatgtttaaagtaaataaatgcaaatatttatataatgcttattctgtgtcagcacagaagggggatatttaagactaggtttctttttttagaattttgtaaaatgtctttttaaaaacaagtgtatggtctggaggtgtagctcagtgggagagaatgttctgtcctgggttctgtccctggcccctcgtcctgaagtcaatagtaagctaagcgggtgccagttctccctgtggccctgagtgacactggtcgtagaagcaggagcgtgggaggcacagtcatgggacactgtgggcggatgaccagactcaggtgtggtttgcactcagtgagatggcagatgccttcctgcaaagggagccaatttcactttaattttctcttcctcctgagactccggtcagtaacccatgcccagtgtccagttcctaggaaggaatgcctgtttcagggctgtcttcccatttgctctgagacggcagttcttcataaactctttacagggaggtgggcgggatcctggccattgagggaggctcttctgagtgtcggttcctctcctgttcttttactgacagacgggaggattcttcagagagaaattcatcgccttcattcagttaaagcctcactataaaatgccagtggctgccttaactggccctccgtagaccacaaacagtattggttcccttgaaatgtaactccatgtgtgggagtcacataggctcaggacatttcttaataatcaaaaggtggggctggagagatgcctcaagatgcaaggacgttgttgctcttccagagaactcaagtccagttcccagcacccaggctgggtggctcacaacatttaactccagctctggcctcctccaccacacacacacacacacacacacacacacacacacacacacacacacacacacataatttaaacaaacaaacaaaaaatcacaaatcaacagttacttcttgcaacactgaaaaagagcttgggatttaaaagaatattttatttcgtttattgttctctgatgatgtgcatgcgatggggtgtggtggaggtggggatgtgccttggcaaatgaggtcagaggccaaggcggtgcaaatgggtttcccctttcatctttatgtaggcttaaggggttgaacccccgttatcaggctgagccgtctcaccagcccagatctcatgattcttgaattgaaatgtaggtaggtttaggctaacctcacgacttactctgttgtgcatttttccagaggaagtgaaaattatttgcgtattaagggaaatacatagttctctggggttttttttttctcttttctttccttcctttcttcttcctttttcatttgagcacctgatgataaacatgtacccaaatagatcaggaagtaaacttaagtttgatcagggtttaaactctaaagaagggggcctggagagatggctcagcggtaaagaacacccgagtcctttctcagcactcacaggacggctttcaactgcctgtaacttcagttctaggagatctggggctttcttctggcctctgtggggaccaagcacacaagtggtacacagacatacctgcaggtaaaacacttagacacataaaataaaaatataaaggaatctaagagcggaggctggggttgtagcagggttggcagagtactttcatcacagtcaccagacccgactcccactgaatgtaaaagcctgatacaagagtctcaagactgaccaccaccggtagcaacccaagctgggcctctcagtccctcgctacctagtatagctgaagtgaagtatatatcagtgcctgtctgatctactttgtggggagggagagacggggtgtcatagatcggcactcaattgtgacactgttccccactcgcaacccatatacctgctttgggagaggatcctcaatactgcataaacacggtttggtggggtggggcacatgtataatccaggcactggggaagcggaggcaggaggataagaaactgaagagcagcctgggccccacagtaagttggaagtcagtgtgggacacacgagctggaatgaactatgggcaacaatcatgcgccctacttaactggtgagaaaatgccaggcagatgtaaagtccaaggcctcgcctgagctctagctagggtagcttgttgcaatgtcgacatgtcgctatgagccagatgcggagccggtttctgacagcctgccctagtttaaggaagaaagggtggtttatgtttaattctaaaaagataaagaggaaatgttcacttctaaaaagtgacagcatgttttcacaaaggaaaaaaccacttaacaaggtaattgggcatgtacatccctcctgcacctcccctctcccccaattctaagaaccaaatctaggacctcctacatactaaacatactcagccactgagctgcacctcagctgcctttagaacttagtttttgtagagtaataatcttactattagatgctttgttttgttttgttttgttttgttttgttttgttttgttttgaggcaaggtttctctgtgatccctggctgtcctgaaactcactctgtagactaagctaaccttgaactcacagagatctacctgcctcagcctcccaagtgctggaattaaaggcctgtaccatcaccaccttgctaccattgagctatatttccccccacccgccatgtcttgttatgaggtatgttagtcaggggctggaaaagacgtcaagagcactgacgaatcttccagaggacccgggtttgattcccagcacccacatggtacccacaaccatttctacctttagttccaaggaaccaatctagtgctctcttctggaccctgtgggtaccagtcacagatgtggtgcacagacattcaccagacaaaacacccatgcacataaaacaataataaaataaaagtttttaaacgtgcatgttacttataccctcttactctgagctgcactgtgtaagccatttcagcctgccctttgtggagggaacatgcatggagcagctcacagatcacctcacagcttctgacaaagacattcccagaattcaaggccgccagccatcccacaaacatccctgcttctattatttggagagctttctcctttaactaaatttaaaaaaaaagagtttatttaagtcattaaacctgttgaaaggaaggtagttcctctctctcccccacccccaccccctttttatttccttgggacttgtatgactgagtctcctgggttttctaatagtgcaaatgtcattcgctgcctcctatccgtagaggtgtgtgcgcttgtctcccacttcctgccaccatcttcggccatcccacctgcttactggctgagccttctcttcctatgtatgagttgtagctaaagtcggccctgtctgaccgactcagttcgcaccacacactgctcagatgaggctctgctagccctctgcctctggcctgctttcctccagctgcaggcagccactggggtttctgggcctgcagaagtccccttaggtcacagaagggaatttgcagtcctgggctcaggccccgcccctccagctgcacccctcacctaagctgcttatccatgcctccatgactaccaggtcctctcccacccacgttggcagcccagtctgcaccgcacccttagatgggtgctcacaccatttttcattttgtgcctactaatttttatgttaaagtttttttgtggttttgtttttgttagttttacaaattttatgtatatgggtattttgtctgcaggtatgtaagtgtactgtatatgtacctggtgactgggggtaagagagggagttgggtctcctggaactgcagttgcagatggctgtgagccaccatgtgactgtgggaaccgaaccccactcctctgcaggagcatcaagtgctcttaaccacagggccaacgatccaatccccaaactgtatctttttatgatgatgatgatgatgttaagaaatccccttttttgtcaaaactaaaactccgttgatttgtttttgttttagaaatttttaattcttttctcttaaaaacaattcctattctaattctatttcccctgatttttaaaaaacacatttatttacggatcaccttgagagcaatgggctaatagatgttctgtttactacatataaaggttgacttagacaaccagaaataaggttttaaaattatgtcaggtgtgtgtgtgtgtgtgtgtgtgtgtgtgtgagagagagagagagagagagagagagagagagagagagcacacgcacatatgtacatatgtgtcaccatgcatgcataaggatcagaggacaacttttgggagtcagttctttccttccactaagtgatacctggggaatcaaacctaggtggtcagtcatagtggccagtgccctctgtcagaggaggatatcagatccatttgagctgtatctcagcagcccagaaatagtttctcctgatgtgacattaaaaagacataaaatgtgaaagcacagatttaaaggcatcattaagaaagaaaagaatcaggctggtccagtggttaagagcactgactgctcttccagaggacccaggttcaagtcccagcagccacatggcagcttgcaattgtctataatagttccagtttcaggagatatgatacccctacacatggaggcagaaaaacaatgtaaataaaattttaaaaagaaagaaagaaagaaagagagagagagggagggannnnnnnnnnnnnnnnnnnnnnnnnnnnnnnnnnnnnnnnnnnnnnnnnnnnnnnnnnnnnnnnnnnnnnnnggagagatccaaagacagaacaaccagtgcttcttgaaaacaacaaaacctaggtcatgatatagttggatttcgcttccccataggcagactgacgttttcaaaacagccaggtaagcttgtgcccttctccctcacccctgccctctcaacttccacctcactgctgctgggcaagacatttgaacttcagaaacagctatgcactcaggtttgggcttgggtctagtgagatggctctgaggttaagaacattggctgcgcttttggaggacctggcttgcttcccagcacccagtggtggcttgcaacagtttaccactgcagctcctggggatcagatgtcctcttctgtcttagccctgcaccaggaagacgcatggcatgtatgtatgcaggctctcttacacatactttgtaaaaaatattttgagccgggcgtggtggtgcacgcctttaatcccagcacttaggaggcagaggtaggcagatttctgagtttgaggccagcctggtctacagagtgagttccaggacagccagggctactcagagaaaccctgtctcgaaaaaccagatatatatatatatttctttttaaaaattgtgtttggatgtttttacctgcatgtctgtctgtatgcatatgaatgtaatgccgtcagaggccagtgaagggcgctgggtctggatttgctgactgtcgtgagccactgtgggggtactgagaattgaactcaagtactcataacaccagaaccatctctccaccctctaagtatttttaaaaggagtttgtacttttgtatccacgaatgatgtggtattttgttgtatttcaagtaaagtgtttgtttgtttgtttgaggcaaggtctggagtgtcgacgactagtcttgaacttgatacatatccagggtttcctcatccagggtttcacaagagtgccaaggacagtgcctgcctcccaaggtcataaggtcagccatgaagactgaatcatccccccacacagacctagctaggaaaagtggtgattgtaggccacaccctttctacatctcatcagcatctcttcctgtctgagtctccctaggctcctgatgagtcagcttgctttcccaagtctgagccccagattcctctcctatacagggtttcggcagacaggaactgtacctgcagccagcctccgacattatggtgggtcagtactaagccctagctagcactgcccctctggtagcagcctggagtcccctggctgagtatgtcctgtgcagaccctacgtgatcatcctgtgcatcccactcgtgggtctgctgttttcctttcttagatacttttaaaattagatttttaaaatgtatacggatgttttgcctgaatgtgcgtctatgcactatgtgtgtgcctggtgcccacagtagccagaagatattagatgccctgggactggatagatggttgtgagccaccatgtgagtgcagggaaccaaagaggaagttctctggaagagcagtcagtgtttttaatcactgagccatccctccaacctgagccttttgtttttatcaccattggaaacagggccacccacaatctgggtaatcattctacacactgagcccaagccccttgctctcagtacctcctctagccctcttacagatatcgtatctaacccctattaaatggcagtgtgtatggagacacaagatggagtgtgtaatgtttctcttagaacaaacacaaacatcaggtgaactttcttctcacctgggagtgtgttgtggggcgtgggggagcagtcctatccagaatatagctcaacactctgaaatactccaggattcctgaggctgctcatttggctcggccactgacaagttcatgggcattaattaggcggcatgttttaatgttttaagtctccgggcttatttcccacttccagttccagcgtctggtgtgttgcttgctcaggatgacatcttccttatgaagcacaaagttttcatagaaatatggaaagaggtcagcctgacggactccgcatgaatcctctgagaagtatgctgtggacatcagggagttctgcgtgcagtctgcaccacactaaatgactgttataactgacagtgtggtctgtatggacaggaagcaatcagaagagggatgggcagatgggaagtagtgtttgcagtcatgggagtgaccattccagaacaattgttagcctttctttcctcttcctcatctttttgtaatacttttggagagggggggggagagagagagagagagagagggagagagagagagagagagaggccccacccatttttttttctttttggcagacttggaatgagttcattagcatcctggcctccagtnnnnnnnnnnnnnnnnnnnnnnnnnnnnnnnnnnnnnnnnnnnnnnnnnnnnnnnnnnnnnnnnnnnnnnnnnnnnnnnnnnnnnnnnnnnnnnnnnnnnnnnnnnnnnnnnnnnnnnnnnnnnnnnnnnnnnnnnnnnnnnnnnnnnnnnnnnnnnnnnnnnnnnnnnnnnnnnnnnnnnnnnnnnnnnnnnnnnnnnnnnnnnnnnnnnnnnnnnnnnnnnnnnnnnnnnnnnaccatggtgaaaaactgccgttctgtggtcccaggtcctccctccacccctcttttagactctgttcttttaatcttgctctctctctctctctctctctctctctctctctctctctctcctgttgtcattcgttgtctcagaatcaccacaaaccaattgcactagcacgcacgtcttgagcctcagatgcctcagtgtaaaatctatttcaaatggcccccatatgtgtctgagtaactcctgggttgtagtttgtcacgagaaagtttgagttccacaaaattcagcagcagaaaaacaaaacaaaacaaaacaaaacaaaacgagattggccttgaaatcagagtggaaggagagaaaccacctgaaaagatgtcctctgaccttctcacgtgtgctgtgtgtatgtatatgtatatgtgtgtgtgtatgtatgtatgtattatatgtattaaaaacactgagggtttaggggaagggtgttttcctggcatgtgaaaaggtcccatttccccagagatactatgtgaaagtgtctcagaagtcaccccatagtgcaacattctatgtaaaagtgtctctctcaggagtgaccccataatacaaccttcttcctatgtgaaaatacaacactctatgtaaaagtgtctcaggagtgaccccatagtgcaacagtctatgtaaaagtgtctcaggagtgaccctgagttcaatattctttcctttccaaggcttccgttttctcactgccctctctaccactgcttaaaatagttaagacacatccttacctttttgaggtttttattctgtgcttttatacacgctctcatgttgctcagactgccctggaatactatgtagccaaggatgaccttaaactcccaatctttcctccactcaccaagtattgtgacttcaggtgtttgctaatatacccatcttatgcaaccctgggaagggaagccagggttctgggtatggtaggtgagcactagacctactgacccacatcctcagcccatcacagttgctttcctaagtcagtagaagaggaaactggagcacagagaaagactggccgtgtgggctgtctgagtatgcacagaaagtaggtgagagagaccatgccagatcctctgcagcccggcgccggctacttctacactactgattccagcagtgtgtctgtctctccactccagggaggctgaggcggaaaggtcacagagacctcggtcagatttagccaggtttgcagagccggttggatggctgaaggcctccctgtctgacgcttgccccagtccgtctgggtgtgacccaaccattttggtgtctgtcaggttccatatccacgggagtaattaagccattttagtaatttcatgtggtgcagaaagtcccaagccacaaataccatccccagttcctacttttaaacttccaaggagcttcctgctccctcctccctgcagttcatctaaagttcttctgttttctctttctgaatgcatgggctggatggaaagccctggtttacttaacgagggactctggggccaactcacatgagaggacagccagcctttgtttgacaagagtgggaacagtgaagtaagggcccacacactcaaaagaaaagcgcaaaaaccacccgacacggaccttctccctactgtgtggaaatacatgctccatctccacagtggtccctgacaagtgacagggtgacaagggaagtttctgtgcctgtattcctattccagcttcggttcccagcacctgtatgatgactcacaaccatttgtaactccagtttcaagggatctgatgccctcttctgacttttttttattagatattttcttcatttacatttcaaatgctatcctgaaggtcccctacccacccactcctacttcttggccctggcgttcccctgtactgggacatataaagtttgcaagaccaaggagcctttcttcccaatgatggccgattaggccatcttctgctacatatgcagctagagacatgagctctgagggtactcgttagttcatattgttgttccacctatcaggttgcagacccccctcttctgacttctgtgggcaccaggcctatgtgtagtgcacagacatgtaaaatgttcacataaaataaatatctaatgtatcaaacatgtataatatatgtatgtatatatattactatgtttttacactagagtgtgtgtacacatttcactctgcatcagagctacatggatgaattggccaggttgcttcgcctaaaccctatctttctttaaggtgtgggacccatgactctccatctctagcaaggttgcagaagcctcatgtgaactatgatgatcaagattggtgcttaactaccaagggtctataattcaggggtagagaatctgtctagcatggcagacatcctgggttcaatccccaccactccagaaacaaaagaactaaagaagaactaggctgccagggctgtttcccagcagtgatgggggaacccttctgctgttggaaagtcccctctcctccatctggctgagtaagtcatctgcatcttccgggctcacaccaggtccccatctctcacagaacctttcctgagctgtcagcagagctcttctccctcctctgaactctttccatttttcaactagaccttagaattgaatctgttgtcttgtgttatgtgtagagtgatatatgccagtactttccccaactatgaggcactgacttgataatgaaaacaaacctgtcttatcaggccccaacaagacacaatgagctggaagctgaaaatattcaggaacaagaacgcatctgtaccgaacatgtgtagacattttcctcatctccgttccctagatgatacagacagcagctaaatacatttatgctgtgatgagcagtgatggtgacctggaggtgatttccggtatttaacagggtgtgcacaggttatatacaaacagtacatcttttatattaaggatgttggtatcctccaggtcctgtaatgatccccctgaaggaacagtgtggcttattgcatgtgttgtctctctgaaccaagcacaagatgaagggtgttgtagataaatcagtaatggagtgggtgaagattcagggtgagtagtttgtgctcctgtctcatcaacagccattctcagccgctatggggagcctggagccctcacacaccaagtttctgcttctgctgtgataaactctgacattttctgaagtcatggatggagcccactcatgactttggtagtggacactcaggtccactctcgggcgtttctgtgcacactgtttgctgtgcatgacaattggtctctggatcgcaaggtccgtgtgcaaggagctaagcgtggggagtttagggagaaggttggctgggcctgtgaaggccttgcgtggtatacaaggggtttggactctgggtgggaaggtgtttaacaaatgacaactgggcttgttttgttgaaatagtctggagaccctggctttgaatagaatggaagccatacaaacttcaaaaggaagttcagaaattttgattggaagtctgtttctctgtttctctttctctctttctctctttctctccctccctcccccatccccctctttcttcctccccctaacccttccttctctctccccttccccctctgtgcactattatgaatcagtgccagtgtccatatgccagggtacacatgaagacgtcagaggatgtgacggctaattattttaaatcacttcaaccatttttgaatgtttgctttttttattttatgtgtgtgggtatttcgcctacatgggtgtctgtgcaccatgtgggagcagtgtccttggaggctaggccattggtttccttggaactggagttacagatggttgttagcttccatgtagatgctgggaatcaaacccaggaccgcattagactggacacgagaatgcgtggcattttcttgattgttgattgatgcgggagagcctagctcactgaggacggtgccaaccataggcaagtgggccagggctacctaacagaggtgactgactgagtctgagatcaggcctggaagctgcagtctgccctggtctctgcttcactcctggcctctaggtccctgccttggcttcctctttcctccctgagttgccttggtcatggtaatctctcacaggaacaggaaaagtacataggacagaagacaagctccatgtcagcattcaccttcacctgctttgaagtaggtctccagattgctaactctaaggactgggtgaaggcccctggagaatggaagcagacctcaaagctgaaggtgccagggaaacagagtcacgagacagaggcagagaggccaaggccctgtctttcccacactggctgatccccccagatgccgttgtccatcactagggcctccagtgtttcctctaaaagaaaacaactctactgtgcctcaccctcccaggacctcaggcactcacacagctgctggaggtctgggccaaaatcccctactccattgttgctggaggtgcctgagcctggccactgcccaggccgtcctgggagcttccttggacgtggtttcagtttgctgttagaaagcagtagcctacatttttggctgatggtcttcagcttgcctcctcctcctctgtctctggattaattgcttttctcattgctgtgagaaaatacagggcaaaagcaaccttaggaagaaagaatccttggctgatggtgggagggaacagtccatggtggagagtttgaggcaaccagtcatgtttcatccaatagagggaggtggacgctctgctaggctcactttctccccagcccgtgacatgggactacctatatctagggtgagtcttctcatcgaatctagaacagtcctcccagccacaaccactgctccatgtacatctataaagagtgattccatatctagtccagttggcagtcaagattaaccagcacctccatgttttctccttcttcctgcagggaattccttgccccccatctctctctactggcttccaccccactctccatagagaggcttagccccaggctgcaagggtaaagtccaggccgcaggagagcaaaggtccctccctctgtagagttgtctatgttgttttggatgagtgacaccacgaagaacagatgacccttctgtctgttgtatatggcaaggaaatgctttgtaaagtgcaaatggtgttgcaaatggaaggcacatgctgaagcaaaggccaaaaaaaaaaaaacattaaaaaaaaaaaaaaagcttttttatgccgggcgtggtggtgcacacctttaatcccagcacttgggaggcagagacaggtgaatttctgagttcgaggccagcctggtctacagagtgagttccaggacagccaggggaacacagagaaaccctgtctcagaaaaaaaaaaaaaaaaaaaaaaaaagctttcttacaaattaagcattttgcacccttcgagggaacagcccatcatggcggggaaatcacacatctaactttcgaggttctgccgacctgtgcaacaaccctatgctttctttcttccacctacagatgcagctatttcatgggaggccaagaaggaatgacttgatgaagcactgaggttaaacatgattgcatcatggtgtttctgtctttccttgtgtgcctatgtgtacaggcaagagaataacctcagaggccattccttgggcattttgttttgtattttttagacaggatctttcactaggcaggttacagtggctggctagcaggctccagggcacctgtctcagcctccccagtgcggagattataatctcaagacttcacgcctaacttttatctcacttgagctctggggaattgaactcaggtcctcaagattacaggcaagcgtgttgtacactgagccgtgtttgttgcctattttagtgtgatagcgggatcttgctaagatgtttagattggtctcaggcctgagagggctgttcctcaccccaccccaccccaccctgccctcaactccccagtgttgggattgtacattttcactatcatgcttggctaagtctttaagtgctcctcaaaacagacatttctttagtctcactttggggccctgtcagtgagctctgggctcttaggaaagcatcaaacaagatggcaaaaactaagccaggcctgcaatcccatcaccaagttgagtgaagtaggaggattgggagttccaggccaccttgggcaacataacaaaactcagtctcttcaaataatacatttactggaattaccgacccaatgcaaaacatggtaggcaaagatttggggaagccagactctgcaggagggcctgggggttccacgtttaaccaggaagcttcatcctgaggaattgggagtctgttgatggttatagtgcgctgtgtgtttctctctctcccacttgacattccgggtaccctcagttggtgtctggatctctgaattcatgtggatccaggctgattcccgtttcctgccctgccaccttagggtgtggctcctttctttatggacccatggcagagctcaggtcaccaccctctaattttcagcaagggaggagaaaggaggtctgtccacgaccttccctacgtgagacgccctgcaactctggacacacctccccagttaaaacactgggaccacacctaggtgcttgggagtctgagaaaggtggtgttttgttttgttttgttttgttttgttttgttttgaattccagccttcaggtgctcctagctgagctagagagcaaatgactcaaggaaaggaagtacaaaactcgggtcaacctccttgagcccacgagccatcagagcagggggagggcagtctaaagagaggaagagctagtcacagcaagaagacttgtgactcaaggcttgtgtcactgggagcctgagggcagtttagacctgattgtgttttgggtttcatgaagcagaggtctcaattaaattgttacaggatgattctcctcaactcttgtctttagaagtaaaggggaggacgtcctgaaccagtgacagggccagcctaccgtgctgctcaagctggcctggttctcacagaacacaggcctcaggcaaggtcactctgaagccccagccgaggaaggccatttatcattttgtctaagcaaggacgaaaccaagtttcctgtagatgccacagcgcaccaggaaggttctcatgtgtcagatgggcggggcccctgcttcttcccacggattggctctctttcctctttgccagctcttgtagtcatagaaacgctgtgttctctgacatcgcagacctagtgcaaatactactttcggagaccctctgcccagacctcccaacccaaactctacaggaggagggttggctgtgcctggggaggtctcccctgtgcagtgcacagcagcctaaagctcagccaggcacctgtgggctcctggagttctttgctgggaagatgctttgtgctagaggaggtttgattctattctctaagtttggattcatttggagacctcctcgtcagcttggctcagtttctttgcctctgaacatttcaatttcctgacctgtaaattgatatagttgaataatgatatgacttgcatcatgatctcaacaaaaataggaagaatgaacaacaaaaggaatgaaagtcccctcccgccccccccccccaacctgggatggagcccaggacctcacaatccattctttataaaaagtattaatattttgtgtatgtgagtatatatgtatgagtgtgtaagaatgtatgtatgagagagagggtgtgtgtctctatgtgtgtgcgtgcgcacatgtgctcacacatgcaggcatgagtaccactgtgcatatggaggtcaggccagctttcaggatcctgcaactctccttccaccttggtgaggcagccctctcttgtttcttgattggatgcttctggtcattctcctgtgtccttccccacctcccatcttaccataggagcactcggatgacatatgtgtaccgctgtggctggctttctttgtgtcgggtctggagatagagcatgggtcgataggattgtgtagcaagtgcttgccccctgagccatcttgccagcccccacacatatttctaagctttgggagtgttgggagcctagcagttgatccttggctgtatctgctcaggaagctgcagagggcagtctcagcagaacctaccagaaaattgctctaaaacccagggtcatatccatctggatggaggcaaatgtcactgctgattcattttgtaccatctaaatagaagagagctgtttcccccaacatcccttatgaaggttctgttgcgcctcagtgttctgaagggaaactctagaaccaaggcattgtgcagccctggtcatccccagcagccttcaccctagtgttccagggaggaggaaagggacagcagtaactcctctagccgcccacctgggacggggcagaagggcaagttcaaggtcacacccaggctttagtttaagcctcttctctttgccaggtcttggaggaattgggaatttagccaaaacaaagctgcttcaaatacccaaggaaagtgtctgttactgacttaatatcccagcacccaagagaagccttcttaattacccatcacagcctcggagtccaggaaggaagggttgcacgcacgctttcacctagaccttccagtgataagatccatgctaagccaaccagggaataaggtcttctcaaagaaggctagctttcagtactgccaggaataggatgattactacctgctccgggaaggctggggtgccatttcccgggcaggcagacctgagaaagttaactggtggccataaattgctgcattacagttaatctatttacaggtgcttagatgtagataaaaatgtcagtgtctgaatctctccctacctcacacactcgagaggatagatacttctagggtgagcaaacatgagctcgtgtgcagttagctaaggaagagtttaagatagagtcctgaggattgacaggccggccctgctaaattttgatttaaaaaaaatagatagctccttctccaaagaagctgtttttctccctctgaagctgaccttactatgtaggtaccttcttagagatgaccctcgagcctcttaggaatgtctgccagaattcttcaaaacccattttccagactgagatgggaaatttggtaatttccgggtttttatttttagcaatttattcttagttactcatatatgtgtgtgagtgtgcactcactcatgggccctgacacattattgcaggtgcccttgaaagccagaagatgccagatcccctggagctggctcaggagccatccaacatggatgctaagaaccaaactcaagtcctttgggaagagcagcaagtgctcctaacctcagagccacctgggaatttcttttaaaattaaaacattggaagattgctgtctggaaggtgcgctcaggtgtttcacatcagcagagcagcacatggtcgcccgccttccttcaactcccctttctagcatttgggccacttccaggtttcaaagtgtgacaacatggggacttcagagccacttcctcttatgactaaacccgtgagtgtgggagctggggaagtggggaagtggaagggtggatggcgcccagagaagttggtggtgagtgtggatggttctgagtttgcactgggatccttgttggattaggcatctgtggccttcagtgagcaccaggcaggcagtgtctagggaacaggaaacccctctccacccacagcctttgtccagggactggttaagccggacacaccggttgatttgcctagaaggcattcaggaggactaaagaggccaggatatttaacactggacgcttttcctgatgttgccttccttagcaagtggctaattggtctctagaaaaactgctgttttagtgctcagtacgaagatcttacgttacattacagctttccaggttccaggcaggatatttaaaaccccctgtggtcagaggaagatgttatatctcacatcaaatgtcaccgttgtttgcagctgggcattgaagttttggaagaaaactgttagagtaagaaaaaaaagtttgttagagaaaatttagtcagcttgatttaaatggaatgaatgaagaaaaaaagccacaggaattagggagagcgctctctaaacagggtcatcaagttagggtttacctgtctgggaagatcactggtgtgtgtgtagactcgcaacttctcagcttacgtggcaacccagagtactatttcacagcttggtgtgaattacgtctgtattctctttcctgactaagtcactagctccttgcggtgtttttatattgtgaaagaattgaatctcgtgttaacaaaccacaatgggactgtaaatgcggatttaagtaattaatttgtgaacatctgtgtcttaaaacaaacaaacaaaccgaaaaacaaaaccttatatccccagggcctattagagtatccagcacaagtttgatgcctgggttaaaggacgggttatttgaatgggtaggaaaaccaggctgtggttaatgggaaagattgaaagagcgtgcacagccgtcattaaagaatgctgccgtgccattgctgtttgtgtttttgagtcctgaggaatttgaggtagcagttccctgtgggaacgtgagtggctggaatacacacctggggagagaactttctagtatggcttagggacaagtgttggcccccttgttggctcttgctttattctcatccccggatccccacgtgactttaagcaacccatttccagaaggcttcttccacctccacattttaaataggtaggtgttgaaaggcttggtagctgaggcagagaggaactgggtggaggaagggtggacttccaatgaatgactagctatctactgccatgcatgtaacagctttgcatattgtctgagctgatttcctctcagtctttggacagtgctgtctggcattaagacacagcttgagtcatagctctggttttcagcttctaaagcgtcttgttcccgccctgtggaggtggaagacagccttgcagatgaacagcatatctctcggtccagcatccttgccctccctgggacccagcagtctgtgaggaaatcagctaccatggcaccgggaagcccagataaatggtacttagcccttgtctgtctgcacaattctgggcctaggaggaatgcattcctccaaaacgggaaccaactggttttaagttttaatcttattaaaagccagtaaatctttaaggtataggaaatttatgtagcctccaagtatctccccatacgtacacttgtcagtgacaacagaaaaaaagttctaaattattcctcaagaaaacaggcttggacatagacaggttcataggatgaacactgttagtaccccctaatgttacatgatgccctgagaaggacacccatttgcttgtctagaattccagcccaaatcacaagaactgaatctaattatgagcaaacatcagacaaaccaaacagggaggggaattctctaaaataattggcttgaattcttttaaaaatgtcaacaatcataaaagacaaaggaaagctgttacaaatgaaaggagatgaaagaggtctgacaatgaaatgtaacgcattactaatccggaactaggggcagaaagaccgctgggagagacaccattagtaccattagtgtctctggagaggcacaaaagaaattgcatctgtgtttcttcctgaccttctgttataagaaagcaccctatttaggagggtatatattgtaggtaaggatcaggggtcataatgtgtccgtcctctttttatatttttgagctgggagcttagcctttaaaggttaagtcatctctttgagccccagtccccttcctaaatgcttctggaggaatcctggcagagagtgggaagaagaaagcagggttgcaaatggatggagtgtaaggagtttttaatgtatttttttgtaactttttgtagctaaaaattgtatcaaaacaaaacccctatatcttctttatcctgcctttaaaaaccaacaaggagggaaaaggagggagggagggagggaggnnnnnnnnnnnnnnnnnnnnnnnnnnnnnnnnnnnnnnnnnnnnnnnnnnnnnnnnnnnnnnnnnnnnnnnnnnnnnnnnnnnnnnnnnnnnnnnnnnnnnnnnnnnnnagctatctttactgtcctgggatgcatccatctacaaccagagagaagagatctccattcccttgttgtcctgcaaccccctcccaagtccagtcaacccagctggtggctgctgatccatttggagggcagttgggtccagggagagaagtgcacggtgccagagactggctcaactctgccctgcagaggcaagaatcctctccatagaagttatggtggccgcacattgaggtcagtaggaaaacagtccacttgccgtattgaacacagtgatgagtgaatggcgaagaatgttccccagtgaagggaatggcctgggaaccctgcattcggttctaaagatccttgtgaggcccggtgtggaaaacaggaaacagcagttaaaacgggaaatcgctttgggctgaattactgtaatccttcattttacttagaagctggcatggacccttcatccacagcgggatgcctctggcctctctgtgccctgataattttgccctttcactagggtggaacattaccaagcccaggggcatttaggctggaattgctacctttaagtgtgcttagaaattgggatcttatagggctgtttgttttctcccggctctgggatgaaaaaaagcagcctcagcagctctgctagtttgggtcccctcctcctgccctctcttgttttctggtaggcgaggttgagcacacacagagacttacagcccagcctaataataaccccacagtaagcaacatggctattatcaggctaggcagctaaacagaggtacatcccccaaagccggtgacaacaccatgcagggttgcgtggtgggttgcttgctgagtgagactctggcgacagtggcttgagcctttcttccctttggaaggagggtggtttttctgtgtgacctggactgcaccctctgatggagattccatctcggccgcctgcttcctgtctcctgtgccaagcactcagcccagccttcctggccctccttgatggcttctatttttcctatttaaccccgactctgatctctttcacacaaatcccatcttctagcctagctgttctgtttaaggggttcttggaagacaggtccagtcaaacgcaagtgaggtgattatttgtttcttttctgagcctccctctcgttctttccctctcagtggtatctgtttctgtcttttcccctcttcggtgattaaacttatttgggatcttaaactcaaatctgatctcccagcaacccactgggatgattcaaccttagtgattcttttttcaatcatgaattcattggacacacatttacaaagctgtttatgtgcttggctctttgttagaatatgccaggcacagggttgaggcaaagtcagcttcaaatggcttccgatggtagagagaaagaggtataaataaactgagtatgatgtaggaatagaaaggagaagattccttggagtctgtggctggtgaagaggcggcgtgcgccttaggtcctcacagactagatagagacacagaacattcactctgggtagcagtattatgaccaggggcagactttccagagactatcagctaggctagtggcaagaacctggggtgctggtgagggagctgggctttgcatgtgaatttcactgcataatcgtaaaggcatcttatcctagaggctgagacactgctgtatggggtctaggcaagacaggaggacacagggaccttagaaagtccacgtgcctccctgaatttgaaaagtggagtagagaggcaaaccaggctagcattcccaggatagataggtgcactctattagccaaaggaattaatttccaagttcagctagcaagtgtttcagtagggcagttaggcaacaagcatcaccactctgttcatatgcttttcatatttggaacaagaagcagggagattgcagggagatgaaggactaatggacactgggtgcaaattcactccatttccatagggcgaggcacctgcatttgatgcaacagatgcaaacatctaagtgactcctaagaggcagggtcgttctatagaatccatgcatctcaaatgtcactatggttgtcagtttgacataatcaggggcaactgataaaaatctgtacatgattagcagatgcatgattgaccaatgaaaagaattgatggtttgaggctctgtagacaggtcagacttctgcttagtcaggtgcaaacatgacttctcctgtttgtgattcactccactcctcctctttctccttctcctcctctccctcctccctcttctttttctatttatctactatttatctatttgtttgtttcaagacagggattctctatgtagccctggctgttctggaactcactctgtagtaccatgctggccttgaacttagggatctgcttgcctctgcctcccaagtgctgggattaaagggctgtgctgctaccacccagtgattcttttaaaaaaaatacacttattgtattccttttaagaagggagggacaggtggtgcacatgctacagagcatgtgcagaggtcaaaggacaacctggagggggttggttctcttgttccatcttttggttccaggaatggaactccggctagacgccaagtgcctttgcccactgagccatcttgctggcccagatgcaataactgccgagggttttctatgcctgcttggaattctctgtgatgtgactgagttggcgtcagaggctggatagttcatatcgcttgcatgttactacagactttcagtttcagcagtgagcagcaatgagatagtctgtgctctgtgtggggaggaggtatttctgctggaaatctggaatcagcttttgaactcaatctctgcttcccatctcctttatcaccttctgattttcaggcttattttatgtttttttcccccatctgacatcattttttttttctttttgtggttttctgaaacaaggtttctctgtgtagccctggctgtcttggaacttggctttgtagaccaggccttgaacacagagatccatctgcctctgcctcctgagtgctgctgggattaaagatgtgattcccccactgccaggccactttgtgtctgggtgggagacgcacaggggtgtggaagccagagatcagtctcaggaatgcttctgggttttaactttttctcttttttgaaattgcatttatttatttgtgtatgtgaaagtacatgtgtgtcggtgagagaacagttgttctctttttctacttttcaagttctggggattgaactaaggtcattagcattggcaggaagcacttttacccagtgggccatctcacaggacttccactttgttgggtgtcttagttagggttttactgctgtgaacagacagcatgaccaagacaagtcttataaaaaaaacaacatttaattggggctggcttacaggttcagaggttcagtccattatcatcaaggtgggtgcatgacagtatccaggtaggcatggcacaggcagagctgagagttctccgtcttcattcaaaggctgctagtggaagactgacttccagtcaactagggtgagggtattaagaccacacccacagtgacacacgtattccaaccaggttacacctattccaacaagaccacacctccaaatggtgccactccctggtccaagaatatacaaaccatcacattgggttagggtgtctccctgttctggagtggctagacccagtcagtcttcatgttcctacctccctggggctctttctttctttctctctttctctctttctctctttctctctttctctctctctctctctctctctctctctctctctctctctgtctgtctctccctctccctccctctccctctccctctccctctccctctccctctctctctctctctctctctctctttctttctttctttctttctttctttctttctttctttctatttttagccgtaggttctaggcattgaactccgttcctcatgttcataagccaagcactttacatggcagtcctagaacacagagagagctcactgaccagagtttgtcattctgaaggtctagcctggcattctggggttggagtggatgtggcccatttaggtcacgtggttaagtgaacatgattgtgttgactttgccctgctcaggatttgatggtaaacatttaacactagagtcgctgacctgggcatttacaacactccagggtaggcgtgctgagagaatgactgcacagctttgccaagctgcccagttttcctagttgagccctcaggagaagccccatcttgctgcccctgtggctttctttgtcccctggagtccttctccctgtttgtttgaccggggcactgctaaaatcagttcttcagagaatccttaacctccatctccgtcacctcctatcctttctccggagtgtttgtcagtatctgttacgatgtgctttagtttttctgtttattttctccagtgccaaggggaacgcaactccatgaaagcaggagccctccagacatggtctgtgtccattactcagcacctagaacagtgcttagctcctgacacggcgcctgaatgaagcaataaatgaacacaggaatgaataagcagatcagtttgacttgcctttttaatttaaatttgattaattaatttttaaaaaagatttctttcacgtatgtgagcacactgtcgctgtcttcagacacaccagaaaagagcatcggatcccattacagatggttgtgggccaccacgtggtttctgggaattaaactcaggacctctggaaaagcagtcagtgctcttaaccactgagccatctctctagcccctccttggtccttctttaagacagggtctcatttatctttgattggcttctaaattactgtatagctggggatgactttgaacttttgatgcccctgcctctgcttctccagtactaagattacaggtatgcgctgtcatgccgggtgctgggactttgtgcatgccatccacagagctacactcccagcacgcatccttggcttccttggcttccatctccttcctattctatacacgcactcctaggcatatggcggaaaaagcatctttgaagtccatagagaacgttctgatagatgtcctgaccactccttgctcctaggctgtaatgtagctcagagcatccaatgcctaatgaaaaatgtgcaacgaaaaagctggggagaggagtggagaaagtttgcttacacattgctgacctgcggcatggtatgctatggctttgcaccttaggtgtacattgataatgccaccttacagctttgttgagacaattaagtgagctcccacgtctaaagtgctcagcacagtgctggctgtggtgaaatcccccccaccacctctctctctctctctctctctctctctctctctgtgtgtgtgtgtgtgtgtgtgtgtgtgcacgtgtgtctgtttgtctgtcatatgatagtggggaagggctgcacatgtacagtattcatgtggaggtcagaggacaacctcagacgtcagtctgtcctcgggcaccttcacttacagtctcaggcagggtgtcatattggcctggtgcttctttgaataggccaggctaactgctccatggcatctcccatctcccatcactggaatgacaggtacaccattcctagctttttatatgggttctagggatctgaactcgggtccttatgcttagaggtgccttatcaactgaggcttctcccaaagcctcccagagatttcttgatataggtaactggagtggaacggtggttcatactgctagccttgtatgccttccagctggtagattggggtggatactgtctggttttttgttttctttttttctttttcatggaaaaataaaggggggtgtgggatgaatcctgaattttttttctcctattaaacctaacaagtatagatgtattccttacctggggcatttggcccttgccactcaaccccagagcaccccctttccaagctgctggtgagagccctcctctttgccagccccctttttccactgtcccccacccagacactctgtccaagttctctcttcaagtgcccagagtcctagaaagtctgccttttctttggcagtttgtgcgaatgatgtgggctgtggatagtgggctgttcagataaggagtcccacccggtgcccataatggcaggccctggtcaatttgcagtctcgctttgttggtggagcaatgttacgattctgttaagattttcgtcataccagtcaggaaactcatgggagggttgctacaggaccttcactgtgctcagggagagctcagcccttacaatggggcctttgagagcctggcccagagctgggcagtgattcagtctattcaaaacacaatggggcgacacagaatagaaaggaactgcacattgttttcgggtccctctgccacctgtagcattcctgcgtccatcccacattagttgtgttcctctggtgacacacttgttaatttcacggcatacctacctgctggcctggcagcgtcactgcacagacatttaaccagcaccagatccattggtgtgcaagcccacagccggcaggttctcagaagcactcaagaaagggtgattaaactttggcttaactgggcatggtggtgcctgtaattcctgtacctgggaggtagaggcaaaagttgaaggccatccttagctgctgtcaagagaccctgccttaaagacaaaccagacctccccatgaaaccaaaccaaaccaaacctaaccaaaccaaaccaaaccaaaccaaaccaaaccaaacataacaacaagaaacagactttcacttggaggcaagaaaacatcaatcgggtatatttaaaggtattcaaatcactcttaaaaaccaacattttgccataatatgtagagtctggggagatggctcagtcggtgatgtgtttgccttgtaaacaggaggacttgagttcgatccccagcacccacataaaaagctgggtgtgtgggcacgcctttgtattcagcactgaccaagtggacgaaagagctcccttggggctcactggccagccagtctagcctcattagtgagcttcaggcccatgagagaccctgtgtcaaaagcagcaggcactcctgagaatgacacccagcatcgccctctgtccctcatttgagcacacacataaactagattttttttttcagatttattttcttgtatgcataggagtgtttttgcttgcatgcatgtttgtctaccacatgcacacctggtagctacagagatcagaagatagacagcatcagagtccctagaactggacttaagggtagttgtgagccaccatgtgagtgctgagaactgaacctgggtcctctgcaagagcgacaagtgctcttaactgctgagtcatctttccagcccctcctttataccccagcctgagccccacttcccttaccccgctcccagccatctctgactgtctccatcctcctccccatcccttctctcttcctttctctaacccatctgggcttgaactctccagccttctgactcagcctccaaatccaggggttacagatgtaagccaccacacccgctctaagagacggaacagtaggtaggcattttaaaagctgaattaaccatttgttgttataccaagaaacaagctgtggttggctcacaatggagactggaaggaaccatttttccctgttttttttttttttttccctttagaacatgtacagaattttattttatttatccacatgactcactctgggatcaaacatcttttctttgttgtgtgtttagatctcgggttgtttatttcttcgcttccttaatgttttcctcatgtttaatttaaatcactcgccttttatctttctcagcatctccggctatttcgttcttttctaacctttgttctccttctcgctgcatggaatttaaaaacaataagttgagatgtattttcttcctccgtgcaaagtgagtggctacttcaggattgcacacacagctcgctagtctccaccaaacaaaaccctgaaggcttttcccttaggctcccatgcagtctgagggtgtgggacttttgattaataagtaatcctgtgctttggcccaactcccaggaaggaaaagggtcacagaccagggagaaggttgcatatttcctggtattttgggacatttgcacgcatggagacagaatatgcagtaccaatactttcagtacctttctgcaaggcagaaactataccaatgcgtttgtgaatggccgtgtggtctggctggccatttctaagcacagctttctggaacctgtcaaggtaccttctgtatttctctgtcaaacgcaaaaatttctgtttttcactgtcaaactcagagtggagcagtgtcatctgcataaaagcgttgacacgttctttcccacctaacagggagagagcaggtgtcgagctctgctctgtgagatcatgcctggtcaaaaggtttggagagcagtgggcaccttgactttggagacagcacacgtggtctttctttagaggctgcggtggtggctcagtgggtaacacttgccttgcaatcatgagggcttgcagaactcaagttgaaagcttggggttggcaaccacttgtaatcccagctctggagaggcagacactggatctctgccattccttggccgacacccatcgttggcctctgatgtctacatgcatgtacacatgtatttgagcatgtctacataccacctccccaacacacacacaaatttccttcagcaaattccttgctgactactttggcaattggtatcctctgttgtctgttttatctgggtgtgaatttcttttaatatatttaacttctctagtgggattaaggtaccttgcttcccaaaaaaaaaaaaaaaaaaaaaaaaaaaaaaagtcaaaaatctatctatccccttcccactcccatacatacgcataaaatttgggtgagaagcctgaagatcagaacaggagacaagatggagacctgtgttacaggaaggacagctccagagttctggccacagagttcccagtgactgttaattgctagagatctgtcaaggtgtgttagaaatttccctttgtttatagagtggcaagatctgtttcacagccaaggtaattcttcctctatttcaccaatatggcgcctaaatgcaagttctctctctccctctgtccctcctttcctccctccatccctctctttctccttccttcccttcccctcccttttcctctctgcccccacattaatctttaataaataaagatagggtgccagacccctaacttggccctcagtccatagatggggctcaccagaagttgcacaccggaagtgacataggtcactttggtgtgtcacagaatacagtaagaaataagtaacaatcaccagaagtttgcttacgtggagatttctacacagttgtgacggtgtcttggtgtgattcatccatgccctgtgatcccatcagatacggccagctctcgtttcattctcaattttagtgattcccggagaagaaagcgcattatcggaagaatcattgtgaaattccatagccagagggctcaaggtagatggctgctttctaatttctgcatgccatcccctacttttctttttttatccatgttattggcggttttttttttttgcttgtttgttttgctttgtttttaaggcaatgccagacttcccaaccacctccatctcataaacagagcctcgtggaggctgaagtcaccaggaaagtgttcaccaaaaagagactatgtctaggatcaccactgaaaggctgttttgggatacgttctatcttcacattaagaaaccaggaagaacgtagagggaggagctggggtggaggtgatgaagatgtgctgtttacgtgggtgacattttatgatattctttattaaaaaaaaaaacataaggagaggctgtctgtgggggccctgcctataatcccatcacccaggaggcagagacagacctctttgagttcaagagcagtctggtctatgtagaaagttccaaactgtttctattcagggtgactatgagaactcgcctcaacaaatgaactcggaagaaattcagctcctccgatcttcccatgtggatgggtgtcagggttctcacccagtgtgagtgcctgccagggagtcaagattcacaaatagtgggccagcaagatggctcggcaggaaaagacacttattgccctgcttgaggatccaggaaagaacagattctcacagctgtcctctgacctacctccacacacacacacacacacacacacacacacacacacgtgtagcatatgcaaatatgcacacaaatgaatactaatgtttatcattagagaggctaaacatgtttaaacacatagactcagttgtgcataaacatccaaaatagtatcttcttttctctaggatctttgggataattagaaaatcaaaattaattttttaaaagatttatttatttattacttgtaagtacactgtagctgttttcagacaccccagaagagggcatcagatctcatcatggatggttgtgaaccaccatgccattgctggaatttgaactcaggactttccgaagagcagtcagtgctcttatccattgagtcatctctccagccccaatcaatattagaatcttaagagccacccttaccacaagtttgttagagaagacttgagaacggagagccacccagggatggattgagggttagaagacccaaattctggtcctgattcctccagaaatggttctatggacctggtgggtcatttcagtggctctagattccttgtctatgaagagctttggactggatagctaggggagaaggcactttctaagtagagtcaaaattgtagggtattgagtacaaatatgtaaatattttaggagcctcagcgggtggcttagtgggtgaattagttgcccagcaagcatgagagcctctctttgatccttttcccctacataaaaagccaggaatgtgggacacaattgttgatctcagtaacagtgaggcaggacagaaggatccctagggcttgcttgccaggccttctaacctcatcatgaggttctggcttcagtgagagagacgctgcttcaaaaaaaaaagcaaatggcgcctgatggacatcgcaagaggctgccctctggcctttgggagcacctggagggtgcatctgcatctgtgcacacagtgttccgcccccgggctggtgctttaattgggttctgagaacgcaggcctagcatccctgaagccctggggttcaatccccagcatgacgggaagaaaccaggcacagagtctgtaaggtggagagattgtgtaacctgcctggggctgttttttttactgtagatcttgaaacctttggctttcttcagtgtttagttgtaaggctgctctggcctctgcggttagaacactgccttctggaagagggtgtgtcttctctgcctaacagctcataccttcctttccagtttagatttggagacatgtgtagctgcctacgtgtaaaccttggtacctgtgtccatccccctcagaatcacactgcgattagtacagtacctcgctcagaattcaggatcagctcaccgggctggataatccaaatcctagttcttgcaaagacactaccaggacttgcttactgaatgggggtggggtgggtgtgtctgtggctctgccctgcagtggttagcgctctagacactgaattggggcatgtgtacctagcaagagccccttcaaagtccgtcaaggatggaccggcctctccttgttgctctacgggttctgcaaccctctccaagctcgggccacaccacaccgcctcttgcacactggacttgcaacttgggtgtagcttctgtgagataggccttaacaacaggggcatcagaagatagccatctgccttctggtgtacactggggcctttaattccaccaagcacatttttgacatttcttgccccacttcccgccaatacttcttcagaattccttgagccccaagcccatatttgttctattccttaagtctacagtgtgagccatggagtggaaagacatgaaagtcctaaaccctcccatcaggtaatgaggggggagaaaagggcttgcctgtggctcctgataacgctaatctgaactgttgatttcatggctaatctggtggctccttgcatctccgctgtcctgtcagcctttaccactatagtccagaatctctcggatccggtaaacactttcccctaggacctgaagggctctgagaatgaggcctttatggttctgatgccctaaaggaatgtatttactggaacagaggtcaggcgactggaggagccctctgcattcctgtcagaaacagggattgcttgctgctgggtttggtgtggcactcatgagttagtggtgccaggatagccttgtccttcagcacagctcttctcctggacttactataccatagcaagcgtgccgtaacagtgtaccactgctgcaaagcttccttcaccctccagaggctgttgatcactgaaagccttgctccagttagcacatcctgacacagcacacccccaaggggcccgtggtatagcaacagcaacactttaccattcatttttttccttttattacttttttttgagaatttcatacatgagcactatacttacaccacttctccccagctccccttaacccaggtcctcccataaccccacccactccctctcaacttcaaaactttctcttcaattacacacacacacacacacacacacacacacacacacacacacacacacatatacacacacactgatatccacatatacctactaaatatacatttaatgtacatttagtgttgcctgtatgtgtttaggtctggccacttgggactggagattccatcagcagagaactcatctttggaggaaacatattcttcctctctcagcagctttgattgccattagctctctgtctgtggctgatgcctcgggaaatctctcgtagcctctttggcaagtctcatttaagcaagcttgttgttgagactcatgggtgcaacttccccgtcgtatatagagaacactatttaggcaggcatcctgatctgccgccttttactagcagtctgcccccctctaagagccattttgtgagccttgggcatgttgtagatgtaccagtttggcccaggcaccccatggtttgtgttcttatagtgctctgtgttagtttctaaaaaactgtaggtggggagaggagatggctcagttggtaaaatgctcactatgaagacacaggaacctgaattcagacctagcatctatataaagtcagtgcggtgcataccttgtaatcccagcactggggaggtggaggcagaaggatccctgagccttgtttgttggtagtctaaccattctgcaagctgcaggtttactaaacaaccctgtctcaaagaataaggtggcaagtgaccagggaagtcagctgacatcaacctccacacacatgtatctgaccccaccccccagtgtgtgtgtgtttcccccaccgtgtgtgtgtgtgtgtgtgtgtgtgtgtgtgtgtattcaaagcataggcaagaaaaaaaatcccaccacacttctaaaagctcttcgccccaccccattgcgtcttcattgatctatgcccacacaattaattttttagaaaaataaaataatatacagaaataaaatgatatttataaaaagatcggagtaagtagttgcttatcacacctctactcttgttttgcataagtaaagtattttttgcagtcaatatagaaaaggagaaagaggggaggaagacacacacagagagagagagagagagagagagagagagagagagagagagagagagagatcctgagattacaggagttttagatgacccagataacctgctaagtagctgaggatgaccttgaactcccgacccctgccttcacctcccaagtacagggaggtaccagtacactgcagaccgtgcaccatgccccaccacacttggctcaagtggtgcttggggtcaaacccagggctgtgtgcatgctagacagacagacagacggacagacactcaatcaactgagccccagcccagagagacttttggtcaggttgataacacactctaccaacagatagatcctttctctcagaacagcattgcatttaggaactgctggggtccagagatcatctagcaatcattcagttaccgtttggtttgtttctgtttttagtcagtggcgtgaacaggagccgcgggagctggtcttcccagtcagcttgcctgcctgaggactttggtctcgtcagtcaattagagaaacttcctacatagctgtgctggcctcaaagatgacccatttctaaccaaggattaggacgtaggatgaagtggactttgctttgtgactcttgttagtgacagccttgtcaaggaggtgcctcacccaagtcacatttgaatatgcgtagagtttattcttggcgaagaataaacttgtggatctggccgtgcccaaaatgtatgcaagtgtgtgtgtgttcaagcctgctgattggtccagccatgctccacccacctgactcatgtgagacctttgtacttgaacgcaggaacggtggggtactttcttaaaggcttaatgtgcctcagctaaggagacagagcctgccactggtccatcactagtttgatttaagatagaggtgggggttgaacacatgtttaccatgtgagtggaatacagccacccggttcatattgatctgtagctggaaatgtcctttccccaactgaagtctgaccccttactattacccttaggtggagcatagagttaagaaggatggccacgttgggtgtagtggtacatacctatcaagaagattaggagttcaagggcaggcagccttggcagtctagcagatttgaggccagccttggctacgtgcttcaaaaagccagagagaaggaatatctgtaagggggtgcttcttctgtgttgacttcctgaggttggagacaggtaggtcaactttggaaacctctcagtgaaacctctgggctcagagtccccctccatccttccagtagctgccaccgcatggtaattatgtagctaagatgtcccgagatgagccgaagagacgggtctcacaatgtggcccaggttggcctcaaacttgcagtgatcttcctgccccagcctcctgagtactgggatgactggtgtgaaacaacgcatacagtttcactggtcatcactcaacttgtactgattgacacatatgtgtcaaacactgacctgcatcctggctgcaggggacaccttaggggacagatgtcctctggagactgaaacttggtcttgtgatgggaggctgtgttgaacgaggctgttctgtgagttctgagttttgaggctttgcaccaatactttattgtacatgcccctccctgagaagaaatatttcacggcgtttttatactaatgaaagaacacagtttacagccagtgaggcagtggctgaaagatcatggttgtggtgccactcactttgttaggagaggcagaacccagtgttttagtatgaacccctggctgcagaaggcctgggtttaaagcactgtgtgtgtgtgtgtgtgtgtgtgtgtgtgtgtgtgtgtgtgtgtgtgtgttgctgagcaacttaacctttctacatgccagttccctgcctgatgagatcattagaattaaacaagttatatattagatattaaaatagaatgacatttagctatcctataataataattattatattctatatcattcattcaacaagtatgtgtgaagcacccacaaatgcattggtcattgttctagggcttggatagatgatgaatggagtatacttctggtagccaggcaccatgctgctgtctcatggggtggggtggggttcccagagaggggcaacctgggctgatggggcaggagtttacaggcagtaggcgtaggaggtagagtaagaaggagcttgccagagaatattacatccaaacagggaacggtgtgactcagtgattccaagactcacaggctctctctctctctctctctctctctctctctctctctctctctctctcacacacacacacacacacacacacatacatagagagagagagagagagagagagagagggagggagggagggagagagacagacagagagacagagagaaagggagagagagagagagacagacagacagacagacagagagacagagagacagagagagagattatccatgcatgaagcccagaactaggagaaagcaattagaagaggacagaagcaagctgagaaaaccttgctgggatttgctcccgaggtacaaggcggctgctgtgtgaagcacagctttcagggtctaggctagctttgaaaggatagactgtcccctgatttcctgacccactcctaagggaatccccagccacaacctctcagcttggagcttacaccctgagtgagggtcttcaggaagccctggcttcctgagctacattatgggaacttgaggtcctcggcacccaggatatgtggggttgtttaagcctgttctagataaggggcaaggagggcaaacgagacttttgatgaggaacagaggggcaggagctagcctcctttttatagaggttgagagagaaatgggtcagagccaggctggcaattcctgaaggaaagtgcagagaatcgagagatgaacagaactcccacttaaaactaaggggggtgttgcttcccatttgagactccacagaaaggaaaagacttctgggacattgcgtataagctaccagcactccccacaactgtcagaaacaggtgggattgacccaatagaggactacagcaagtctgtgtgtggacactgcagcaggcaagatggatgtgcacaatatgtgtgtgtgtgtgtgtgtgtgtgtgtgtgtgtgtgtgtgtgtgtgtaggtcagtcagaagacaacttcaggtgtcttcctcctcatgtgagacagtgtctctgttgtcattcttcttcattcttagcataacatcagcctagctggcccaccaacttttggaaattctcctgtctcagattcctttttctccataggaattctgggattgctgacatatgtgtgctactgtgctcaacttttacatgggttctgggaagccaaatgcaggtcctcatataccttggcagatgctctcctcaatgttcatgtatatttttaaacctttgtatggacagttatttcttatttttaaaaattttaaaagctatttctccataatgtggcattaaaggaactaccaaaataacgctttttaaaaaaatgtatatgaatacaccagagcttcagacatactagaagagggcatcagatctcagcatagatggttgtgagccaccatatgattgctaggaattaaacacaggacctctggaagagcagccagtgctcttaaccactgagccatctcttcagcccccaaaaataatgcttttaaaaataagtttatttttattttatgtgtatatgtgttttggctgcatgtatgtaagtgtgttgcataagggtttggtgccattggagacagaagagggcaccagattccctggagctacagttgtagattgttaggagcagctatgtgggtgctgggaaccaaactcaggtcctctgcaagagcagcaagtgtgcctagcggttgagcctctctccagccccatgtgtgtggaaaagtgaggggtgagagggtgggtgtgggttccaaaacggatttttctgtgcagccctggctttcttggaatttgctttatagaccaggcttgccttgaactcacagagatccacctgcctctgcttcccaagtggggagattaaaggctcaccccaccattcctggcttgcagatatgtatcttaaagtaaattcatcaaaataagattgccagatcaaataggatatgagggttttttttttttttgactagtttcaggaattctgatacctatttttagattgctccctaaaatatcgtttgggagtctgtaagtgtattttcagtctcccatctctcccgacactgggcctgttgtgtttccagatacatttaacagcatcccttttcttggcctctgaagggcattgccggtgaaggactcctcccctggatgaagtgggtaagccagcatttgcagatccatgaggccagggccgccccagggtgtgtgggacaccgcagaggataatgccgcctctgtttgccttctgactctcttttgctctcctggtccccaccctggtaaacacgcgcacacgtacacatgcacacacacacacacacacacacaggggtggggggcacagctgttgaagctcctgccctgtagcctttcccttctcctgaggagggacccaatgtctgcatacatctaccctcctaaacaaggctttcagataggtctggacagaccctattttccagaaccttcatatgaattaacatcttttcctcacactgaatgatcattagaaaccaacgtgggtccaagtttctacttgaggcccatctgacaggagaatcccccatagctgctgatattttcggggctaccagttattacagttctcagtgttacatccaaccccctccctctccctcactctgtatccttttttgtttaaagacttacagttttagggagacagagacaaaaggagatactccagaagggagcagaggagaaagggctcttagagcataggaagggtgaggccacggggaaggtttgcctctgcatcccacctaggtttgccaggctgttgccatccagccaggagtaggcggaaagcaaaaaggggaagtgtgaccatatggccgggggatttccctggaactgtggcacatcctcacacttccgaaccagtggttggtgtcctagggcaactgtcagcctgctggctctctttagagggccataaatgtgtgtgtgtgtgtgtgtgtgtgtgtgtgtgtgtgtgtgtgtgatgacaagcaccccctgattccagcggcctttgccattcatctgaatcgcctcctatacaataccttacatatctttaaaccctactggatggttggctgagagccctgaggtccagccttcactcggcaggttactgcttctgcgacttccctgctcagccctggctttgcctgctggcttctgatcacctcctccagtctggctggggcagcctccttcaatccagggttctgatcctccaggtctctctctgtttgctctacctttatcttatctgcttttttaagtttttaaattaaatttttcattcttataaattaatttttgaggttagcatacaaaggagcaggtcccttgctgggttcttcagacatcggtgttattgtattctaatcattcttgggacatttcctctcctgggaacgtgttttctgtctcatctatgtgcccaattgttgtctttttctggtggattgggaaggaaaggaaaaggaagctgagaagacgcctcacaattttacaagataattcacattgctggggatggctgtgaagaagttcatatatgcagccatcgttgcctggattgtagggaaaatagaaatggaaataattacatgtgtgcacgcgcacacatacacacgcacacaatcatgtgtacatacacagattcatggccaattagatatagaaaagttgttcaattaaaagcaattcactgtttcagtctctgatgctgagaagtagtcattagtgaagatagtgtgtcttcttcagaaaagatttttaaattgtattttatgtgcaccaatcttttgtctgcatgtatgtatatctacaaaatgggtgcctatgcctgtggagaccagaggagggcgccagatctcctggaactgcagttccagacttgtgagccgccctgcaggtgctgagaatcctcaagaaccgcaagtgctcctaactgctgaccgctctctcagccctggtgactgtgtctttttaatgaggaattccacccagatacaatctggtgtcctgttgccatttgagtcttggcagtcaggagtaaagccctgtgcgttactgggaaggcagtgggaaggagccacgtttgggcgagcctgaaagggaactgcttcacttgttctctttgcggcttcctccctggaggcggtgtggcgtgtgagccccctctcttgtgaggctgttgggtgtgatgaagggactggtcactgcaagtgaagcagaagccagtccaggacggtgtgatagtgcgacaggtcaaaagctgaaaattctcataaatcgaaatgcttgaccacagcttggctcgggcacacagcgttgctctgctgggccgtgggggaaggagaggtgaggcggagcatttacccttctgagggcaagtgtgcttggagctgtggctagttgccttttactagcaagtctaggagaagatcagagttggaagaatagttttgtcctgaatatgcatcactttagtaccactgcaaagtaaaacacaacgaaacaaaatcatacgacaaacactctaagctgggtttgattgcagcaaccactcagtcgtactccgggtttatgttccagagagaagtctgggaagtgcgtaaggaggacagagttacaggggcttgtagctccgttggtggcgtgcttgcctggcatgcagggagctctgggttctatccccagcactgcagcagccaggtatggtggctcaggcctacaatcccaggaggtagagacaggagggtcagaagttcaaggtcacccttagctacctagtgattttgaggccaggtgacaattgttaatattaatatctgcgacaaagacagacacacagtagcctcagcagggagcattgtttttgacctcaggcggagaaatcagactctgagacagcaggcaggactgtgaggtagaaaggagccagtggaccccatgactgcccgcatgacttggggattattcacatcctcatgcattctatggcaccagtctcccctgtcccttgtcccttgtagacattaaatagccacttatcatggatttctcttttcctcatttgtgtttatattttttcaaaaggaaaataaatatcattttttggccgtgtgtgtgtgtgtgtgtgtgtgtgtgtgtgtgtgtgtgtgtgttggaagtaagccccgggcttacgatgggagccctgtgagtcaagctgtgggcagtcaagctgtgggcagtgcctttcctctctgtctctctatgcttgccacagaggaagggggagtggtgacgtctgaggtaattttgcagaattgatgttgtgtgtggttctgggaaagccaaatatatcctatggacactttccctccactagacagcatgggtggtaaatctagaacctttctcaacagcttgaagccctggcgtgtggtgtgcttttctcagtggtggctttcctcttggctgagttttgaggattgctttttccctttgaacctcttgggcttcacttttagcaaggcatctgtgtcctcctcagacagcacaaagcaacttcatatattttccctgtgaggaagttaatgtggcttcgctcttgtttctttctgtctcatgctaatttcactgtctgagcagctggccctctggatacccttgtccataactttcctctgctttgttgaaactccttcaagtcaagagctgacacagtgggggctgtgcccgtgcttggtccgtcacacgtggtgcctccgtgaagacacttgaagtattgacagcaaatggcaatactctagaatcttgtctgctgtcaggattacacatgtatttaactttctttccttttctttttctgtttgcgggggttttgccctgatgagcatacatgaaaacaaatgcctttcttctaatttctctggaaaattcaaatatttgagatctacttcaaaggccatcactttagcatgtcatagggtaaagtgcgccatgcccttcatacattttgtatgtttattttgttatatgtatgttatatgtatatgtattttgttttatatatatatatatatatatataatttatttattatttgagacagttgtgctatacaccccagacatttctggaccttacagacctcctccctcagcctcttgggtgctgtggtgacaggaatggaccacaacgctcaacttcatatgtgtctgtgtgttaactgtcagtgatatgagaatcactatccatcgctgctgggtgtccttcaatggataggagccccccaaatgcagccactttaggtatttcctcctatcaaccccaagacatgctgaatgcatgggcatcccgctatagaaatgccacctgagaggaagccctgcagcccagagccttcagaggcctctcctactgcagagctaaatagctgcagtgcagaccagggccaaggcctctttggttcaaggaatgagcggaggatgagaggagtcccaccagacacagcgtgttctgcgaccctgcaccagctctcctgtaagcttcctggctggtgtagtggtgacagacatctagtttggcacatcctgaaaaaaaatgtggatggccagtctgagtggccaccaagaagtttctgaaggaaaagtaactcagatgacctaaaaagggagcagtgtgacctaactataggcaacacacatactcattgcttctgggttcaagtctacgctttgcaatgtcaagtttctgtttaattttttatttcactgtcaaattaaagaaacagatttcagatagttttaagagtcagtcctccatgttgggcactgtagatggtcctctgtgttgggcaatgtagatggtcctctgtgttgggcaatgtagatggtcctctgtgttgagcactgtagatggtcctctgtgttggacactgtatccccaatctcttcagtgttttgtgagtcagtgctgcttcatgtaattctcatggccactctttgaagtgaatctcaattctcttatcttacaaatgagaaaagagacatagggatgtggctcagttgatagacagactgcttgtgtagtatgcataagagatgatccctgtcacacgcccaaaccaggtctgttggtgcatgcctataatctcaacaactttaaggttagacaagaagatcacaagccaaagtcatccttggctccaaactgagttcacactatcttgggctgcataagaccctgtctgaagttaaggaatcaacaagaaaatattgtttcagcagtacactggaccatggtgacacttccccactcatctgtaggtagcaaggttgaaacgcaaaatctttgctgtgctttaatgcattttattttggaaaatatgtatattagactatatacatatatatgtacatgtgtgtgttagaaaactccaggagaatatgagctatcgtaacccatttttgtgttcttgtccccagggcagcaaaggcgcctaccgataccattggcagagccacaatgtcaagcacagtggtgtggacgacatggttctactgtccaagatcacagagagctccattgtagagaacctgaagaagagatacatggacgactatatttttgtatcctttatcctgtcctttgcacacctctgggataagactgttccacggtaccatggttcttcgctttcacaatgagggctgggcttccaagggcaagactcagatgttttcctggcttttcacggagtcaaagtgcagttccaccacagtgttcctttgagttataagattctacattctaaggggctaagacctctgtctatcctggacagagtcctctgctccgtgggtgttgtcctgatgacatgctagaaacttcgaaggtttgaaaagatcacctcacgagcagaaaagctacctccccaactcctctgaacctttatatttactgaaggaaacatgagaaggcatgattggctattgaaaatgcctggtgtgtttccctgttaatctgccagatggtgttttataatagggctttaaaaacccagaaagcaaacctcacggaaatgtgtgttgacttcatgatgaaaaagaactgtggtaggcgggggtgttcagccagcagtcaggacttttctttgggacatcagtacattagtaaaattgtcacttaaattagtcacagcacagccatgaaaggtttgtgttatctgtacatcagcaccatagtacttaatgctgatgctacggtgacccccaaaggcccagtgtctgggaggcgtgggtgccttatgatataacatgcatttggatttcacccagaatgcctggggaagttttctcactaggggcttcttttttattattattattatttacaatgcttacttgactattagaagagccaaatcctaggcagccatacttttgcaggctgccctggctgcccacccatcacttgtgtgtttaagtttaactcacagattgcagtgtttgttatctcaaggcatttaaaccattacaatcagtaccgtgctgttagttttgttttgtttttgtttttaatttatcacaaaaggaattttctccaagtatttgtgcagttaaatccctaaagccctatttgtaaggctacatctatatttctaggtttgttgaccattatagtagcattatttaaatttgtaatggacaagaaggagttgttcacatatttttaaaggtttcagtttgggttttgaggatctcattatttatccctggatggcctggaactcgctgtgtagaccaggctggacctgcttctgcctcccgagtgcttggattaaaagcttacaccatcatgcccaagcaagttgttttatttttattttctaattatgtaatggtgtgcctgtgtacatgagtgcccattagtgggcacacaggagcctaagagggtcagaactttggtcctctgcaagagcaatacaagctcttaaccactgagccatctctctagatcctagaaatatttgggggatatgatgggatgttttgatgtatgtggacattatcgaataattaaataagggtatttaacatgactgttacctcccatacttggatatgtggtataaccagttaagaatctctgatcaattttgacatgcatactttttctgtatagtctagccagagaatcatctacagtagtcttttttttttcctttttggttctttgagtgagttagtttataaagcatgtaacaagcaaaagtagaaaattgaatagcacgtggcagatagagaaaggcagcagatgcatcattagcaaagcatcgttagatcagacaactggagcggcctgggtgagggagcaatgacaacatcaccaaactgagagttagcagcaactagcagcctgggggagaccacacggaggcagactactggagttcccaactgagagagacaccgtggagcagatcgtcccctagggtgggatttccaagttaagaacaacagtaaatagtaacagaacgataatatcaaactggggagcttacagacctccaacaaaccaactggggaagttacagtgtcagcctggagtttctttttttttaaagatttatttatttattatatgtaagtacactgtagctgtcttcagacacttcagaagagggcgtcagatctcgttacggatggttgcgagccaccatgtggttgctgggatttgaactccagaccttcagaagagcagtcgggtgctcttacccactgaaccatctcaccagccccagcctggagtttctgattgaatttgcgctccgtgaatgagcttcttgtgactgagtttccagccttttgtttctgttgtcgacatttttacactttaggataaacaaaaataaggttagaaatagtttattttctagcaattctcaaggatacaatcttttaatgcccttagctgcttgctgatctctgtctgccaagcccctgacagagccaggggtccgcctgacccagaacgggcagttttagacatccttgggtctgaggggggagtgaggaccttcttagctcaaatatcacatggcaattcggcaatataatgcacactctattacatttatttgtttgtttgttcgtttgtttgttttgagacaatgtttctctgtgtagccctgcctgacctgaaactcgctctgtagaccaggctggcctctgcctcctgagtgctggcataagaggcatgcaccaccactgcctggcacaatattacattattgttaagttagagtgaacaccatcctcttgactagcagtggcctgcggtttagagacagatcctgtccaccatcatttttaagctgacgtttccctgggacccttgcaccacctatctgctctgctccccttttggtaactgtatgggagccattgtgtgtactttccgtttctcctctagtcacaggaactgaaatctgtttgtttcatctcgatctggcaccatccacaaatgttatgtgtgtgaccccatggtacatgaagactcgtagattgtgggttgagactgcctggcttctaccagctgaggtacatcccagctctagaaactgttttaaatgtaagattataagtttgagaaaggtggattttccctcttgcctgtttgctgtgtgtattgtatgtgcacatatgtgtgctagttagtacatacccccatacatgtgcaaatggaggccagtcgaagacattgggtgctttcctctgttgctctccatcttggttcttcaggcagtgtctctctctctctctctctctctctctctctctctctctctctctctctctctctctctctctctgtcacattgaacctgaagctcactgatttggctaggctggtcagtcagggagctcgtgacatgcacccgtctctccctccccagtgctggggttataggcatgtgcagccatgcctggctttaatgtgtacactggggacttgaactcaggtcatcttgttttcacaacaagcaatagtaaccactgagccatttccctacccagtaaaaatgtgggtttgctgaataagagaaggcaaagataatgatggctgtagttgcctaaggttagtccagtctcaacccagacagcttgctcctcattggactgtttacttagaagactccaggagcttcctgcagacaggggaaaaaaattgcaagagccttttaaggcagtatatgaccatttaacatgactgatacaatgcaacttcacagagggaaggacactaacagcaacaaaatcctgctgccaggaggagttcccatggtcctctcagcatatagctttattccccgagcttatactcgcacatatgcgctttcttgctgggtaacaatagtgtatcagcctcctcatgcagtttttgcctccccccgccccgcacagttcttggcaagagatgcaccgtattaaatgttccctgaaaatccgttgactctcaagcctttttaaattcagacagcaaaatttttgtaatgactcaccgggccagggggtgagggcagtgaatgcctttgagtcaataactgactaatggtgtgttcctccaaggaagcgagctgcttgaccactaatgactttctgatttagacatctctacccactcgacagaaaggagctttctttcggcaggtgggagggagtcactttcggctcagaggaggcctggcaatgctgatgggtgtttatgacgtgctgccatgtctgcctcccgctttctctctgcatagtgatcacagtctccattactgcttaagagataacccatagcatagcattcctataataaaagacgacttctttctttgtttcttctttgttaagaatatatatataatcacctcctgcccataataccagcactgctttgtattataagtcagcatgaagggcaatcagtgactaatgcatgcaggccaagcgcagttgctttgttctccattaggaaacaaaacccacttagaacatgctgacattgtccaaccaataaagcctgcatttttgagctatttatccccaaagaaggaaggatgagtttgccatccattcatggagacggctgccaccctgcttacaatgactttctaaagtgtgtgagggaggaaagttctggaatttagaaagaaaggagctgcagcagcactctgttgtctgtctgtccatccgtccagtctagctgcttggctgagaggaattcccgtgtgaagcttttcacactcatctgctccaactgtctctagacttcttttcctcaaaggccactctcagatgtgtttggcatttttaatccttcagttaggagctcaggctgtcctgccagagcagcagttgccagaggcagtgtgtccttagtcgttcagagagatgcttggctctaggcagacaggtcacatggagtggacagcacgctgggtgagactttagtcttgtgactggagccaagagcttgagttctggctcagaccgtccccaaatatatggctttggacagtggccccacctccttcactttcccgtaatatatgcagtaaggttggcttattgctgcatgctgtcatcgcattcaatagtacaatacatgctcttagctttgcctgacattcaacacaacatggactggccatgtgtctcagttgggagactagcccagctatgctgccctagcatgcatgaaaccctgggttcgatccctaccaccacaaaagccaagtactgcatccccaagagatggagtcagaaagatcagcccttcaacagcatcctcagctacactggaacttttaggtcagccagggatacaggaaaacctgtcgcagaaaatactcaacagtgggccggagagatggctcggtagttagaaatgtttgttgctcttcaagaggaccagagtttccagcacctacattaggggactcactcacaactgcttttgactccagctctggggaatctaatgccctcttctggccttcacagacaccctactacatgcacacaagcacacatacacataagtaaaagcaaatctttaaaaataagaaataagtacattttttaagtacattccctttacattccaaaaaagatgattttacactacatgtaccaaaaggaaattgtctaaatccaaagccccttatacccgatgaactgaacttgatttgttaaattcattattattgttagaggaggaacacaaaggcccagcagtcagaggacagctttcaggagttgactctctcctgccacctttacgtgggttacccggatgaaaccccggtcattaggcgtggacccactgagtcatctccaacagccctgaattgagcctcatgaaaaattcactgtgttgttcttttgatttcccatgtcatttgtgctgcaggttagtgagcattcacagaagcctgagcaaacatctgggaaccagtcagttacagatctgcctggttcttctcgttgtctaggaaatgagatgcccctcccccgccctccttttatttggtatcatagcttcatctctacctgcagtttgaaaattattcttaagccacaccttcactgtggaagattatgagtgtggggataatggccctgccagtgtccccaggagcactcctgaattatgtatcagctgtgggaggcagtgccaagggacttcccaggatctctgtccccacctggccctgagccctctgggtattagctgaggtctcccaagacccggccagatagaaaaggtgaaattgtttagatacacagtcaagtaactgactttgtttccttggaataacttacttcctgttggttctcatgccggtaaatttgtggatacttagtgtacaatcaggacacattgaccattttaaaccaaaccttgtttttcattggtcctatcaaataatgatgttctcggggaccctgctgggcaattgggggagaaatgagagtccccttcatccttacctgggtcactgctctaggcctaggacagtctaaaaaaggatgtttatagaacacactaaaatgacactcgctctgttttctgcccatactcacctgggctctatttcttaggcagttgagagctctgggggaggagggagggtgcctttgaccctatcctcagggcagccctttgtcactcctgtgacagtgaccagtttgtccagtatttcctgtgaagggaagaggcaccgtcctctgtggagggatcatgtatgtcttccctagtttatttttcctcagaggagacattttgcagccttcacattggttttatcctaggacttgttatagccgttgaacaagagaatccagaagaaaggcaaacctctcctttcagtttggttattagattcctaccaaatccttaaaaatacaaaagaccccactgagatagattctattttatttatttatgtttttaatttgtatgtatgggcgttttctgcatgtgtgaacccacatgtatgcttgatgcctgaggaggggcttggatcccaggaattggagttacagacagttgtgagctgcagtgtgggtgttgggaatcgaacccaggtcctctggaagagcagcccatgctcttaatggcaaggccatctccccagcctctaagatggattttagagtagacaaagcctcctggttctaagtcagaagaggctacagagcctccccatccctctgcgtgaatcgtgcactgctaatttaaggttggaagataagcaaaacagggagacccagttatatgtccatcttggccaccttttagcacaagtgtgtctgaaacattactctaggaatacctataatgtaaatgttttcattgcttcctcagtgtctaaatttaatgaggttgtctgtattcttatttgcttctctgacaagtcaactagcaatagcaatggcagtacttgctaactacagaaagaccacactcactgcattctcacccagccgataagtctctagctcagtctgaccctcagctccctatgtagctgaggatagccttgaacttctgattctgtctctgcctcctgagtcctaaaatcccaggcacgttccctgtacctggtttatgttggtactggggacagaacccaggatttaatgttgctagggaagtgctcctccagctaaactatactcctcatctcttgtttctttttgatcaagagtacggactctggagccagcctgcctggatggggacgttgatctgccacgtcctgacctgtgtctttgagcagattttaagttttattttcttagagagagcttgcctaactagaatcatgggattgctgtgtgtgtaccacataatgtgtctgtgttcattcagttctgtcaccaattatgaagtgctggtgacagtgtcatagacatctttcatctcttaaacaattaagcaattaaaaaaaataaaacctcatcacctccttttctctactattgtcatctttattttccaacgtggaaggattttttggtgtgtaacaaatgaagtcaaaaggcagtccagtcattctgctctctctctctctctctctctctctctctctgtgtgtgtgtgtgtgtgtgtgtgtgtgtgtgaaaattacatgacatagccacacccatttatactgtctatattttcctaatttcacatctcatcgaaggtcaaaattgtcacctgcattacgatttcagagatgtcagtgtgagatgacacacgtgagttgagggactaacagctgggtgctgattgccaatcattcagtgtttcacttatttccatagcaaggttggtaattaaggaggtcttggtttatctccatgcattaaccacagcttagaggtatgatgttctgtataatctgcaaacagatttacaatagctaggctttcagttttgaaggaagttattaaatatgaagcaagtaagagtaaaatggtggtgggggatgggtagacacacagataaataggcagatgcaaaatagatgatagatgatagatagatagatagatagatgatagaaagatagatagatagatagatagatagatagatagatagatagatagacagacagacagacagacagacaaacagacagatagacatcatcatcaagtactcagaacaccagcagaaatcagctggggaagtctcattaaagcaatcagccggagttcttgttagagagacttccaggcagggcagagtgtctcctgggtgaagcatccaagtaagaacaaatcgcagcagacagagaggcatcatcaaatcggggtgcacagcatctatcaaaaatgtaacaggaaggtgaggtagccagctggagttcccaatcgagcttcctcctcgtggctaaagtatctggggtctcttccccatgaaagacacttttatatcaatagtgacctctatggaaagcaatttatctgcttgctagcctcaatggcgtggtgatgttactcctgggctctctggctgttcttctctcccttaccacactttatatcaccaacccactctcggacacggggccttagaggacacttgacataaacatgcttatgtcagaagtcgagtggaggacccagagaagcgtctgggctaaacaacacatgacaacctataggagttggggatccaagccatctgagccaactccctgttatatttcccagtaatagaaatggctccctgggaggaactctcacggttttatatatttttctacttaaatctatttacttgtgagtaagcttagtcttaatgatctctttgtaaaaatgaagatatttctaattcaatgattagttgatcaactttgagtggggtgtagttgtgcacacctgtagatcccagtagttgagaagatacagcaggaaaatcacatgaatccaaaagatggaggagatcagcttaaaagacagcaagagacagtgcctcaaaaacaagaaaaacaacagaaatccagtggcaggggtgggggagtggagcttttatttatttttttaatggttttctttcctccgtgggaacaatgtttttattttgttttctttgttcagtgatggattctcaacatctaaacatgcgtgttgtaaacaatcaacaacaacaaatagttgattgttgaacaaaaaaggcattgggcaatataatagcattcccctcacttggatgcattaagatatctaaagctgggttggcgagatagtccactgggcatgagtgcttgctatgcaagaatgtgaatgggtaaaaataaaagagataagactttgagaattagaactcttggtaaaacattggttcttctcctttcccctaagcttcaaggtccctatgtatgtattggtttttcaagacagggtttctctgtttagcctagaactgtcctagaactcactctgtagaccaggctggcctcaaactcagaggtcctgcttctgcctgcagagtgcagggattaaaggcgtgcgcctccaccgcccagtcttcctcttgtttgttaaatggagacaaaaacattcatcttcttccccagcggtacaaattccagtgcatctcatttcagaagggtgcaaactgcccaggttgtgctgtgcaaggttctattctctgtcttttagatccttgccctctacagtgctagactaaaaggaatgtgccttagcttataatgactccttttgcagcagcttgataatgagcctcattgctgtccccggggaggaggaagacctgagctgattgaataactgcttcttctttgtggtgtttacaaagtgtgtgagctcgcttcccttctggcagttcactgcatgctggggaacatctgtttattgactttgaaaaacctgtttctatcaagatgaatggaccttaaccaggttgaaattcagacatatatagggtctgtattaatctctgtcaacccattcaagcaaatgccatattttggagaaaaagaaatcgaaatgtaccaaggagcggtaagttatgtagtcattaagttgatgcggtgtttagggattttatcatttataaatagtttttttcttgaagttagcaatacattggtgttttcttatgaattatttattgtggaaggtcaagtgagtgacattggtttgttttttttttttttttgacaatggatgctgatgatcttaagcatgcagctcaaagtacagactatctaatgtgtgggttaattgccgcatagaattaattaagtgggctgttgaacgcagagtttggggtggtcttctggcttccacgtgtgcttcagagtagtaaataataaacagaaccacactgggagctatgaatgtgtcgaagcataagggcctgaggtcatgtcccagaaccctggtcagatgcagcatagcggtacacacttgtaatctcagcactgagaaggtgcagactggagggtccctggggctggctggccagtctagcctagtgatgagctaaaggccatcgagagaccccactccaaaggagttaaactcattcctgagggtaacacccaaagttgtcctctgtcttccacatgaaagcaggcataaacacacatatttgtattcacacacgtgtgtgcaagcatgtacacacacagacttaaaaatatcataggtaaaaataaataagatgctgggagctttgagaattagaaccctccatataccttggccatggcttgaaactgaatctctcattccttcatttactaatataactgatctctgttcaaacccactctattgccattttatcagtggattaaaagtaaaaccatcaatccttcctaaggtgtcttattcctgttcatcacactccggggccctagacctctgcatcttcttccctccctctctccctctctcacagcagcagcacaagggcctttattaatcccagcccctgaaagccaaacaaaagcccacacagatccatcagttgaagtggaaggcaacttacccacagcaagtgcatgccccattgtcgccagatgaatgctgctggtagccggagcccaaggaggctgccacgagagagatctttgataattctgcttttatccgaatccagcacaaggacacactgtcagcagagttccgggccctgtcctggtacccaagtccacgatcctggggcagctggcatggagctggcctgatactcagtaacagtaaggctccaccaagaagagctgagacacatggaacatacacacacacacacacacatacacacacacacacacacacacacacacacacacacacacacacgtttctagatctctgaagagccactgtctgccaaccccctttatgttatttatcttttcaagagttctttgttcagaaatgccatttttttaattgttattttcagctggacagtggtgtcacatgcttttaatcccagtacttgggaggcagaggcatgtggatctctgtgtgttcaaggccaacctggtttacagtgtcaaattccaggacagctagagctacatagtgaaaccccatccccccccccaaaaaaaaatctttattttcattactcatggtaacactgttgtacagttggtttttactgagtactacatactgtatgtgcttgcaacaatacagtccatatgaattctgtgtcacattatcttccctattttacagaggaggaaactgctgtccagggagcagtacctgaatctcctgagctaggagttaagctcgggtcttaatgactttgggttcttgattgagaagactcagaggagatggctactcgataattcctagacatgtagctcacaggcatggtgaaagggtagtgggaaacctggctgaacgtacaggactcctgagttgggtctgtagctctgttgcctgttacgtacaaagttctggatcctccctaaccctgaacataccaggcctgggattcatgagaccctgtctggggcatggaaagcataagtgaccctcaaagaccaagggtatagctctcattaagcagttttggagctttagtagggaaaggcttgtgtcctagttagggttactattgctatgataaacaccatgaccaaaagcaagatgggaagaaaaggcttatttggcttacacttccacattgcagtccgtcattgaaggaagtcaggacaggaactcaagcaggcttggaacctggaggcaggagctgatgcagaggccatagaggggtactgcttactggcttgctctccatggcttgctgagtgtggtttcttatagaacctaggaactgccagtccagggatgaccccacctaccatgagttgagccatacatcattaataaataaaatgatctacaggcttgcctatggctcagtctcatgaaggcggtttctcagttggagttccctcctttcagatgactcgagcccgtgtcaagctgacatagaactagctagcacagtgtgtctcctcatttctctccactactcagcattctctccactccacctccttctgatctccaccttcctttcttccttacaatgttctgcttacccgtttccaaaaaggcgttaaacatggccctacgccaggaatccctgtagaagcaacccatctaagatcatgcgctgaggtcccagcaggcctgcccatcaccacgaaggcaggcttaacatacaccctgtcagttcctcccactctcgataggtagttccctatgggtggggggatcagccacagtgggggatgctgggtctaggactcctgagaactttgcttatacccagtgtctcactctctctgctgaattccatttcaccattgatgtctggtctttagagtttggcagtaagtagcaatttctcagccagcccccttcagtccatccctacataggacatccctatgtaagcaagttttttcttatgtctttgtatggctttatcttttaaaattactgtcctgtccatcttctcactcaccctgtgggaccttcagagacagggcagtgtgtcaccccgtacttagtctgacagcatcaaatctagcaagccttattccccacccacccccaccccctcaccacacgcagtgtttttatttgtttgctttgctttatttatttgtgtaaaccatggtgtacatgtggatgtcagagaacaacttgcaggagccagttccctcctccttccgtgtgggtcccaaggatcaaactctagtgaaccagctaactgtcaattggcaagtgcctttattcaatgagccacttcagccctgactggagatcaagtctcatgtgtagcccaagctcaccttaagctcactgtaccatggataatgactgtgaacccctgaatattaatttttgagttggtcaaagcgggtgcctaacaactaagtaaatagggtggagtcagatgacagaatgagtctcttagagatgggccatgatttgataaatggactttttttaaatttatgtatgagcgtctgcctgaatgtatgtctgggcactactcttgtgcatgcagtgccggaagaggccagaggagggcatcatactctggaagtggagttacaccactcatgattatgggtgctgggaactgaacctgagtcctctggaagagaagccagtgttcttaaccactgagctgtctctccagtccctaattttaaatctgtaaatggttaaagactctttcctgcacatccagtagacgcttattgtagtttgtcagctccagccctcccgttttagaaaagaaacaaactagccaaaccagtttatctcccgagaggaaccacgtctcttgctgtcttcttgtagaaaacttgaaagttttcctcctggtccgtacatatacccctcaatccccaatgagatcggaggttggcaacttgccttttcaagaagaataatcctgtgggcatttagagttctgatcaaagtgagacccagggtcttgacaggcccttttctgacaagtatcagaatgccgtcagttgccaaatgtctctagaatttgaaagcagaatgtccttgcggagacatgcctgtgtggaagggtggtgcacctgggtcatgtctgaaggctgaatcacaggcatgcctatggaaaagttcttccaaaccccaccttcgattccccagggcttatcaggccataaccagggacatttctatgaatcattaagtcatgaaacctttgcctgtaaatgctctagtcgctcgcgctgtgtgccatgctgtctttggtcattccaatgacaaagaaacttactgtggttttggtttctgtttttgcttttctaggcacagtatgagaacccgcctcatatctatgcccttgccgatagtatgtacagaaacatgatcatcgacagagagaaccagtgtgtcatcatcaggtaggagaagaacgcagggcagccagcctccagccctgagctatcagagcagccctgatatttgaggccactcagcatgtctgaggaaccagcaggagctgcttggtttactttataattgccccttgtctaatgccagagcctaaacactttcaggggaggagctcctcaggccccacccttccttgagtcatcagttaatggctgttgggggagaggaggcgttttcagtggtgtagccactgataagttgcctgtgttcccgcaaatctacaatggtagtagaactcacccagtcactggaaataaagaaacaatcaaataaataaatgacatgaaagtagaggggaactaattgggggcggaagtgatgtcagaagtgagaggctgtgctggctactttgtatcaatttgacggacttcctgagggttctagagatggaccagtaggctcggtgcatgtgcttttccactgagctctcttctcagctcaagataattcttatcacaccttaaaaagatctgggagcctgtgcttaacatgtccaggactcaaggtttggttcccagagttgccgcacaaataaaaaaagaacccctgtattatctgatctgctccatatatcccaacgctggaactgagttgcacattctttgttgcagctggtttgctagcatttagaatccaaacaaagcccacacaatcgcccctggttgctgtgtctctcacgtctcctagacactaagtgatctccttcattctctgtttttcttggcattcatttattaaagaggagggttgtaggcccttccaggcactggctgactgtatcctgtgatgatgccggccgacacctcccaccatgctctatatttcctgttgtcatagttacttgtctccttgctgcacaaaatacctgacaatagcaatttacgggttgaaatttggaggtcatttccaccgtaagcggaatagtcttgtgccagtttttatctgatggtttactttggctcacagttttagggtacagtaaggacatgaggcggctggtcacattgcatctgcggtagggcaagagggagatggatttgggtgctcagcttgctctctctctttattcagttcaagaccccaggctgtggggtggtaagcccggattcagggtgggtcttcttgccttaattaatccaacctagaaacttcttcatgggcatggccagagtcctcctaggtgattctaggtcctatcaagttgacagttggtgttgatgacctcatgtataaattgatagtatgtctcaaagcatggccagatgcaaattcattttttacaaaaacatgttatgcaatgaacgtcattcccgttagtctctctcagtgtgatgttcagagtatcaatcaatccatccattcccgattctcatccttacgaccattcctcaaagttattttctcattctgttatttcttttacatgtgatagttggacatgttttttatttcatcttaaaatataatctttatgggaaaactggataaaatgcctactcattgtcgtttcttctcactttttcaaagtaatgagttgttgccctggcaacctctgaaggtagcatgtatttattttcagtatcacctctaactagtgaatttaaactagcctactgtttacactgcagtcatctcttaggtgtctcagataatctcccttctgccagtgagggccccttgtccaggtctctgtgtccttgacacatctcaggtcctcttggatcattttcttgtggcacatggtccaagctcattttatttatgccatcccgagacctggaactggccctttctccaaggggctctttgttcagtcgaatgagacatgatctttagacaccactgatcctgacaccagctgtcagtgtttctgtcctccatagtggacaaagctaaggaatttgaatcaaaatttaaaaaaaaaatcaatgaggcatgggttcattctgtcacttctagctagcttttaaggttatagagggctgtttgttttaatttattattattattattatttgcatgtatgagtattttgtttgaaatctatatttgtataccatatgtgcagattgtacatattttaaaatatctttgacttgatttttatatctattatttgtctctctgctactaaaaagatattggtcctgatgacgtaaataaaattatttgccttatactgtatgcattatatttgtatatgtatagatctacatacatatatgtatctaaaataatagcaatattattataacaccaacaataatcatgccaattggtagcaatactgaattcattttaaaatttatttttgttcttttggtctatatatccaatattaacagccaaaatatcacagtttaaagatccattcatttttattttgtgtgtgtgagtattttgcctgtatgtatgtctatataccctctgtgtgtctggtccccatggaggccagaagaggggattggatccccttggactggagttatcaatggctgtgagaaaacagtgggtgctggggatagaagccaggctctctgcaagaacagcaagtacacctaactgctgagccatctccccagcccccaaatactggattttaaaagtcagctaatttaacattctctatgcccttcatgtgtcaagattgtctgccattagagttctttacactctaaattttaatggtttaagactgtgaacgttacacttatcattgacttattttgtttctttgaggaggagccttgctgtgtagcccactctgggtcaagcctccccagtactcctgcctctgctcctaagtggtgagattacagctgcaagccatcacacctgacttaagatctcagaatttggttttctcttaccaccctctaaaacatttacatggtagcaaaataaaaacagtaaagcaagataagagaagcattttgaggtaaatgcaggtccctggggcttcacaatgaagtgagattcaatgacattttactccatgtgtctggaggtaaaagaaaatctttgtgttagtgtctctgggaccattatcccaaccagggaactagcacttctcccccattctccagtgtctctaaagcccagagctctgtgttcagtctctcagtggttgcaaacttgttctttcctagtggtttatgcaaattgagggagggtggctgtattggttatgaattctgaatttatttttatcttgccacagttcccctatgaccagctttattttttcccctatgacattggctttctggttcatcgtgctcctgctggctgctggccaccccgtcttacccgggctatgcacgtgctcgccctgtggtctgcccccagagccccttgccgtaggttcttttaagaaaccacaccagttctcctggggggcatcttctggatttgtctgactgatcccacgtgttcatgctgcgcttgtgccttcaactgtcttctagaagctgagggttaaatacgaatggtagggtagatgcagttaaaccctttcagggggatgcctagggagtgatgattttgcttgagtaacaggaaatgctcctgtgtgacatcaatttgaggtcactggagaggcaggattggggagggtccttcgttgtatttaatgagagagttcggtaggagttttctggtagatcccggtgtttcttctcctttcttagtctgctcctcttctgagtgtttcctgggaaggaagaggttggctttgttactcaagagcccgtggttgcaccagctcaggcctcttccaccctcagatcccccgccatcttgattcacgtgcccaatgcggaacctctggccccttccaagatccaccttcgaggccatttagatgaggtacactttaatttaggagatggcaaaaccaagaggcaaaatttaggctaagactcctgtcccctaacaagatggccctcccttctgtctggctatagtcagttctccctgccaggctcaaacattcatgagaactgctcttggtgcctatggttacagctgtattgtagcgacagaatccaaagctgtatggaagagtcagcattatcagatgaggtgggggagggtccagacacaaaggcttgcagtcatggaaggtgtactcttagaggcctggatggtgtgagcccctccaaaggggtgtgtgtgacagctacttatggtcagtcagggatacctgcttaagtctcgaaggtctagagtttttatccaggcttcatcccatatgcctacaaggctcctatttgattacaggctcctacctctagactcagtccatgcctttaacctctacttcctctgtgtgctgcaaagtgtctgccacaaatcacattagacagtttggtggcctcatccccccaggcagtcaaagagggacctgagaggaagaatgttgggggtcgggggcttgacttcattctccaaatacagaggccacatgcccaacctctcttgagtttattcttcagtatgcaggttccttcgctttgagacagctcctgtaacctcagtaactcgccaggctcctctctaggtctcagtttcttctcctgatagtaaattgatggagccaagaagtcatgagttttcctgactttgaaactctttattgtaagccacacatcattggctagcagcctcacagttgaccaagcccccggctctgatcttgttttcctgtagatcaggaagatgctcctggaccattctgtagtctctttttatccctgggttcatgtggagcccagcactctgtcatccatctcatttttaatttccctacggtctgtttctacattgtaaccacatagcttctgtacagtagtatacaattggttggttgggtgatgggtccctctgtagatggcagactggggagctaccaggtaaagtaatgtcctgaaggtgcctgcacagggttgtgaaatcacaaaagaccattcacagagatgacaccatttattagtggaaagaagatgagatctttagggatccagaaaccaagtactgggatgagaggctgaactgagttaagatggcaggcatgacatttaataagcctgagaaggaacacaggaactgacaagctagtgtgggctccaggcaactacaggaaggttccacataacacagccatgagcaacggaaggcttaggaggccccctcaagcctggtcaccaagcagcccatgtctacttggttcagacatcacccattctccagaacccatgtctggatgtgtgtgttaaaaccatatctgggatatttttggatgtcagagacagctatgtaaatctttttgatcatctctttgtagtgtgctttaaaaagggaagaagaaccaggaagtttctaacagcattccctgtcacctctgcatcaccagactagctcttggcagcgtgtccacatagggttctgaagtttgccccctagcctctgtggagacaaattagaccttggagaacatttccgtggtgcattaacaccaaccacgagttcctgcccctctgggcctcatgagcccttgtgaccttagcatatttaagaactcagatatccattcgagagcatacatcacatttgttatagtttcacttttcaaaaatatccttaagtatttgctttctgaagacgagggtgtctgtctttagtgaatccaataacaagtttcctaatgatgtatgcattccgtgtatgtcctgctttttctgtccgtttgcttgtttgacaggaggtctcatggagcccagcctggcttcgaacccactttgaagcggaggatgactttaaactcctgatgcttctgcctccagctccctagcacttagattccaggcatgtgctgtcattgtgcttgatttacatggtcctggcatcaaacccagggcattctaggaaaagctttttaccacctgagttatattcccaccaaccccgttttaaatttatttgttgtgtgtacatgtctgcgggggagggggtccgtgcatgcacgtgccacacagaggacaacttccaggaattagctctcttttcccaccatatgggtcccagggattggcagcagatgcatttaccagactaagtcaccttacccaccctgcttctcccggcctttaaaagtaattaatacagctggggcagacctggtcacacatgcctttaattccagccctctagagacagaggaaggcagatctatgtgaatttgaggctagcctagacataactagttcagggtcaagctgggctgtgtaatgagactctgtttccaaaacaaaaaagacagaagacttaacaaagacgtattttgaaaggattgctgacaggttgcttatgagaagagcaggcgctagctgctaatctggacctgaggttgttcacctacctgcttgaaaagatattttgtatttgggcttcactagcatttgcagtgataacaagttagggaaaaaaaacaaaacaaaaaaaccaaccaaccaaaaacaaacaaaaaccccacggtgagatgcctctaatatgtcgctgtgtctgcttcactcttggcttccacaccatcaaacgtctcatctcctggatgctcaggctgccttcctgtctttgatgtatttccagagccttttattattatcactgggacccttttccaggctcccctgggtttctggtggcccacgcaagtcttgtttattccggcagcatcaacgtttgaggctcactgtctctctggtgagccttgtcagcttctgcctctgactaagaaagatggctgagaatggccgtcgtctgtggatttgaagaacagagatccgcatctggggctctcttcgtttatcttgtagcttgtatggttctaaagattcctttagtcgagcagggctgccaacctaacgttatcccattcacactaactgtatgtgtgagcatacgtgtgctcaggtatgtacaggcgcatgtgaaggccagaggtcaatctcaagtgtctttcctcagatgctgtccaccttgtctcttttgaaacaagctctctcaaccagtaggcaaggctggctcgccagtgagctcgtttctacttccccagccctcggattgcaggcacacgccaccaagctcagttttttatttggtcttgttctgacttttttttctgtgggttctgggattgatcctctcgcttcccagtcctaatgatataatttttaatcttcttaacaatgtggccatctagtaatcttatccctctttgacagattaagaaactgagtctcagataaagaaacggatgaagcatcttgcatttggggtatagacacgctgtgatgtgagccagggctgccccactccagagcaccctttctttgctgctttgagctagcctgtgttggtttagttggtaaataaactgttgtagcccagcagtgccttgaaaagatcgctgtgatgacctaggaatggatgctgttttgttcctctgtttcaggtacataacttatgcaagcctttggcgctgcatttaaaattcagagactgctgggagctagaaagatggctcagatgttaaagagcgggggctgctcttgcagaggacccaagttcgattcctagaacccacgtgatggctcgccgtctgtaattccagttccaggagatctaacagtttttttctggcctaaaagaacaccaggcctatatgtagcacataaatgcaggcaaatgctcacacacatacaataaaaacataaatttttttaaaagcaggaactaataagttagaagaacacaagaaaggttaataaggaattaaatatctctctaagctattcaaaaatgatgtgaactatcttttattaacatcaaagggaattttatatatagcaaggagccaactaaggatttaaacttgatcttcagactaaacatcaggctcaacgaaaccagaaatttccacttcacccttcctgtttattgggctgatcaaggtgagccttgccacagagccgctttcttggcagacttgaaaatgctgtatgtctgatagcattaactccctgggtacctgggatcgggggaaagcagcactgttaactgttatctcaggcaccctttgctcagcatgttagcacatttcctccatcacctgctcagcatggcagcagggctgtgtttcagcactttgatgcatagaacatatttgagggtttatattctagtgtgatttcaaggtctgagaggggctccttctctcctcagtctcagaacttcccaggtacccaacagaaaggcagtcacatctcactaatgtgagtctcatgacccaggggcttttaggaaaggaatctgaacagaatcgttgaaaaggcctgtgcagaaccttcttttgatgtggctttccattctcaaaaaagttatctaggcttctgatcacagtaacacaggctgctgtgtgtttgttccaactgtgtgtaagatagtatttctggcagatttgcttaaatgggtacatatcagtaatgactcaagagctgtcaaaaattggaccatctggagttgaggaggtggttcagtagataaagtacctgtggacaaccagggacctgagtttgggtcccagggacctatataaaaagaggtccatggtcacacacgtctgtaaccttaacaatggacatggggggctgtggacccccagagctcgctctctctctctctctctctctcactctctctctctctcacacacacacacatacatacacacacacacacacacacacggccctcctggctaacgtttcctatctcagttatttggttttagaatatttttctaacatagactccattcggtgacacccacaagttcctgaaactcttaatgccgtcatctcgccgttgtcaacacagcctgcatgctttaatgcctctggtggagtaggcctggctcagtagtctagaacacttgccactcttccaaaggaccgggcttcggttcccaggaaccacatcaagtggctcacaattacctgtaaccacagctcagggcctctgacgccctcttctggcctctgagaccacctgcacacatgtggtatacacatacacaaataaataaaaataaaaacaaatatttttaaatctacattaagaaaaaaaaaaaaaaccaaaagataccccaggaggccccaagctcatcttaagctaaagccatagcatttcttatcacttcagcaagaagagggcctcagccctgtagtgttggagacaaaacacatgcatggttaaccgcttcaccttacctttcctaaaacacagacggacacaaaatacacctccctggcattcatccagtgagctgcagggaagcagcagctatggaggaacggcacggagggattttggagacccactatggagagcatctctcccagcggtcaggatgaccgaatgagcaatgtgaaggcagaaatgctttcacacttgctggggtaacttaagggaactggaagcattgttgctttgtaagcgaggaacggcctgactcacaaaaccgtggcagtcccctgagtccaattattatcacaacattataaaaggctaaagtgttgatttctacagctaacatgcaagcgctgtgttgtttggagcggtatttcctgtgaggtctgtctcgtctttgattttgaattgtcaggctgatccccagtcgactgggaacaaacggggggtcctagttaagagttcccagtccgagccctgagggtcagagaagaatcgggaacatgatgattatggaacactctgggggttctgctaggtcgtcagagtgagttgagggttgctgatcagttttcttgtttttgtttttgggttttatttttaagatttatttattattttatgtgagtacactgtagctgtcttcagacacaccaaagagggtgtggggcccaattacacatgattgtgagcccccatgtagttgctgggaattgaactcctcgtgacctctggaagagcagtcagtgctcttaactgctgaaccatctctccagtcctcttcttaatttttttcgttgtttttttttttaaacaattgtacccatctattgtgcacctgtgtgtgtacacacgtgtgcctcggcaaatgtgtggaggtcagaagacaaattgcaggagtcagagcactgggaatcaaatccggggcctttggcgtgtgtgtgggctagttttatgtcagcttgatatgagctagagtcatttgaggaaagggacctcagttgagaaattgccttcataagactaggctgcaagcatgactatagggcattttcataattagtgattgatgtgggagggcctgacccactgaggatgctgccatccctgggcaggtggtcctggactctgtaagaaagcaggctgagcaagccacagagagcaagtcagtacgcagcactcctccatggtctctgcatcagctcctgcctccaggttcct

SEQ ID NO: 774 - DNA, 1263 bp, Mus musculus
cagcctgagccagagaagagttcggattaagtgttaagagaaagcgggtccaggcaaagcagttggacaagcaatcccgcagagcgcatcagggtgcatctctagacagttggggatcgccaggtctgagtgtgcaccgggtctgctaagttttgccttcacctagcgtttcggatcccgcctggatggagtccctcttggatttccattggctcctgtgagtgcttgggtgtcgggagcttgttttttggcgaagggaaccaacttttgaagttcgcccaggagaccgcgttccagcctcagtgcctaggcagcgggacccggcggaggcgcgaccgcggcgggagtcaccatgggcagcaaaggcgcctaccgataccattggcagagccacaatgtcaagcacagtggtgtggacgacatggttctactgtccaagatcacagagagctccattgtagagaacctgaagaagagatacatggacgactatatttttacatatatagggtctgtattaatctctgtcaacccattcaagcaaatgccatattttggagaaaaagaaatcgaaatgtaccaaggagcggcacagtatgagaacccgcctcatatctatgcccttgccgatagtatgtacagaaacatgatcatcgacagagagaaccagtgtgtcatcatcaggtaggagaagaacgcagggcagccagcctccagccctgagctatcagagcagccctgatatttgaggccactcagcatgtctgaggaaccagcaggagctgcttggtttactttataattgccccttgtctaatgccagagcctaaacactttcaggggaggagctcctcaggccccacccttccttgagtcatcagttaatggctgttgggggagaggaggcgttttcagtggtgtagccactgataagttgcctgtgttcccgcaaatctacaatggtagtagaactcacccagtcactggaaataaagaaacaatcaaataaataaatgacatgaaagtagaggggaactaattgggggcggaagtgatgtcagaagtgagaggctgtgctggctactttgtatcaatttgacggacttcctgagggttctagagatggaccagtaggctcggtgcatgtgcttttccactgagctctcttctcagctcaagataattcttatcacaccttaaaaagatctgggagcctgtgcttaacatgtccaggactcaaggtttggttcccagagttgccgc

SEQ ID NO: 775 - protein, 156 aa, Mus musculus
VCTGSAKFCLHLAFRIPPGWSPSWISIGSCECLGVGSLFFGEGNQLLKFAQETAFQPQCLGSGTRRRRDRGGSHHGQQRRLPIPLAEPQCQAQWCGRHGSTVQDHRELHCREPEEEIHGRLYFYIYRVCINLCQPIQANAIFWRKRNRNVPRSGTV

SEQ ID NO: 776 - DNA, 256157 bp, Homo sapiens
  misc_feature (1)...(256157): n = A,T,C or G
attgtatagaaatgcacctgagccatgtttcctacatggcatcaggacaatgggccaggcaacaaaggaaccttttgagctatctcttggcggtgctgcctgccagtccatagctcaggtccacctgtgctaccagcattgtcaaactacagtatttactcaattacattcatactgggttccatttagccttgtcgctttttcaaaattagtgaaatatggagaaaatataagtgcaaacactagtaaaagggagtgttgttctcataaacataaaacaattgagacaaagaagggaatcattaggtgtggagaaggtagtgaatatttagcctcaataatgacaactcataccgagacgttgctacgcatcactcatcattgctattactttatatgatttaattcatattcttacaacactatgtgagaaataaatgatgaaggtactattattatctctgtctttacagataaaaaaaaattcatgatttataaaggtaaatagcctgacccaaatcttaaagctgcctattggacttcaggtggtcaactttgctcagctaggatggagatgctcagattttaaaaacatctatgcatgctggaattatagcttaagactatgtctaggggacagcacacaatcagggattttatgctacattttagatctctgaaaatagaaacctgtgcttaaagcacacggatttgtctttgaactttatatatctgacattggtgtgtgttttgggaacgtgttctatatgaaggtagaactctcttgcattgttgtatgttttggatgtacatgtaaacatgtgaatcctatgaggactgggaacttgtcttctacttctccagcacctacaacagtgctcagtaaaggttggttgtggtggtgagtgataacagtagtcagttggaaaccatgctgccatcatgctgaacaccaagaaacactctattcaatctccccaagtgtttgtaacaatatattgaaaaacatgtcatctatctgagcatggtggctcacacctgtaattccagcactttgggaggccgaggagggaggatcgcttgagcccaggagcttgagaccagcctcggcaatatagcaagacccagtcctacaaaaaaagaaaaaaaaattagctagccatgttggcaccgcctgtagttctggctacttgggaggcagaggcaggaggattgcttgagatatgtgttcacaccactggagtccagcctgagtgacagagtgagaccctgtgtcaaaaaaaaaaaaaaaaaaagaaaaaaatgtcatcttaaatacacacacacaacacacacatctatgtgtttacacaaatatttaaaggcatgtaatcaaaaacacatttataagtacatgataataaaggaaaaatgatgtcacatctcaagtatgtaaacacatttacaggcacaatgatgacaaaggggaaatgatgatgatcattacaaaggccatacatttttttctattgaagaggtgaacggaattaccctcctggactcactaagtgtagaaatcgaggcagcagacaggcaaagtcagcaaactgctgcatgccctaaatttggagtgtctaccctgtcttccttccccagagactctgtccccatctgccatctctttttaatggggcagtaagctttaggacatcactcctctcacagcatttgcttggaatgtgactggacaggcacctggtcccagcagagccttccttgtcagtgacctatgacctgggtggcgtgatttaaaaggttgagctgggtgagtcagattctttctttttttctctccgtccctttctccctatggaacttgaatcaaaagtctagagggcagtttccagtgagctgtgggcaacattgtaaaaaacgttattctagggcccaagtcagatcatgacaggctacaggcactttgcaagctgaaatcggggaagaggaacaactgtgagttaagtgggagaagcttcaagagacagacaagaaaagaacatccaaccacgcagagatgcacagccctgccttcttttgtcttgtttttcctgggctcctgggcatgtatactttaaaaaaaaatttctttctggcctagtgaagtggctcacgcctataatcccagcactttgggaggctgaggcacttggatcacttgaggccaggagttcgagaccagcctggccaacatggcaaaaccccatctctactaaaaattcaaaaattagataggtgtggtggcacgtgcctatggtcccagctactcgggaggctgaggcatgagaatcatttgaacctgggaggcagaggttgcagtgagccaaggtcgtgccagtgcactccagcttgggtgacagagtgagactctatctcaaacaaaaacaaaaacaaaaacaaaaaaataaagcaaaggccaggcatggtagctcacgcctataatcccagcactttgtgagggtgcagcggctggatcactggagatcaggagttagagaccagcctggccaacatgatgaaaccctgtctctactaaaaatacaaaaattagccaggtgtggtgacgtgcacctgtaatcccagctacttgggaggctgaggcaggagaatcgcttgaacctgggaggcggaggttgtagtgaaccgacatcacaacactgcactccagtttgggcaaccgagtgagactccgcctcaaaaaaaaaaacaacattattttctttaaagtaacccatgtgctcttctgatccttgttagtaaaagagactaaattggagcaacacataacggcagaaaaaagtctctcttggccaggtgtggtcactcacctgtaattccagcaatttgggaggctgaggcaggaggacagcttgaggccgggagtttaaggcagcagtgagctgtcatcatgccatcatactccagtctgggcaacaaagcaagatgtcatctcaaaataaatgaatgaatgaatgaataaataaataaatgaataaataaataagtctctgccagtggaggatataaacacacacacaccaaaaaaaaaaacacaggagaaccatataagtacagcagtccaagaccatgaaagatagtggcaaacagtcatttcatctgacagtcccccaggaccttggttcgtgcaatcctgtgcaataatcaatatttatggtaatgaccttgagtcttaaagcaaaagctgcctgacattcaatgtattttcagaagtcaatgaaatgtgtagtttcattcagaaaaaacttttcttaaagttaaaaaaaaaagtcttggtatctaaaaatgacaagatttggctgggtgtagtggtttatgcctttaatcccagcactttgggaggctgaggctggaggactgctttagcccggagttcgagaccagcctgggtaacatggtgagactctgtctctacaaaaaataaaaaaattagccgagctataggtagtgtgtacctatggtcccagctacttgggaggctgagacgggaggatcccttgagcctggcacagtgatacctgtttgtgcctctgcactccagcctgggagacacagtgtggtgctgtcaaacaaacaaacaaaaaaacaaaaacaaaaaaaaaaaaagaaagaaaagaaagaaaaaaggaaaaaaggcaaggttcatgcagagatttgttattttttactttttgaaatgcacatatttattgatccacgccttgccttgttgtagcaaagagctcagatgacttataagaatacacaggatccaacaggaaagtaaacattgacagtgaatggggaaaataaagaacatcaaggtatggacaagagatttagttatctgcaaagctcatttccatggacttcctcattccttgctagatcatggaccaccataactagtattaatcattgtttcaactccaaattttttagatttggagaaagatcaaggtttatcttctgaatgtaaaaatcaaattgaaactggaagaaaagaaaatattgatttaaatcagagaaaatataataataaatctacacaaacatgcttttaataagctgctaatttaagcatatatttaaatcatttctattcctttacttcagtaaaataattcttaaggcaaaataattttattttattttatttttttttgagacagagtctccctccgtcacccaggctggagtgcaatggcactgtctcggttcactgcaacctctgcctcctgggttcaagtgagtcttctgccccagcctcctgagtagctgggattacaggcacctgccaccacgcccggttacttttttgtatttttggtagagatggggtttcaccatgctggccaggctggtctcgaattcctgacctcaggtgatccacctgcctcgacctcccaaagtgctgagattacaggtgtgagccaccgtgcctggccttaatttatcttaatcagaagtagcatcatgttacattatacaactggtgaaattctcttcaacatcctttttataaaccaatatcaacatactgggggaaaaagtgtttagagttaaacttactgtgtaaatgtaatttttatattccattaaaaagcaacaatttttctgggagctctggtttggaaaggctcacggggtttcaataagtgtgttcctattcattttgggcctgcattagggacaatttcttctgatggacatttctattacgcaatcactgcttaaagggtaatagtgtaggcttcagagccagacaaatgtatgtatttgatgcaggatagctgagtaatagcttggtcaaattactttaagtcttctcaacttagtttcttaactgcaaatggagctaacagggtcgtatggaagattacataagatattgcacattaagcacttagctcagtagctaacagctagtgaacctaatacatgatgtatgttatgataaaaatagtgattgtagaggacatttcacactgatatgatacaagtctctctttcattagtgtcttgttaaaggtttctaattttcccattgacaaattttcttttttttttggagatggagtctcgctctgccacccaggctggagtgcggtggcaggatcttggctcactgcaacctccgcctcccgggttcaaacaattctcctgtctcagcctctactacagttgggactacaggtgcaggacaccatgcctggctaacttttgtatttttagtagagacggggtttcaccatattggtcaggctggtctcaaactcctgacctcgggtgatccacctgccttggcctcccaaagtcctgggattacaggtgtgagccactgtgcccagccaaattttcttttcttttctttttttttttttttgagacggaatctcactctttttgcccaggctggcccgcactggcctgatctcggctcactgcaatctccgcctccggggttcaagagattctcctgcctcagcctatcgagtagctgggattacaggtgcctgccaccacagccagctaatttttttttgtatttttagtagagacagggtttcaccatgtttggccaggctgctctccaactcctgacttcaggtgatctacctgcctcagcctcccaaagtggtgggattacaggcgtgagccaccgcaccagccccacattaattaactttagtgttgtgagtgcattctgaatgattttttatggtattgacagggaaactagttttattgctcgatattattttcttgctgctttccaaaatgcataaacaatgatttagttcactgatagatttatacagaaaattttactttgtattcattttgatttttttatttgttccttttcattcagccccagaaaaaatgcaattaatcatgccaaggtatttacaaagccttatctgactagctccatcatgtgtctagaatgagttttacaattttaaaagttgcttccacttcactgctactatggtcttgaataagaataaatatctggctgggctcagtggctgaagtctataatcccagcactttagggggctgaggtaggcagatcatttgagatcaggactttgagagaccagcctggtcaacatggcgaaaactcatctctactaaaaatacaaaaattaaccaggtgtggtggtgggcgcctgtattcctagctactctggaggctgaggcaggagaatcacttgaactcaggaggcaagaggttgcagtgagccgagatagagccactgcactccagtgtaggtgacagagcatctcaaaaaaagaaagaaggccgggccacggtggctcacacctgtaatcccagcactttgggaggccgaggtgggtggatcacgaggtcagcagttcaagacaagcctggccaagatggtgaaaccccatctctactaaaaatacaaaaattagctgggtgtggtggcgggtgcctgtcattccagctacttgggaggctgaagcagagaatagcttgaacccggaaggcagaggttgnnnnnnnnnnnnnnnnnnnnnnnnnnnnnnnnnnnnnnnnnnnnnnnnnnnnnnnnnnnnnnnnnnnnnnnnnnnnnnnnnnnnnnnnnnnnnnnnnnnnnnnnnnnnnnnnnnnnnnnnnnnnnnnnnnnnnnnnnnnnnnnnnnnnnnnnnnnnnnnnnnnnnnnnnnnnnnnnnnnnnnnnnnnnnnnnnnnnnnnnnnnnnnnnnnnnnnnnnnnnctccgcctcctgggttccgccattctcctgcctcagcctcccggtagctgggactacagtcaccagccaccatgcctggctaattttttgtattttttttttttttagtagagacggggtttcaccatgttacccaggatggtcttgatctcctgacctcgtgatgcacccgcctcggcctcccaaagtgctgggattacaggcgtgagccaccacgcccggcaaaaactgcttttatatatatatatgactttataataatctcatgctcatatatattataaaatgatatataatcatatataaatcatatgtacatataaaatctcatatatattataaaaaatgaacacaagcatacatcttcatcaaagtcctgcctactacagttagatgtacctcttgaaacttggaagagattatagattattagggcaataaaagtaaacgctaaaacatttttttaaaaaatcagaaatgatgatataatggactaatagtctcaaggtagtttttgataaatccaagactgatcaattgtcagtcgactgtcaatggcttattaagagattttcagtgtttcattgtatacctgggctaatcttgggaaaaaaactatgcctttgtctgtacatctcaaagcccatgtcaatctgactactaatgagggttgaccatggatgggatggtgtcttaggtagtgtttcttgtgttactggtaagctgacacttccgtcttggtaacctctgttcatacactcctaaaattcctgataggttttgttgttgttgttgttgttgttgttttgagacagggcttcactctgttgcccaggctggagtgcagtggcacgatcaaagctcactacagcctcgaattcccggcctcacatgatcttcctgccttagcctcccaagtagctgggactacaggcatgcactataatgcccagctaatttttattattataatttgttgatagagacagagtcttgctatgatgcccaggctggtcttgaatgcctggcttcaggcaatcctaccatcttggcctcctaaagcgctagcactgtaggcatgagccactgagcttggctgacctaataatattctgaagctgatatttccctatgagatatggagtcagacttatctgagactttatcatgtctgtgtgtacctaggcaatgcctagtacagatggcatgctgttttctttccaattcatactacataactatgtcagatgaatttcctgccctaaactatagctccaaatatggcagttccttgcacaaaactactgtcgcatttcattatgcttgcttctttcctgtatttattctttctaaaaatttatcgtttgttttccccatcctaaaattgtaagctcagtgagggcagggaccagttgtagctccagtgtttagctgtgctgtcttataacacacattcgattatattgttgccaaactatgtaaatgattactacaagaatttggacaatatggttttctttcaacttttaaaagtgagatataatgaacgtaccataagactcacccatttaaaaagcataacacagtggtttttagtatattcataaacttgtacaatcatcaccactaattccagaatattttcatcacttcaataggaaaatgcatacctgttagcaattacttccatttcccctctcccccagcccctagcaaaccactaacctactttttatctctatagatttccctatcctcaactttcatttaaatggaattatataatatgtggtcttttgctcctggcttaacacgatattttcgagattcatccatgttgtaacattttgtttacccttttagacaagataaagtttaataccctttctaactctatgctcagatagtcaagtgaagagctacaaccaaatttctttttcctttcttcctttcttctctctctctctctttctttccttcttttttttttgacagaatcttgctctgtcgcccaggctggagtagagtggaacgatcccggctcactgcgacctccgcctcccctgttcaaacgattctcgtgcctcagcctcccgagtagctgagattacaggcatgtataaccatgccgggctaatttttgtatttttagtagagaaggggtttcaccatgttggtggccaggctggtctcaaactcctgacctcacatgatccaccaacctcagcctcccaaagtgctgggattgtaggcgtgagccacagcgccctgcctcaaccaaatttcagaaagtatcataatatcattatgcttcatagtttctctatgccctgaagtttaccaattttatcttctacagatcccaggaaggcagcctgttaagactcaccaaatttacttcctcagcctccagaacaataaaatcaaactccctaccttgattttaagattctgcttccccccaccccgccccaccccaatcttctccttggatattcgacagtctggaataatgcatttttacagttctgattgttttcagcagatgtgttggctgaggttggatggggtttcttcccacctatctctcctctctccttccctctgcccactgcacgtgcaacaacttttctgccatcaaaacgtgcaaaaaagaaacaagaaagaaaggaaagagaaagaaaagaaaaacagaaaaaagaaaagaaaaagcagccggaagtcttcctttgttttccaaggaaattcaggtaaaaggaggggtggggaaatgatatttttgactttgctcacaatccagacgtaggaaagaaaaaggatttcctttgggctgctgccacgactctgatgttttatgctgataaaatatttccttcttaaaaaaaagttctgggaaaatcatgccccttcaacttggaagcgaaacccaccctaactttcgtcttaaaacgcagcgaagtgaaaggtttgctcctctttcacgagggttttgttccttacagttcgggtcttgctaccaggagcgagctgggtccgcagcgttcttcggtggctggcgcgggaggaggactacaggatccagagatctttggaaactccagcagctccaagcttgttggctactacggtttccctgaggagtgacgctacgaaaacaaaccctgattggtcaggcctgagctgagttctccatttatggacagattgcccggcccgagccgagactcagccagaggagtacggattaagtggccgaagaaagaggagtgaggcaggggagcgaggcggacgctccgagcgcatcggactcacctgggccggcggcgagcggcgagtacgagtggactcttgccctccgcagcatgcgccccgcctgctaagtcgccgccgtctcgccctcacctagcaccgccaatcccgcctggatggagtcccctctgggttcccattggctcctgtgagtgcttgggtgtcgggagcctgtttttggcgaggggaaccaacttttgaagttcgcccagaagactgcgttccagccccagttccccggcagcgggacccggcgaagacgcgaccgcggcgcgagtcaccatggtgagttggccgcgccgcgtcctaggacgccggacccggggacggggcaggaaaccccggcgtggtgcacccaccttgggcgcgctgcctgggccaggggtggagaaggtggacgcgggagccggcacgtcgcgagctctgatttcctgccgctttccgtaaacccgggccgggggagagcgagcgaggggccaaggaaaactttattccaagtcggtttctgcgtcgcgaaactttctgtggccgggttgctatggctgccagctgtcggaagccagggtgtgggcgcatcggctgcgaggggcacggcgcgggagggggtcccctcctcctgctgggacgtggggggcgcagccggcaggggaggtgctcggagactcgcgccgcagccgctggcggcgtcccctgccctccccgcggccgtgcccgccccgccccgggcaccctcgcgccgactccctctcctccccgccgccgctccgctgcccggcagcgcccgcagctgtcccgcctggcagcggcacgcgggcgggggcggtccctggcccgccttggcgaggggcggcgcgggccgcacaaaggcaggcgggggcgccaggtagggcgagcacctggcggccggcgggctgtcaagagccagggagactcgggcgcgggcggcaaccacgccgccccggacctgtgccgggcgccggccccgagggtctccgcgccccggacgccaagtaaacacctcctgaagaggaccccaccccttcccaagcgcgaggggatcggggcttttcggggatccaggggacgcttcgcacgggaagacgccctcgcgagtttcgagtttgttgctgttttccctttggcactttgggaatgtgtggaaggggccgcctctttgacttgtgacttttctgctattccaactccccagtccagctacactcccctccctccctgtataaccttagccacctcccttgggctttggcgtggtgtacttttctttgcggggcacgaaagcaaggactctattttgaagagatcggcagttcatcaaaaaaaaaaaaatctattacaaggcttcatagtttccacacttgcttcttttcaagtagtcctgcttaggtggattatctcgtcctcttctggtttgctgttgttttctaatggctgtggaagagaagccaagtcaaaatgataaccagcacaacactaattaaaaaatcgatatcccggtgagcagcctgagggaagtgcagtagaggcccatcgaaacctgcacacaaagctcagaagcccccttgccccgtgctgtttattccaaagaatgattacaaacaaacatcaacgagaaacctttcaaggcatcctcggccaaagccttttctttttacatagtccaaaattaagtcacttttgccccatctaagagaacactttgtctatacatttcctcttctagttttaaggtttaagaagtcagtctactctacgttacttttggaccccttccctcaccccagcagagaaccattcccattgggcatgtgtttgggtgaagctacctcactgggcacctggtcccttgaagcagtgtgatagtcctggtacttgagaattgctgtaatcattttccgtgggtcaatatttcttaaaaaaatcaatgtgtttatgtcaagaacttaaagaatcttactgaatttaagtacttgagtggtaccttgaggaaattaacttcccctcagttaaactcatttttcatgctgaatggactgaaatatactctaggttgccttttccgaaacctgtgataccatgcttaattcagccccattgcagatgaagtagagggttggtcaaatgcatgcgaagaaggcatgctgtagggaagaggtggttctatctgaggacagtgtgtgacttccctattgatgggctccctgccatcagcacagatgggcatgttgtgtgcccccaggcgactatctgtgcatcagatatggttgctgaagtcacaattcactgatggaaaagttgaaacagctggctgtcctgaaacaggagatgtgccattgatagatctactggatccagagtgatttggccaaagttaatcatttctttcctgacttgaaaaattgttcattatgtatgtgaagttgccttagaatagagcatcatcttaaataatcagaaacccaagttacaatatttaatgtttatgtcagactctgtcaagccaaatgatacttcattttgtgttccacatctgcccaggcctgcccaagttgtatcccttcagctgcttagaacaggaagggaaaggacattaccttctttgggtgtggctgaagattagcatggaggctaaaattcatcagaaggcccttggcggccaggcgcagtggctcacgcctgtaatcccagcactttgggaggctgaggcaggaggaatacttgagcccaggagttcaagaccatcctgggtaacatagtgagaccctgtttcagttaaaaaatattaagaagaagaagaagaaaaagaaggcccttggctgggctatagggagaacacctataccgtggacttcttctgtgtgagtgtgtgtgtgtgcgtgtgtcttttaggaagtctggtagcatagtaggagggctctccatctgtacctgaggccctactaagactcattcagttgtgactcataaggaaaatagccattttcattttctgactcatgaacacagtgtacagcttgtagttcaccttctatcttcctcctgaaaactcactttgggacacttttctatcttgagaaaactaggaacactaccaggcaatagttacttgtgtctttttcctaaggagacttgaagaagttaaaaaaaaccctgcacatctttataatttagtggaggttgtttagcagagtacaaaaaaatctctgttgactttaaccgtaatacccatctaaggcttccttcgtagaatctgggcttatcatcatctgcaaaggaagttctgcttttgtggccatgaccagtttggactctctgatagactgaaacccatggctgtaggtccgctatgtgctttggatccagaaattgtgattcatttttatgcaaggtttctgtgcattaaatatacagaaatatttgagcaaatctgaattgaccatcacctcaaaacatgttcaagagctgttcccttttccttacttgcatatacttgtgaggaaattatagatatgacacataagaatacccaggaatagatttacaacctagaaatctgatgaatagctgatgataaggtaggtaagttcctttaggtgatggcatggcatgtatttagaaagtctggaatacatttcaaatgtttcctgggaaggtaacctacttgatttccacagattagtttatcagattgctagtagtctcctagtcaaaacaacacaatacaacaaaacaaaaccagaaaggaatgggatcaagcacaaaaaaagttttgatggaggcaaagggttggggaaatacctagagtccgggacattatctagggacaagtgtgagtgggccatcctagtgggaaatatttgacagcccaggcatctccttggagagaaaatgggtggagcagtggatggagagggatggagaagtataagaagcagacatttactgaagttgaaagtcacctccaccacacttttgctgaggactacagtcttgtcagtggttgcaaactttttttttttgagttggagtctctcactgtcgcccgggctggagtgcactggcgcgatctcaactcactgcaacctccgcctcccggtttcaaacgattctcctgcctcagcctcccaagcagctgggattacaggtgcctgccacaacgcccagctaatattttgtattttttagtggagacggggttccactatgttggccaggctggtctcaaagtcctgacctcgtgatcctcctgcctcggcctcccaaagtgctgggattacaggtgcctgccacaacgcccagctaatattttgtattttttagtggagacggggttccactatgttggccaggctggtctcaaagtcctgacctcgtgatcctcctgcctcggcctcccaaagtgattacaggcatgagccactgtgcccggccagtggttgcaaacttaaatgtcttataatttggtggagggaggctggcctctagagagtaaatatggaatatatgtgccattctaggaggcaccactacttgattctaggccatggttatatcgaccatattaccaaattatcttgtttttcaagagaaactagaaatctagatttttatgctatatctgccagttcttatttttatttattttgagacagagttttgctcttgtcgcccaggctggagtgcactggcgcgatctcggttcactataacctctgcctcccaggttcaagcaattctcctgcctcagccccctgagtagctgggtttacaggccccaccaccacacccgcctaatttttgtatttttagtagagacagggttttaccatgttggccaggctggtctcaaactcctgacctcaggtgatctgcccgcctcagcctcccaaagttctgggattatagacgtgagccaccacgcccggcctctgccaatttttatatgtgatttgatcatctcagaggggccaaacacagctgcagattagctgtttgcagccactttattgtaagtcttaacatggtgtccttctgtgaaccacagtgattcttctcattcactcaccaggaagaatgtctaaacgttcactacatacccagtagtggcattcagtatttatccatacatccacaccttcctactgggtctccctaaagagagggaatagcctggtattttcagcctatgcattctctaagctattataacagggaaaatctgcatccagctgctactgtttggcgctatctcaacacctgtgtaggatggttccacgagtggtgaggctgcaaattgagcttttctcttcaacccttcaactccttcctccactgaaaatgccatggcctccaatgtcacatgatggacttcttgtttttcactcctttttcagttgaatctcatgaattggcggtctgtctcaggcgttttcctgagggttagataatgagcagcggcgtgcattctgataacttagaatacaacattttgcctctgtgcctagtgtgggcatgtgatgagcccctgtgagactcagtgaaagaacatatagtaccttgcgtttcctcatgagccaagtgtggggccttattattcattaggaatttgagaaatctctttttatctgcttcaacaagcagaaatattttaaatcttctgtgtaagtgcaaggtattataagcttcatggtaggatatataggaattatgtacagtcatggttttccaagtttgagtcatctcttttttttttttttttttttgtgaaaatgcagcaacttgtgtttttaccaatctgtgattaaaatgtttcttaatggtgagtttttaaaaactttttttttctttttctcaccatgctgaaatatttacaaagtaaataagaggttaaaggttaaatgccaaaggtattaaaataaacatctcagccttataagcacattctgtaatagtggtaaacaaattgtgttttgaatttcagtttcagaatttatgttggcagagacaaaaggttttggggcatcctagcaaagtatttttttcatatatctttgggacagccacacttaagagaagtacaactgtaaaagccagccctaacatagtgacatgaactttgacaacccatagaactcaaactgtacatgtgaatgaagttggcccgcccttctgagttaccaccatgagaatgacgtcattgccattgttcaaagcacttttgaatggtcatttatgagctatgtaataaaacctatttttttgccgggtgtggtcgttcaggcctttaccaaaaaaaattttaaaaattagccacgtgtggtgtcatgcactatagtcccagctacttgggaggctgaggtgggaggatttcttgaactgaggagttcaagtatgcagtgagctgtaactgtggcactgcagcctgggtgagagtgagagagagagagagaaagagagagaaaaaaaaaagaaagagacagggctgggccctgtggttcacgcctgtaatcccagcactttggggggccgaggtgggcagatcacctgaggtcaggagtttgagaccagcttggccaacctggtgaaaccccgtctctactaaaaatacaaaagtagccaggtgtggtggtgcatgcctgtaatcgcagctacttgggaggctgaggcagagagaatcacttgaacttgggaggcggaggttgcagtgagcctagatcacgccattgcactccagcctgggcaacaagagtgaaactctgtctcaaaagagagaaagaagggaagaagagggaaggagggagggccttattttttattttttaactccttagtgcccagtgtgatcattcctattactcaccagactttgtattacatccctctcaggtgtttccagaagttacattgtgcctcaaaggcggaacaattagccccactaaagatatgcagtatccagcaggtccctttttcctggaataagtataagaactgctctgaaggaggcacactctcttgggtcttttgagctctgataatgtttgttacaaattcatttatagcactttatggtcatacgttacattatagaaagtaaaacataggctacattgtagaaagcccagaagagagcttaaaaattctatcctaaatccatttgttaacttcacagagagatctagagaggttaaattacttccaaagtctcatagctagtttttagctgagttggtgccagaatccaagttagatctgatccagtgcagatctaaccttattagatcccagtctaataaggtttttcttaccaaacagtggtgggaataattctttaagagtctggacgtgaccagatagttttctttctgggacttttcaagaaagtctgcttgtaggtggaaggttactgtactaacttcattataagaaatttagaagaattcagccgggcgcggtggctaacgcccgtaatcccagcactttggaaggctgaggtggagggatcacctgaggtcagaagtccgagaccagcctggccaacatggtgaaaccctgtctctactaaaaataaaaaattagccgagtgtggtggcaggcacctgtaatctcagctacttgggaggctgaggcaggagaactgcttgaacctgggaggccgaggttgcagtgagccgagatcacaccattgcactacagcctggggcacatctcaaaaaagaaaaaaaaaaagaaaaagaaatttagaataattcacccaaagtacccccacaccctaacacagtaattatttttgtctctgggtttcctttcagtctgttcaaatgcattgtttctttgtttgtttgtttttcttgagatggagtctcactctgtcgcccaggctggagtgcagtggcataatctcggctcactgtaacctccttctgcctcccagtttcaagcgattctcctgcctcaacctcctgagtagctgggattataggtacacactaccatgcccggccaactgttttatttttagtagggacagggtttcaccatgttggccaggctggtcttgaactcctggcctcaagtgacccaccttgacctcccaaagtgctgggattataggcatgagccaccacaccgggcctcaaacacattgtttttatgtggttataattatggggcaaatatacaatttgtgttctgttatttttccacttgttttacaaatcctttttcttgataagcatatttgttatattttggtggcagtattataatcccatgtagccggattactcactgtgtgtcataactgtatggagacttcctccagaagtgtgtacaggggagagttcctccttccacccactagaaccgctgtggtcagtaatgggctgcttaatctttggctcctgagataagaagccccctctttgggtgagcttgggatgcatactccacattcccaggttctagcccaaaggtacctaccattggtgctccccctggattctggcgttgacactcaaatatgtgacaccagtgggtactcagacctctaggtcttccttggcaaatatgagtggtcttaccagagaacgggagtggatggagatggagagctttgaacctcaaagtggagagaagacattgccatggcaaaggaggttagcatacaggcttggtgaattagagctgggcatggtggctcaggcctgttatcccagcactttgggaggccgaggagggcagatcacttgaggtcaggagttcgagaccagcctggccaacatgtcaaaacccccgtctctactaaaaatacaaaaaaattagctgggtggggtggcgggcacctgtaatcccagctactcgggaggctgaggcaggagaatcgcttgaaatgggaggcagaggttgtggtgaaccaagatcttgccactgcactccagtctgggcgacagagcaagattccgtctccaaaaagatgaattagtctctctgcctctgcttatgagaagctccccatatagtggagaaatgataacaaaaggcttccatatacatgatttcatttcattctagcaccagtgttggtttttattgccattttacaggtaagaaaatcaaagtgtagtgaggggaggggaattacttagggccacacaatttgtatgtgaccagccagatctgctaagtccatgctctttgaaaagtggttcaataaattatttctaaatttgacaatgccgagtccacgtatttgtatactttttcattatttcacatactcctgagggaaggtaaggctgatagaaaatcaccaattttggttgattttattcagtaataccagaggggataatttagacttaagaacattgtctgttatgaatagtagtgttctgagttttaatttccttgctttgggactttgccaaagagactagaagatgtcatagtgagagcaagcataaaagtaaaagaaagtaatactggccgggcatggtggctcacgcctgtaatcccagcaccttgggaggccgaggcgggtggatcacgaggtcaggagatcgagaccatcctggctaacatggtgaaaccccgtctctactaacaatgcaaaaaaaattagccaggcatggtggtgggcaccagtagtcccagctactcaggaggctgaggtgggagaatggcgtgaacctgggaggcggagcttgcagtgagccgagatcgtgccactgcattccagcctgggtgacacagcgagactccgtctcaaaaaaaaaaaaaaaaaaagaaagtcatactagaaggctctctaatcttaactaggattaaaaaaaatagaaaataggaaaatgtgagaacaacagagatttagttgtttaattcttaaatacattacagaatacaacaacaaaattagaatatcacattgttagtctcctaataatttcttcggtgtgaccaccatttgatgttgacagcaatttaggataacattacatggtcacagaatattttggacagtattatctgattctaagaaattttcaatgaaaaaataatagggctgtttttggtgtcctaggaagatgcagaccttatagaaaattttagatttaaatgcagaagaatctaataagctattttaagaatgtaagtaaagatagcttccttcaaggcttgggaatgctgtaatgcagaaatatgcatcaatgcaaaatgatgacagtgccctttctccacatcagattatcagagattcctaacatttggatgggagaatgtcctgagtcctctgagaatatgttggaagctactgaccttttccctgacagtgtttataataacaaataaacattccgcagatcacgagaacaaacaaaacaggaacaatctaaatgttcattggaagagaaatacatgtggcttgtttgataatatggtatcaatatgcataggtgtcacaagggtagtgtttggtaaagaagcaagttgtagaaagacgcatatctgaaaccatgtaagaaaaatgtcaaaaacacaaaataagactgttatttgggggtctatacatttatttgtgtatgtgtacatatatgtatttgtgtggatattattttaaaaaatataggctgggcgtggtggctcatgcttgtaatcctagcactttggaaggccgaggcgggtggatcacctgaggtcaggagttcgagaccagcctagccaacatagcgaaaccccatctctactaaaaatacaaaaattagcctggcgtggtggtagacgcccgtaatcccagctactcgggaggctgaggcaggagaatcgtttgaacccaggaggaggaggttgcagtaagctgagatcattccactgtactccagcctgggcgatacagcgagactccatctcaaaaaataaataaattaattaataaattaattaaaaaaatccacagactagaaagatccacaccaagttcaaaatactgaagggggaaagaggaaagggagacgactgagtcagtaatgttttatttgctttacatatagaaaaatccaaagcaaatatgatgagatattattaattctaggcagttgtacatatatatttctttgttatcctctgtagttttaacatcttttctcagttcagatgaaaaaatacatataattcttcatttaacttcaggaggtttataaacccctgaagcccatacagtagcattccaagaattacaactaacattgtcttgaaatgagtattagggagtatggtcaattttggatctatgtcaggttatttcaatgacagttgacatacagtcgcatcaatagtgagtcccactgactattgtgtaaagagccattaggggatatgtctcccaatgttcaatacatcttagctctgcttagccaccttttcttgtgttagcttttggtgtgaccaatcacccaaactcagtaacttaaataataaatgtttatactttcttatgattttgtgcactggcgtggcagttctggtctcagctggttcattcaatcactgtggtcagctagtggcttggctgggaatggatgatctagggtggcctcactcacatgtctggtagttggtccagtctcagctggggccatgggatggcttggccatgtgtctcttgtcacaacagtctagctctggcttgtttacatagtagtggtcacaccacagggttcccaagaaaagcaagggtacaagctccagggcacacacatttttcaacccttgcttgcgtcatgcttgctattatccccattggctgaagcaagtcacactgtcaagtccagagtcactgtggaagaggactgcccaaaggctcagattcagttccctaccctcaaccttttctgtcaactttcctacattgcgggaatacttggaggcaggaatagattgagtggtagctccagttttctctggctgatcccctgaacccctttgtttgacagaagccagcatggctcctgctctgtctgctgctgctttcccaagcaaggcatgaggaatcggagctgaagtccttttgtagtgatgaggctcagtctcattctaaaactgctgtcttttgttgggggaaaaaaagggcaaaaacagaagctaacaacaagaaggaaaatcattttctatctgctaaagggtgctttacaagaataacaaacattttacattaagtccaaagttagagagcaatgaatcatgccaaaccatgctgggctcgatggcctgctggacagaaaggggaatgcaggccttccaaggtggggacaatacttcttgctgcccaattctgcattttcgcccacctctgagctgtccatgtgaagaaagacattccacacacagacaaaaattcttttttttttccccttggttgaaagtcatgtcttttggactgtaagatggttctcaaaataaccctgtgtcaattccatattctgtgagccacagattttgctatctgtgggctcgtcaagacgtgaatcgagtaggattagtttagcttcgtgcccaggacttgtacaggacgtgaaaaattccttgacctcctgatctttcactttgactttctgttctgtctttcaatcaaaaatgtaaaaataagtaagttggagagaaaacaaatccctcaacttcagccgttgacaactcatgaccaatcttgatttcactgttcttatcttcccctggtttctttagaagcaaatcctagatagcataccatttcatccataaatatctccatattatattggctttcacatagagcaaagctagacactaactgctcattggactgaaagaagagatatactcagagaaccaaagcaaatagcttccctttaagttttaataggagtggctttgttttatagaacgctgtaggcatctccagccactgaggggacttcttcaagcttggcccagcctcatccacagaaggatctggcagtgatatcttggcattcatagtttcagtgtgcaggacagcattggttccccaccctacagtcccagctctacctaggcagtatcatatgtatcatggtaatggctatggaaaataatatccctccctccctgcctcccttcccctcttcctctttttagagatgaggtcttgctgtgttgcccaggctggtctcaaactcctggcctcaagtgatcctcctatctcagcctcccaaagtgctgggattacaggtgtgagccaccgcatgcagcctctttcttttttgacagggtcttgctctgccatccaggctgaagtgcagtggtgtgatcttgtctcactgtagcctcaacctcctaggctcaagagagcctcccatctcagcctcttgagtatctgggactacaggcatgaactgccatgcctagctaattaaaaaaaaaaaaatatatatatattatatatatatacacatacatatatatatatgtatgtaaaatatatatattttttacagggtctcactttgttgctcaggctagtctagaactcctggtctccagcgattctcctgccttggtggcccaaaatgctgggattataggtgacagctactgtgcccaaccttgtttctttcagtgaccaaatagctttaaatatagaatgtcaagatgagaagtatcctggagaccacttccagggtagtctatgaaattgtttgtgtccatattcattcttaagtgaattttttcctgggaaaaagattcataaatccccaatgtggttcatggtctccccaagtgaccctttaaggtccagggaactgtggtagcctgacctaggtctctcagttacttggcaagttaatagcagagttgtccctagaatacaagtctcttaacccacagttcaggaattatggtcgtaaacctgcttttactggaaatgtttgaaaatcaaacataatggtgtattagaagagaggttcaaagtggtaaatttttctgtgatcacaaagagaaatgcattcaatacagactccaaataaatatgtcagggacataaagtttttactttatataaataattgaaaacccattttcctggtgaggatacattgatattaattagaaaattagtatttaatagttgacataagaaattgctgggccttaatatctggactctggagcagatttctgtgctttgtttctatgatctagaactagggcttggggtgtagaaaaactgggatggccttttccttctagctctttctctcacacaccctcacaccccaaacccatcttccaactagtgtccttttctttccccacaaggcctcttgtccatcctctccttgaagcattcatctggacttggaaaggatgaggagagctggagaaggcaggagacatagtttgcacctgctgagaagtgaggaaacataagtaaggccagtaaaccaaagggagctctctcctcctcctcatcctcctcttcctcctcatcctcctcttcctctttctcctttttgtcctcctcctcctcttccctaaggctctcttgatactccttggtccagccctgcttagcaactctccaagcaagcatggaggacaatgtggcaagcattgtctgctctatggagacaaggagacatcatcctctttgtttggggctatgagtcaagagtcttcagttttttgcagcagttgtatttaagtgtcagttgacaaaagtgaattttatatgctccaattaagatgtagtgaattgtgacattctaccacttgccaagtcctgtgattccacctctgcagtgtggctacactcacctatatcagctgaccaaattcatccacttggtgtttccctttcaggcttagatgttctccatcttcagcttgtgtctggctggaatcaattcctccccctctccatcccgtcagtctaattcttcttttaaaccagccttaactctgccttcttgagcctcatcattgaaaattacctccttggcaaggtatggtggctcacgcctgtaatcccagcactttgggaggccaaggtaggtggatcacctgaggtcaggagtttcagaccatcctggccaacatggtgaaaccctgtctctactaaaaatacaaaacaacaacaacaacaacaaaaatagccaggcgtggtggtaggcacctgtaatcctagctactcgggaggctgagacaagagaactgcttgaacccgggaggcggaggttgcagtgagccaagattgcaccactgctctccagcctgggcgacagagtgagactcgtctcaaaaaaaaaaaaaaaaagttatctccttcttcaaaatctcatgagcactttatctataaagatcttataattgctaatgtgcattttgtctttccttctgatcagttacttttcaggtagaatcctttctcgttcagctttgtatcccagcctctcctctnnnnnnnnnnnnnnnnnnnnnnnnnnnnnnnnnnnnnnnnnnnnnnnnnnnnnnnnnnnnnnnnnnnnnnnnnnnnnnnnnnnnnnnnnnnnnnnnnnnnnnnnnnnnnnnnnnnnnnnnnnnnnnnnnnnnnnnnnnnnnnnnnnnnnnnnnnncaacagggcgaaacctcatctctactgaaaatacaagaattagctgggtgtggtggtgggcgcctgtaatcccagctacttgagaggctgaggcaggagaattgcttgaacccgggaggtggaggttgcagtgagccgagatcgtgccattgcactccagcctaggcagcaagagtgaaactccatctcaaaaaaaaaaaccaaaaacaaacaaacaaacaaacaaaaaaacttaacaggaggcagggcacagtggtgcaacgcctgtaatcccagcactttaagaggccaagggaggcagatcccttgagcttaggagttcaggaccagtctgggcaacatggcaaagacctgccaatacagaaaatagccggttgtggtgttacacacttgtagtcccagctacttgggaggcttatgtgggaggattgctggagcccgggaggcagagggtgcagtgagccgagattgcagagagagaccctgtttcaggaaaaacaacaacaaaaaaccccaaaaaacttaatgggaaaaatgtttgtatttctttttgttatgcatcagtatacaatctttaaaactacccccaggtcttttccttgagggacaaaagtaggatgcagaactgcctacaaggtggagcattcttaaaatctactccaaaaaactgctgctcgtgggtactcagctgatagaatgaacaggagtgaatgaataggtgaaagcaccctgtgatttgaatgtcgcaagcctttcattttcgttggaaccttgtctgatgtgtgtcactccccactccgttgtgcttgcccttcggaaagatggaatggtgaggacagagaggagacaggtgataaaaagacacttaaaagggcacctgaaagccaggtggcttgtccctggaaggcagtagaaagcaatctgcagtcatgatgcctttcttcactcagcagcagctataatgttgaaaatggggcaaacgccttccccgtgcaactgtttaacaaaaggtagttctcctagaaaacagaatctgttgtatatgttgccagtgattttcacaagtgtagatgcctaagaaataggcaaatatgctgagcgtggtggctcacacttataatcccagcactttgggaggcctaggcaggtggattgcttgagcccaggcattcgaaaccagcctgggcaacattgtgagaccccgtctctacaaaaaaataaacgaaaattagccagacatcgtggtgtgtgcctgtagttccagctacttgggaggctgaggtgggaagattgcttgatcctggcaggttgaggctgccgtgagccctgatcatgccactgtactccagcctgggtgacagagtcagagcctgtctcaaaaaaaaagaaataggcaaatacaagagatggaaaaaggaatcgaaagaattgccatgggattgcgcattagacaatttgctttttaaaattgcatgtggttttgaaggacaggttgaatttggatgtttaaaatgcttagtgaaactaagactggcagggtcaaactgtgcgcataaaatctttgttctggaactcaagtgaaaaattggcagatttgcactttttgagctttttagagtccatttccagctccaggtggctgggtgaagtatcctaagctctacagaagggtaaaagaaatagcctcccacgtgagtggcaggagtaggtaacctgtagtatctggaaagatatgtagatcaccaccagttagaacatttggaaggaggaattgccagtggcttgtagacaaggaatggaggagttgagacaggcaaggtaaattggggccctcctgccaattggaagtttttgagtgatatttttaatatttattattccatcctccttggttggaaagtcacgacggagagggacactgtcatgctcatggtttgtgtttgtatttctggcatggggtagaattggcaactttgctgaattgaacaactgttccccactagaccaaaagtgcccagaggactgaaaaccctccaattcaacttggtggcagcaaggcagccgccagtgaatgagtgattgatgagagccagcggattaaaggagacaactaattgtaaactggaaatagttttcaaagataaaagtagccccctcagataaaaccactagggcttccttttgagttttcttttcacagaacaggatattagtggttcggtggggctcctgcaggagggggtagctgtggagggaagctggtaggctgggaaggtttctacctgtttctcactcctttcctactaacgccccttcagttgagaggctaggtaattataattacctgagatcacacaaccagtcctgacctgtccccacaaggggtggagctactctttccaggtcaaaatggaaaccaaattcaccactatccgttcaaaagctcccaactccgaacaaagagccattgcaatggtgcccacctgggcaccattttggagcctgatatttattatcacatttaggttcacatgccaggtgcccacctggcatggaggcagcagtctgttcgagttctgccacctgaggacacccaggcctgtgaccccaagcgagggcttttctgacgtttgtgggggagtggttaggctgcttttgctgatatgaaagatcactgctagattcatggccaggataagaaggttttccttgttaggtgatacggactttcagaatgtaaaatttcctgaccaaggttgtgtctgttctggtttaaagacgaggatttgctgcctttgtttttccttaagccaacgtgccatccacctgtgctagaggaatctggtattgctctcctccaaaggccaggacggtctcaaaggagacaggctaatggcttaattgttttgtttattctgctccccacaaattccagtagcttcatttacattcagagaacttttttcaactgtattgtcatttcccttggttttgaatggctcttaatgtttgcccttcatgttgttttgaaaggttgatcgagccgttagtgaagggtgtggctttctccaaatgggggtttttcttagtgtgtggtagagaaagtgagagtaattttaaaaataaaatatgcacattttttctatctgtacacacaaactctagattattttggagcctatttatgttcacatgctttaggttttgggagttaaaagattaatgtgtacaagggaatggtgatatttaacaggacaaaaatttcgcttttacagagctgtggtttgcttttcaaaatgtagaggtttctttacctttgcgtttttttctttctttcttttttttttttttgagacggagttttgctcttgttgctcaagctggggtgcaatggcatgatttcagctcactgcatcctccacctcctgggttcaagtgattcttctgcctcagccttccgagtagctgggattacaggcgtgcgccaccacacccggctatttttttgtatttttagtagaaacggggtttctccatgttagccagatggtcttgaactcctgacctcaggtaatccacccgcctcagcctcccaaagtgctgagattacaggtgtgagccaccgcacctggcctgtttcttcacctttgacaaagaatccagtataagactattctggttcgtgttgtaaatggatttttttttcttttttttcttttcttttcttttcttttctttttttttttttttttgagacagggtctctatctgtcacccaggctggagtacagtggtgccatcacagctcactgcagccttaaactcctggggtcaagcaatcctcttacctcagcctcccaagtagctgggactacaggcgcgcaccactacacctggcttaaatgcatttttataattttagtataaacaagacattttagattgaataactttgtaatgtgctaggacagtagtttttaatgcaggtgggatccaacttttgagaaagggaaatgtgaaggttgaagaaacttaaaaatcaactgctgttggctagatctaggtgtgctgacttccttagaaaagaaatgcttcctttccctgcaaaccggagtttgggaaatttagagctaggaaatcatgtggtcgatcttaacgttataaatcactcagacaaatacaggataatgctgttttcggaagtgcttgtgattgtacaggattacatggtgataaagagttttcaatggctcctccagtttctgagggagttctgtgctttgctttcttggtaattccttctgcagaccttagagcctttgaggggggctgggtatgcttccgtgaatttaacagtttaacacactgttgaatagaagagaatctgctattggaactagtgattactaagaaaccacttctatatcatccagcatttgtatctactttaaagtacatattagtattttccttggtttacagatgaggaaaatgagttaggtaccgtgtttaaggtcacccatctgaaaagtggcagagaggggatttaaactcctggtcatctgaatctaaggtctgcttagaagaggagctgtttgcttctagacacatgcgtatttaggttgtgggtccacggactaatagcgtgggcatccctgggatattattagaaatgcagaacttcaggtcccacccacacctgattgcagatctgtgttttaacaaggtctctagatgattgcaaagcactacggcacagggacacttccccagaggaagtgtgatggccgccctccaggatatcatcttccaaggttagggacgtgccaaatatcccaagctttcagatatgcgactcaatcatctctaattatcctgctcaaccaaaaattaaagagcgattcttccaagtggaatcgagggaaacttttctcctggacaattctggagggagtccagctatccttaaggagatgcacagaataggctgttgccgacagcatgcttggaaaacctatcaacccggggtgcctcttccacggctgctgtccatgctatactttctcccattactgatccctctgaactagtctatcaaaccttctcctaaagagggtgagaacagattttgtcaggccagagaggaagaaagagatccagaatggggacgatcaatagcatgaaaatagagaagggcattgaaaagagcccagccttcagaacactccagtcctggcgctggagaactgcaccttaccttttactcctacctggttttccttttagaattcccccaggcatctatgctggagacagtagtgtctttgtctgttgttcccatccctgccttgctcctgccatttccaacgtcctgtgagtatatcttcacaggactcccccttccttttcacagtggccaccctagtttggatgtgcattgtcttacactgggaacattataagcgtttcttaagtggtcttcactcttatcccccggtaattcacagaaatagcatcagcgcaatcatcttctagtaacacggctttgcatctgtcactcttcctcaaaaactctcagttcctactgggaacagtctaaagaccaaaatgcattacggtctaaattaaaccaattactggttgcatttatccaactctattttccagtagtccttctcaaataaattccgtgagggcagcctacatgccttgttcctgctattagctcctagcacagtgcttgtacacagtggattttcactaaatattgattgaatgaacgaatgaacttattctcaggtttatgttttatagtctgcctagaatacactccttggtcaggccatttcctgtgactagatttcccttcccttttttcctgttcatctgaatccttaaaaaaccaagtaaggccgggtgcggtggctcacacctgtaatcccagcactttgggaggccgaggtgggccgatcacgaggtcgggagatcgagaccatcctggctaacacggtgaaaccctgtgtctactaaaaatacacaaaaaaattagctgggcgtggtggtggacgcctgtagtcccagctactctggaggctgaggctggagaatggcgtgaacctgggaggcggagcttgcattgagccgagatcgcgccactgcacgccagcctgggtgacagagcgagactccgtctcaaaaaagacaaaaaacaaaaaaccaaccaaccaaacaaacaacaacaacaacaaataaagactcatttcctggaagcctctgatttaactcgtggagatcattcccttctccaaattgtggcccttaccatagagttatttatttgtgactaaactatgtcatcttgcattgttatctgttttcacacagtctcttacagcccaagtagactgtaagcctcttgagatcagagataatttacatttctttatatttttcagaattcaccatctttccctttggccttcccacattcctgtacactctcgacattccctggttatctggcagttcatattggggaattatggttagctgtggatcaggcctcctctccccactttcctctcagtaatgcatgtagtctctgagggcagacactacattctcctgtgtcttttctggtttattcaatgatagaggctgtaccctttatccttttcaatttcatctacattcttttccttctcctgctcagttcttggaactcccatttctgagtgtctacgactacagtcatggtgaatagaaggtaatgaaactgtgagtcagtgtatcctctagctggagtgtgaaggtgagtcagcagacagcagcagtggatctcttccaccctgaggaaaggcaggagcctgcctggtgatcagggaaggaggccctcctccccacattgtttcctggaactgagtagaacaaattacttaactgtacttcagtttcatttgttaaaaaatgaagtaagaatagcttccattctcttttcattcaagtggtgatgtattgacaattaataagaaaattataaaatgccttagataccaccattgggactatgtaacgcaccacaacctggttgtggctgaggctctgttctagccacccctcctttctgactaccacatcgccctaaagttagaggcaataatagagttaccgcattagtgtttttctaacaaacctgttcaagtcctggctcactaaattttagggaaatgatatcatttctctccagtcttttaatagattgtctttgaaagagttgcatgttgcctgttaaggaaatgcttcagttggaaataattgagtaaggttagaaatggttcaagaaaacagacacatccctgcttgacctgctcagcctcaaactttcatatctcctagtttggggagggatggatggcagatgtagagtgcctcagtttttgttttgcagaaagttatatcatcatcatgtagaacagacatcacagaacgaaattaattagtaatgcattcactgaatttgggcaggatagtttgcttatttgaaaaaattcttggcaaggatgaggatgatttctcatcatcctcctccctaactcgctgggtaatttaaagaaggtttgtgagttgaaattttctgaatagagtgggttcagtttacccttttttatatggtagattgctaatagtgcattactgggagtggaggaaagacacccttttctgccttaaccctgagctagaggaatcacagccttgtctagaagctaaagacataattatatccatttcatatgcagtatgacaaaatcattagaaaattataattgcaaatagaaaaaatataggaggcatatgcatatatacctaagatgtttatatgggaagttatgggaggaaaatgaaataattactaattaataattactattaataaggtttcaaatgatccccttttttccccttgcctgggtgtccttccatcatgtccaagtcttagatcagtttctagatctaggctcaacaaaattccctcccctggacccccaagccttcccagatagtcaccttcctcttccatatgtccatggcacctagtttgaaatgttcttacctcatgcatcatgttctgccttgtgttagaccctttaagcttttgtgtctcattaagatattgaactcggctgcgtgcggtggctcacgcctataatcccagcactttgggaggcctaggtgggcggatcacctgaggtcaggagtttgaaaccagcctgaccaacatggtgaaaccccatctctactaaaaatacaaaattggccgggcatggtggcgcatgcctgtaatcccagctgctcgagaggctgaggcaggagaatcacttgaacctgggagccggaggttgcagtgaactgtgatcgtgccattgccctccagcttgggcaacagagtgagactccatctcaaaaaaaaaaaaaatgatattgaactccaaggagcagaagttgtttctgacatatagccaatggtctttatccagctaaaattcacccgtagtgctttttaaaaatgacaacccttgggcaccatcctagaccaaaaggattcagacacaactgtattacttttcaaagcttcctggatggttcctaaaagcagcctaggttgagagccactgttgatggatgtttaagcattgtgggctatgccataatttgatgcaacaccaaatgcaaactgatcaggatgtatttttgccatgctgcaacacaccatgtaacttaggaagttttgtggttttggcgtttttggttagggagggtattatttaatacagctgacttgaataaataggaaactagttcccaggggactttacaaaaggtaagcctttgtgtgactagcacctggggggtttcatcgctgtcaaggctatggtagttttaccacctgcattctcttacctcctccccactgtggcattgaccctagaccagaggcctccaaaacatggcgaggcatcaaaaccacctgaggaggtgattcagcaggtttgggatgaggcttcaaaatctgtttttcaccagggttccaggtgattccagtggaaaaactgataggagagccgctgctttacagctgtgtggaattgaaaatgacgtgggtcttggatcataagcagcagggtgtttttcttttcctagattgtcttccttaaccccaaattatgtaattacatacatattttctctagaacttttttgtatttttaaattttagctccttatgtcacccgaaatttacttttctggtgtgaggggtataattttttccaaatgcatggttagtggtcttaaaaataatttattcactggtgcattctttgtctcctgttgtgaagtgccacctttatcttatgttaaattcatatctatcatatgtttctagcctcttctgtttccttgatccttttctttattcctaaaccagttgctagtaccacattctataattactctagtttcggaatatgttttaatttttatttttggcaagactttactaattaaattcctttttaagtgagttcttggcaatttatactcatttactcttccagataaaatttagaatcaatgtgtcaaagttccataagaaaatctctttggaactttggttggagtagcatgaaccctctagagcagcagtccccaacctttttggcaccagggaccggtttcgtggaagacagcttttctgcagcctggggtgtggagtggggatggttttgggagaaaactgttccacctcagataatcggtattagattctcattagaagcgcgcagcctggatcctgcgtatattcggttcacaatgggctttgtgcttctatgggaatctagtgctgctttgatcttacaggaggcggagctcaggcggtaatgcttgctcaccagccactcacctgctgctgtgcagcccggttcctgacaggccactgccagcacgggtccatggccccggggttgggaacccgtgctctagagcactttgagaaggtgaacgtctttgtaactgatgccttatacccacagacatggtgtccttccccatcagcccttctttcaggggcctccattcatctttatgcttttctttacacaattctttcacttttttttttttttctttttgggagacaaggtctcgctctgtcacccaggctggaatgcagtggcatgatcagggctcactgcaacctccacctcctgggatcaatcaatcctcccatctcagcctcctgagtagctggaactacagctgtgtgccttcatgcccagctaattttatttgtttattttgtagagataaggttttgccatgttacccaggctggtcttgaactcctgggctctagtgatcctccaaaagtgctgggattacagtcgtgagacaccatgcccagccatcttccccatttcttaagtttattactggcattttataacccttgttactgatttgaatgggatatttcctaaaacattgtcttttgaaaatattaataattttatccatagttcttataatttaatggatatcatgtcataacccacagaattacaagaatctccctcacctgaatatagagggattgtagcattttgaggcattccattttttactcttgcttcaaaaacatgagacaaaacaggttctcctcaagtgtcccagtgcactcttcttcattaatagagtggcctgggctatggggccgtcattcgtaggctctttggcagggttgcagaaggagctgagtctgggctgaatgtgatccatggtgggacacagcctgcagttcgtgcttctgaataggtccctggtcgggggctggatgttcagtgatgcacctcgtcatcctgaggtcaagaaagcacaagtggaagaaggggaaagatgtgttaattctgcctagctgaatgagggattcagaagtgggagccagacctttgcttacaatctcagaaggaaaaaatgttgattccaggaatcaagtaattctaagaaccaattatataaaaagtgttttgcaaactataaagtgatattcactcacatgcattcggaagtactacctccacgtgttttagctgcatttgaaagtcttttagaaagaaagcaatgcaactgctggataaaacctcatccctctaccccagaattgttgtcacagctttaaggaagttttatgtgaaagcagaggaaagtaacagtaactctttaatccagacatgtgtctaaaccatggataactcacagaaggccttagagactctgagaattggtaaatattctatacatccttagcatccacaggctaaatacccctccattccctgagtcagggcatgccagctgttaacaatgttctattcctggtacctctctctttgcatttccctgtctttcctcaatcatcttgtatcacaggaagtataaaagtagttaggcagttctattttttgacagcagatgaaaagccaaagttaaaggtcaatgcttaacccactggcttctaataagctggtaaagctgggcaatatagtaagacccctatttctaaaaacatttttttaattagctgagtgtggtggcacatgtgcctgtagtcccagctaatcaggaggcagaggcaggagaatcccttgagcacaggattttgaggctccccaagagaaagctgaggctcagagagggtaatgtgtggtaagagttaaactctcagtcctgatacctttgcttttttatgctgtatttcttctgcaatattctgcactttgcttaggttttttttttttctccctctctcatttaaatacttcaactgcctgtctgatctgttagccattctgtgtaccattatctgattgcttttagaaaagagcttccagtgggctcagtgtgtttaatctgctgtggcttctgaagtccctcatcttcagggagaagtggctcttctgtctacccgattggtcaagcctctttctttcttgatgttttttcttcataaaaagttaggcatttaaaattttttctgtttgtctttctaaataaagtacttcaagttattttgaaagctctggtcatatcctatcaatatgcaaacagatgagttgatttttaaaaaatgacatgctggtttgagttcttggtcttttagtacctattgattctagtgcctattgactggctaatggctgcttgtatttattgaatctaaatattatgctctttgattggtggtgccctggcagcactccccgtgggcctgtggggtggagaacacgggaagagatacctgcttggggaaaggtgggaggtaagagtgggaaggactttggtggttttggtgccagcttagccacagtagaataaagtactcagtagatttctaacatttctgactccagaccctggttccctgatagcatctctggacctacctgggcccagggctgtcctgaaggaaaggacacaagcctagctggcttcactacttgatgattgtagagccctagggccttgagggaacataggccagataattatacaggccttgggcaagacccagtgttgtgctggcttcaggtcagacctgcagtccccagtggtggtggccataggggtgcttttgtcacccttcccctagctccacacatctcagcacagagagcaaaactctgtttgggaaaaagtaaaggaaaagaacaagagtctctgcctggtaatccagagagttcttttggatcttacacaagaccaccaaggcagtacctctacgagtccgcaagaactacagtgttactgggcttggggtaccccataatgcagatacggctgtggtgtccacaaacttagatcataacaaccaagtccctttgaatacttggaaagccttcccaagaaggatgggtacaaacaactccagattgtgaagcctacaataaattcttaactcttcagtgcctagacacccatgaatatccacaagcatcaaaaccatctgggaaaacatggccttaccaaatgaaataaattgaccaggggtcaatcccagagagacagagatatgggacctttcagaaagagagcttaaaatagctgttttgaggaaactcaaattcaaggtaacacagaggaggaactcagaatattatcagatacatttaacaaaggaattgaagtaagttaagagaatcaggcagaaattctcgagctgctgaatgcaattgacgtactgaagaatgcgtcacagtctgttagtagcagaactgatcaagcagaagaaagaattagtgagcttgaagacagactatttgaaaatacacagtcagaggagacaaaagaaaaaagaataaaaaagaatgaagcccacctacaagatctagaaaatagcttcagaagggcaaatccaagaattattggccttaaaggaggtagagagagagagataatggtggaaagtttattcaaagggataataagataacttcccaaacaaaagatatcaaagtttaagtacaagaaggttatagaacaccaagcagatttaactaaaaggaaattacctcaaggcatgtaataacaaaactcccaaaggtcaaggataaagaaaggatcctaaaagcagtaacagaaaataaacaaataacatatgatggagctccaacacgtctggcagcagacttttcagtggaaactgtacaggccaggagagagtggcataaagtgctgaagcattaaaaaaaaaaaaagagttcactctagaatggtatatctggcaaaaatatcctccaaacatgaaggaaaaattaagaccttcccagacaaacaaaagctgagggatttatcaaccccaggcctatcctacaagaaatgctaaagggagttcttcaatctgaaagaaaaggatgttaacaagcaatgagaaatcatctgaaggtacaaaactcactggtaatagtaagtacacagaaaaacacagaatattataacagtataatagtagtgtgtaaactatacatatctcaaatagaaagatgaaaggatgaacccataaaaaataataacttttcaaggcatagacagtacagtaagataaatagaaacaacaaaatgttaaaaagtggggagacaaaattatagagtttttattggttgtctttttgctttttgtttatgcaatcgatgttaagttgtgatcagtttaaaataatgggttataagatgttatttgcaagcctcatggtaacctcaaatctaaaaaacatacaacaggtacacagaaaataaaaaggaagaatttaaaatgtgccaactgagaaaatcaccttaaaggaagataggaaagaaggacagaaggaagagaagaccacaaaacaaccagacaacaaataacaaagtggcaggagtaaggcctcacttatcagtaataacattgaatgtaaatagactaaactctgcaatcaaaagacatagaatagctgaatggataaaaagcaagacccaaggatctgttgcctacaagcaacacacttcaccaaatcaaatgaaaatggattaatgacctaaatctaagacttcaaactatgaaactactaaaagaaaacattgggaagactccaggacattggtctaagcaaagattttttggacaaatgggatcacatcaagttaaaaagcttccttccacacagcaaaagaaaaaatcaacaaaatgaagagacaacccacagagtgggagaaaatatttgcaaactttccatctcacaagggtttaatcaccagaatacagaaggaactcaaataactctgtaggaaaaaatctaatctgattttaaaatgggcaaaagatatcaatagacatttctcaaaagaagacatacaaatggcaaacaggtgtatgaaaaggtgctcaacaccactgaaaatcagagacatgccaatgaaaactacaatgaggtatcatctcacccaagtaaaaatggcttttatccagaagacgggcaataatgaatgctggcaaggatgtgaagaaaaggggaaaagggaactctcatacaccgttggtggaaatataaatgagtatagccactgtggagaacagaagggcggttccttaaaaactaaaaacagagctagctaccttatgatccagcaattccattggtaggtgtataccttaaagaaaggatataagcatatggaagagatagctgcactcccatgtttatcctagcactattcacaatagcaaatatttggaatcaacctaagtgtccatcaaatgatgaatgaaatcattcatcacataaagaagatgtggtacagatacacaacagagtactaatcagcaataaaaaagaatgaaaccctgtcatttgtcatttgcaagaatatgaatggaactggaggtcattatgttaagtgaaataagctaggcacagaaagacagatttcatattttcttacttatttgtgggagctaaaaattaaaagtattgaactcatagagatagggaatagaatgatggttaccagaggctgggaaggagaactggggagacaggggttatggttaatgggtacaaagaaatagttagaaataatagaatgaataagagctagcatttgcatgctcacagtaacacgtatactaaaattggaatgacacagagaagattagcatggctcctgagcaaggatgtcatgcaaattcatgaagtgtattttaaatgttattgaaaaaaaaaatctagtatttgctagcacaacagaacgactatagtcaataataatttgtgcatttaaaaataactaaaagagtattactggattttttgaaacacaaaggataaatccttgagggtgtggataccccattttcgatcatgtgattattacacattgcatgcctgtatcaaaatatccatatacacctacttatatatgcccaaaaattaaaaattaaaatgaattttatgttctttgaagatttttctttttttcttttttttcttttttttttttttttttgagatggagtctcgctctgtcccaggctggagtgctgtggcgggatctcagctcactgcaacctctgcctcccctgttcaagcttttctacctcagcctcccgagtagctgggattacaggtgtgtgccaccacgcccagctgatttttgtatttttagtagagatggggtttcaccatgttggccaggctggtcttgaactgctgacctcgtgatcctcccgcctcagcctcccaaagtgctgggattacaggcatgagccaccatgcctggctgaagatttttcttaaatccttcctgattttattcctgaataaaaaccaaatattataaagttagttttactttggacattaaatgtccaagcaaattagaaataaaaaatagtaagaggagtaatgaacttagaaacggcagttatttgcaaaggcaattgtaaacatgtcatttgatgctactgttatttgatactacacatggtaaaaacacagtgagtgacgtcatagaaaaccaactcaagtattactttttcctgacaattttcctcctccttccaatagtccatagaaattagactgtctagagaaagtaaaacaaaaacacagcacatcacggaaatagaacctcaaaaaaaaaaaggttaatgtgaaaagtttgccttatttaatttaacgatccggctgggtttaaaaaattgctattttttttgagacaaggtgtcgcttgtcatcctggctggagttcagtggcacgatcatggctcactgcagcctcgatctcctgggttcaagcgatcctcatgcttctcgattataggttgcacaccaccatgcccagccaatttaaaaaatattttgtagaggtcagatgcagtggctcatgcctgtaatcccagcactttgggaggccgagacaggcagatcacctgaggtcaggagtttgagactagcctggccaacatggcaaaattctgtctctactaaaaatacaacaacaaaaaaattagccagatgtggtagcggacacctgtaatcccagctactagggaggctgagacaggagaattgcttgaacccagaaggcagaggttgcagtaagccgggattgtgccaccgcattccaggctaggcgacagagcaagactctgtcaaaaaaaaaaaaaacaaaaaaaagtatgtatatataaaattttgtagagaaggtatctcgctatattgtctaggctggtctttaactcctgggctcaagcagtcttcaggccttggccgcaaaactgctgggattacaggctggagccaccatacatggactgaatttttaaaattcttagtagggagaccttttaattggaagttgactataggaacgagaaggaaactgggtgactgaacaaccctattaggagagaaacacagatgaatcaacatgaagaatgtctgggatgggagcctaacatgcccagagctgcccttttgtgtctcttgggaggggctgtgttctggatgaaggcagtcaataggaggctggactactgtgaatatcggggtagtgaagttgagaaataccaattctacagtatggagtcagttaggtcaaaggttttgtacgtcaaataaccaagctatcttacatttctgtctccatttggaaaccagaaggtcagtcaaatatttggttagaaaaccaggaacaggaaaacatctcttgttacacataaaatctgtatccaagcactgtgtatcattccacaccatccattagaaccagtggagaggaaggctctgaaaggtttctgtctattgaggtttgataaaatggaagagtttagtacccattattactacttcaagttgaataaaatgtgtcattgacattttctttttttgagacagagtcttgctctgccacccaggctggagtgcagtggcacaatcttggctcactgcaacctctgtatcccaggttcaagcaattctcatgcctcagcctccccagtagcagggattacaggcatgtgccaccacgcctggctaatttttgtatttttaatagagatgaggtctcgccatgttggccaggctggttttgaactcctggcctcaggtgatccacctgcctcggcctccaaaaatgctgggattacaggcatgagccacagcgcccagcctgatgttttatttatagggtgcactcttcattgtttaaatgtctatttttagatgttgatagacctttgtaggtagtttcacccctgtctttggttctcttgcactgtttgccccatatcattctaaatttttacccaaatgggttttcaaggaccttgctcctcctgcctgtgggaagtggttacaggttagcaatagttgaaactcccctactgtttttcccagcttagcagggtggttggagaccagccccaatactcctgagagcccatagagacagtcctggctcagcactgaggacatcttgcaggcagggttggctgagtgttttatggagcgagcttaagaggagatgttctaaaaccagagaggaaacatttttctctgttctctgcaattcagcaggtgatatcccttcatggatttataataaacacagtcctctcattgaccaaggttgaaaaactcagaaagtttgctcagcacagatctgggagtcaggaacgtactatgtgctgtggaagacatttcaactcctctttcaagcaaaaaaaaaaaaaaaaaaaagtcaatactgatctagtttatatagctattataaaaaattatattaatgaaaatagaaattcatttgtaagtagagacagctaccaaattcctaagcaatctattcatttttgttttttttttagacttgaacactttttcttgccttgcctcacaatgcagttgtcaatatagggccactttagttacacctattacctgactctgcaaagaccacagagcttatttcctttagaaggattttgtttgattaatttacactcttcgctgacatttctcagttgagtaggaggaaaaaaaggagtttaatttaaccatattagccacatcatggacagggaaatgtatggaggatgtttaagtgatttgccttattgagtaaagatatatctaagcttagattttactttgtcctataagaactctgtgagcgagatttttttttcttttttgagatggagtcttgctctgttgcctaggctggagtgcagtggcacgatcccagctcactgcaacctccacctcctgggttcaagcgattctcctgcctcagcctcccgagtagctgggattacaggagcaaaccaccacgcccggctaattttttatacttttagtagagacggggtttctccatgttggtcaggctggtttcgaactcttgacctcaagtgatttgtctgccttggctgcccaaagtgctgggattacaggcgtgagccactgtgcccagccgagcgaaatatttttgactatagtagtctgaatgttcttttaagtttcataatgtaggctaaagctctattttctgccaaatgcgaaattgtagaacagaataaaaccatgtgctttatattatacgaattatatctgatgaatgttcatgtttagaaaaatcacaatcaagctcagcagttgtagatatggataacacaactccattcctgagcagagcaggtttcatcataattgcctgccttatgttttgttttcatacctgtagtaaacttaggaaacttaaaaattattcaatagaaatttagagtgtggagccctggtttgaatcctggctcttgtcatcttaatcagttccctccatttttacatctgtaaaacggaaatattcataataataaaacacctccataagaatcaaatgaaataaagtagaagtgctttgtaaaagataaacaattcaataactgtacaattcagtaactgcaaggaggtattatataagcatagatttttttttaaaactaggagttgtcaacccaaatgtccatcaatgatagacaggataaagaaaacgtggcacatatatactgtggaatactatgcagccataaaaaaggatgagttcatgtcctttgcagggacatggatgaagctggaaaccgtcattctcagcaaaccagcctaggagcagaaaaccaaacaccgcatgttctcactgacaagtgggagctgaacaatgagaacacgtggaccagggaggggaacatcacacactggggcctgtcagggggtggggggctaggggaggggtaggagaattatctgatgtagatgatgggttgatggatgcagcaaaccatcatggcacgtgtatacctatgtaacaaacccgcacgttctgcaaatgtatcccagaacttaaagtataattaaaaaacaaaacaaaacaaaaaaagaccaggggtgtactatgtgaattactggaggtatcagagaattctcagatgatccaacacatgtccaaaattcaagtactattaaaaacacataattttaaaaataaaagatacttatgaaagcctgactgctagttttaaagggacataaataaaccttatttaccttatttatgtatgtccctttgaatctagggttttttcttttcttttttttgagacagcgtttcactcccatcaccgagactggagtgcagtggcatgatctcggctcactgcaacctccatctcctgggctcaagcaattctcctgcctcagcctctgagtagctgggactacagggccacgccatcgcacccagctaatttttgtattttttttagacatggcgttttggcatgttgtccaggctggtctcaaactcctagcctcaagtgatctgcccgcttcagcctcccaaaatgttgggattacaggcctgagctactgcactcggcctagtttttttttaattccagaaaaagtttcaagatttttttttttttttgcttttgtgttaatattttgggtgtagtgggagagggggtagcacacttgagttgctgcaggacttgtttttttgtgtgaccagagagagcccacagcacacagccgggttctcattggaaaggcatcagaacaagtgtgtgcagacagcaccgcttatagtccgtgacactcattcctccgcatgaatcagggccacacatggcttcagatgatacaggttctttcctgacatctcaaggggagtcatttgaatgcgtccgtgtctctcccactacctctcaaaatgccggactaagttaattggtaaataaatgctcaggctgcttagcagtggcctatctctgaggcatgaggtctaatatagtttaaatgtaagtccatcgtggcctccaagtagctaggaaaacaggtgggggacttcaaagagatctgagagcaagcctggccgggtctcttgtacttttccagccctggcttatgtgtgggacaatggtgaaaagcagcccttgaggtagaaccaagtgggttttttttttattcatattcggcacagatttattgatgcagaaaacatgctctcctgatgtggccacagaatcatcacttgcttctttcaaaatccgtaaaatcttgcattctgtggtatttggcagattacatctcatactgtagcagcctgcgcttgccagctgaagtgtctgaaagtagcttggagtcgttttcacactctttgatgctagtccaccttttactacataccaaggatagtacatatatccaccaagtggtgccaaatcttgttctttattcttcttaaatttgaacgtcaaaattgcactttaataataaaaatataaagccatgagctatgcaaataatgaataaagattattctgagtaggcttagatgccacaagaatgcccttgtttttctctttcacggtttgacccagtgtggtgtgaatgttctctttgagacaatctttgtgttaaatctttacactaataaatgtgttagaacttcttcagggatattcttagcgaggaggagttggtggatgtgttttttgcaaataggcttcctttgtctgcttggcaattctctatgaggtttctgaaagtgtgacctgtacgtgagacatctaagtggatggagcaaaatgagggagacatatatgccagtctgataagtaaatcattcttgtagtcagtgtggaagagttggcaaatttctctctgatttccttctgtttttgaccctgccaggctgaacccaaagacccagcattgtgactggaagggcctgcgaaagaaagcccttgccaagtgatctctgtataatcgtctttcagagacttaataagctttggagaatatttggatgaagttggcagttttattgataccatctgattctactttggtcctgtagcagtttctgccactttgtcaccagtggggggaatatgctgttaccataatggaaaaggaggacatttggtagcatttttctgtgtttatgtcaggagtcgtctaaaatggtcattttttttttttttaagaaaaacaacatatgcgtacaaagtaggtgtatatatttatggggtacatgcaatattttgatacagtcctacaatgcataataatcacatcaggataaatggggtatccatcaccttaagcctttataatttctttgtgttacaaacattccaattatacttttagttatttttacttatttatttattttgagacagggtctcatttggttacccaggctggagtgcagtgatgcaataatcatggttcactgcagccttgacctcctgggctcaggtgaccctcctgcttcagcttcctgagtcgctggaactacaggcgtgtgccaccatgccaggctaatttttaaagtttttgtacagatggagtgtcactatgttgcccagccgggtctcaagcgatccttccactttggtctcccaaaacattgctattacaggtgtgagtcattgtgccccactgacgagaggttcttcatatttcttttatatccactgccacaaaactgagtgcaattggtctattcagtcaggaagtcgcttacctttcatgtgcttccctattacctgggcatatttccagggggtttcagaggaagaagtagctctttcctatgaggatatatgctggttctgaagtgtttacttagatgcatagtggaagctcaaaaaatatttactgaactcactcttgtggtttagctttcaactataaacataggaataaagggagaaaaaagcatgaaaaactagaagctgaaagccaggcaggaagagaatggatctagaaagaagtaggaagtccatttgctcagaggaaggatacccactcaccaatgggaaataggtccagtgttgtgtggtagggttgtgggtagtagtagtaatttcacaatgggtgtgggaggttggtgagtagatggactagattcaaaagtagatacctcgctctcacctatagcctagcagtttgggaggccgagacaggaggatcgcttgagcccagaagtttgagattagcctggccaacatggcaaaactccatctctacaaaaaatacaaaaattacccaggcgcggtggtggagtgcctgtaatcccagctactccgggggttgctgtggtggaggatcacttgagcctgggagttcaaggctgcagccagccaagattgcaccactgcactccagcctgggtaacagagcgaggccctgtctccaaaaaagaaaaagaaaaagaaagaaagtagatagtgatgaagctggatagttaaaacagaaacttgaaaagcaagatgtggaactgggatataggatttcagagtttaaaagaaatgtgacatttcttagtggattgtccttcagttgtgtttactaagcaactgtcagctagtgagattactgtgtatggccaatccagataaataagacgatcaagtctttatgaaaaggaaagaaaaatttggaatgcacatctctgtccagctcaattcctcactccttttttaagatggagagctgttaggtttgtctacacagtaggaaacacctgattaaataacagcatggagccaatcttgacaaagaaattggctgcatccaatagaatcccagggccggtcgtggtggctcatgcctgtaatcccaacactttgggcggccgaggtgggaggatcacttgagctttggtctcagggctttgagaccagcctggacagcatagtgagacctcgtctctaaaaaattaaattaaaaaaaaaaatagagcgccagcaaagtcaattcctgaactctcttctgttcagtagtagcaaaaatgcctgatctaagtgatggggaaagttagtttatgtggctgtagcatcagacacatcactgacaatcctgctgtggatttatagcacaggggacactacatctagaaacacctgtctgtggactgctgctgctgtcaggttagtaatctgtgtattctaatgagaatggacgtggcctccctagtgtcagccacataatggaaatcctagatcagcatgcttacttcttcccatctaattgcaagttgtaatttgtaaataatgggtttactttttaattttgagaaggtaaatgtgttgctgtacaaaagcccaggattccttcccgttaaatcggcagcattcttggacacagtaaatcctatcacacacttttgtctcacaaaagaagtagcggcagttagaagactttgaattctcccttacccgtgactttgagcaagtgatttaacctctcagacaacacagttcctcatttgcaaaatggaaataatgtctacattatctatttctactcacagagttgttttaggacacaaaatggtaaaggaaggaaaagctaagttactgcaacatggtaggatacttttgcttttaaatttaatttatacgcatcccaatttttatctagaacctagatttcaggctaaagaagagagccgttgggcttcattccacttgtagtagcctcacgttacccttactgtgaaattagtctttgtttcctttcatctcttttgaatatcacccttgccctgcaataataaaagagagctgcatgcagtgaaatcaaaccatgaaattatagaattgtagagccagaactagctacatataaacagaaaagaaaatttgattgaaacattaataattttcatcaaggtgaaaatgactgacaggtattactttaacagagttatttatactttttaaagatgtgctactgacctgttaacctaatgaaatttagatggtggaagggatataagttgttgaaaatttgggattcatttctttccatcttagtatttttggagtggtagagtgctgtgtctacatacctttgtaataaaaaacaatttggggctggtgttgataatcaagttgattgcgatctctaggagaggagagtctatctgatctttttcttgccgtttgtatatattgttctacctctcccatctcatctgaaatatggggcagtttcttggttctcagttgtttcttttctgatatgttgctgacctctgatttctcatatcagtgctcttcccttagttcaaagatgtttccccagttgtagatgggggttggaaaaggaaggtgcttgtgatttaaaagccctgtcacttactgtgtccataatatagtgagtccacctgtggactgagcaaggctgctgtcacatctttcaaggttttcctcattgatcctacatcggtttagcaaaattcttctgtaaaaggctagatagtaaatattttaggctttgtggaccatacagtctctgtcacagctactcaactctgccattgtagcatgaaatcacgtggctgtcttctaataaaacttggtttacaaaaacaatcagactgggcgtcgtggctcacacctgtaatctcagcactgtgggaggacgacacaggaggattgcttgagcccaggagttcgagagcagcatgggcaacgtagggagactccatctccgcagatttttaaaaagttagctgggcgtgatggtgcatgcctgtggtcccagctacctgcaggggctgaggcaggaggatcgtctgaggttgggaggtcaaagttgcagtgagccatgattgcaccactgcacttcagcctaggtgacagagcaagactcggtctcaaaaaaccaacacaaataaataaaaattaaaaataatcattgagccagatttggctcacgggctgtagtttgctgactcctgttctacatgattttcataaaggtgggacaggtgcacttataatattaaatggaatggagggtgctattgtaaatacctgcaagttgaatcaaggatagctttttaaagcagtttgcttagaaatttacctacaaaagactattattacagtacctccctgtgccatgtacctatagattgacttaggcaaaaacctgacaacagaccttgggaatatttggggatatttactttttcaagtaattgagttatacgtactttgcctgccactttttacattgcattgccaatttaagttaacatcaccgacctaatgtcagcaatgttccactcttaaagctggaaactggattcgagggtgagcaaggaaggatgaggagagggaagtttaccttaaatgatccttgaagtcaacattaggtaccttgagaatgccttgctgcttgattttaagatcttcaattacagcactttgattcttaaccttaaaaaaattctccttcagccatttcaagccatgtggaatatctcttactgcttaggaatttgctgtggtttttcattgaccgtggccccagactctggaatatgtattaatttatctgggcagagaatacagaaatccacatgcagaataaagtgaactttatgctgaagcagaatattgaagctgggaatggttaattcttaaaaaataaagcatcagcgttaataaatattgaattctaagaaggtattttgcagtttgcttcttaaagtactgagataatctgactgggttcccatttaaaagagagaagttttttccctccatgaataatattcgtttacagtcattggtaaattattaatctgcattccagtgtttcatgtttgaaataccagtccgccctgtccatggggatttgatctcacgctgtaatcagcaaagggttctgggaagtgagaatagctgtggtttgctcttttaaagaccttaggagagaatcaaaaagtggtggttattcaggaagttggcctgtccagcatttgacggctggcagttttcatatggagtcatatgagaccatgaacttggaaggcacactagactgtgggaaagtttgggtgggctgctcaccaccctgtgattttcagaggtcctagaatgttctttagagtattcctgcagtttttgaatggatgtcaaatctcttttggtttggggctacccgaaatgtttacattctgagtcgttggtccattttcctccaacaatgcacatttaggattgctattgggtacctaatgaactggattgatcataagattctcaggatctctggccccagctcgacaccactttctagctatggcacgttaggtaagtcctttaaccactctgactctcacactgaatataggttagaacagtatctacgtcatagtgttgcttgaggattaagaggaataattcatgggacttggcatgagtctttactagattgtaagctccatggaggagctgtcttcccagtgcctccagcagtgtctggcatatagtgaggagctcaacacacatttgttaaattaacagtaagcattcagtcaatgttaattgttactgttgtcatgaataatattctcattattacttacattacccattttgagtcctccgtaccttctgttgataacagtcatcttcgtgaagcagctatggtgtcattgataggatgctgagttcaaattctaaccctgtcctgattagctgtgggcaaagtttcttaacctctctgaactagtttccttgtctgtaaattgtgatgataatgccctcccacagagtctaagagggtaacacacccctgccttagttttctcaaacgtatgggtagaagtagccctgggacctactcacttaccagtgtcttagatttttcacatgccctaaatgcttaactctataggccttgcatgctccacaccagagtcttctacagattgcccaatatattgagggctgatgaggtcccctccacacagaacagctatgtgtagcaggttgatcaaaacatctgtattctgatcagggtcatctctgcacagctggagttgtgtatgtcctttaagtttctataactggtcattataaaatactaagtatagtaatactaatttatgaatttatgtctcatgaaatgaagagataccaacaacacaactggggtttcatagaggttgtaaaaatgaactttttggcccctctcccagtaccaagcgtgtattgggagaggggccagaaagttcattgtctggtcaatttgccaccccaatgaaggtgggttccttttcagaagtcttgaaggtttgagcctggcaatggatcaagttctctttcctcctgcagaatctctcttctggtccacactctgggaggtagacgggactaagcagaaggtcacttccccagtgcaagaaaatgtactactccactctcacattctacctttggtttgagcaaaggccacattttgcaagcccgtttgctgcccagttaatctgtcagggtgaactttctctcaccctctgctgacacctctgccacccagccccatctcctttgagagggggaacccccccaccatggagctttgtgttttcctccacttcctccttttagcagggtaagcctccacacttctgcccaggctgttgggcccaccatctcctcttttaacacagcttccgaagtgctggggatggagagggtgtcaatgtggcaaacgttcctttgcccactgatgagaagtttcagcccttcccaagacatgtctggaaatggcagtccaccctggcctttccttaacttcactccatccctcagccccttcatgtacaagttgtcagcacatcttgttatttctgcttataaaaatacatcgaatctgacagctttgccccactctatagctgccctcctaattcagcgagctggagaggcaattctcggtcaggatgatttaggatattcctaactggtctctctgccatcccactataccctcctgcactgtccacttaacagtgatgtttaaaaagtaaataaatggctgggcgtgctggctcatacctgcaatcccaatacttttggaggcagaggaaggagaattgcttaaggccaggagtttgagacaagcctgggaaacatagggagaccccatgtctataaataataataataataaaaatagccagatgtggtgatgcacacttgtggtcccagctactcaggaggctgaagtgagaggattgcttgagcctgggaggtcgaggctggcactgcactccagcctgggtgatagagtgagaccccatctctgaaataaaaaaaaaaaaagaaaaatgtacaaagtgccttttaaaaagcaggtatatggagatgtaagcaggcatcaaggctagcagtgcccagcggtgagccacggctgcactggtgggtccatgggaatagaaagcaaagtcttgggtccacacaaggtggaggattacatgggagactcctgcatggaggtgtgcactctgtggaagagtcaagtgagaaaacgccttacccataaagggagatggtatcattacctcttcagttctctttccctactgcaaccccacccgaaaagccccacctaggttccagttcctctgggtgcaggtgcctgattgcctgaagcctggtgctcaggattgtcctacattctccccactgttccctgagtggttccctgacttgctgttttataaaacctttttacatacagtagagtcgggggcagggggcaggtcttggtcactcagcccataagaggtagactctgaacaggtcgctttcgagttgtgtttccaatgtcctttttaccatattgacaaagggaagaatttatgtaggaatacatcatctttaattaaagcatagctataaattatgcaagtagcagtacatattttaacacaaaagcaaggttcatagacaaaaatggaatggtaaaatcatgaaaatgtaaatctcttggttaggagacatttaggctcaaaataataattaaaaaatcaacagttatcacgtgtcgatacgacattgaaaaacatcttgtgattttaaattgaaaaatgggttcagactgaccacccaaataatcctttttttgagatggagtcttgctctgtcgccaggctggagtgcagtggcgcagtctcggctcactgcagcctccacctcccaggttcaagcaattcccgtgcctcagcctcctgagtagctgggattataggcatgctccaccacacctggctaatttttttttttgtattttagtacagatggggtttcaccatgttggccaggatggtctcgatctcctgacctcgtcttctgcctgcctcggcctcccaaagtgctggaattacgggcgtgagccaccatgcccgtcccacccaattctactgtgcgcttttccagagaagtgtgaattatttgtgtcttcagggaaatacatagctgtctgggttttttttttttctgttttgtttttcctttaagcatctgataatacaaatgtactcaaatggaagaggaactgaacctttgagtttaatgagagttttggtgtttaaagaattcaggatcatgaagaatgtgtggtgacttccctcttcctattcccattactttaaatgtcgtagctgttgctttttgtgctttgggaagattcttgatgcctccacattctgattcactggacagccctgattataggccatgggggttagagctggaagggtctgtgggagtcaatccatgtcccgcatttgacaggtcagacactgaaaaacagatattgagagctcaaggacttgcgtgggctgacattgagcactacagatgccatggaaatggacacctgctcctgtgctcaccaagcacagcagtattcccccagcctgggccagtggatggaggaattaatggtttaatcttaactaatttaattttaaaaagataatgaagaaatgctaaattaatttttaaaaatcttagtattccttcatggaaaaaagctaacaaaatgattggacatgtatacattttagtgtttattgtttaaaagatgtgttattggattgcactatcaaactccataaaatctggagttgaaataaataaataatctcaacctgtggtgcagttaggtgctggtcagctgatgtcacagcctactgactgggactcattgtgcacgaatttaagtcctttagtcaagctgtgatcacttccacgaaatccctggttatgtcatttggagatcttttatcccctaactaaaaaggacaattggccgggcactgtggctcacacctgtaatcacagcactttgggaggccaaggtaggtggatcaacgagttcaagagatggagaccatcctggccaacatggtgaaaccctctctctactaaaaatacaacaattagctgggcatggtgacgggcgcctgtagtcacagctcctcggaagggctgaggcaggagaatcgcttgaacccaggaggtggaggttgcagtgagctgagattgtgccactgcactccagcctggcgatagagcgagattctgtcccagaaataaaaaaaaaaaagaaaaggaaattgaattcatttaaattgttaaaccctactgaagggaagatagttcttcagtcaaaaggcttttttttttttttttctaaaaagccttagagtgctaaaagtaaaaacaaatccagctattacttgaagttttgtaaatgggaaatgtacttgtagttgagactatctggatttttctttgtgtcttaattactccctgatagaagcaaggcctttaggagtcttttaatgtctttaggacataaggctcaattttactcctcaggtcccctcagtctgaaagaagcaggtgcagcacttgagcattcatccaaccaataattctcaggctctgctgtatgctgccctctgtgggggggggcttgggatggggataaatacggcgagacacagctctttctcccacctgggtttcagggagaagaatgtcaccttgaacttgaggagctctatctggcagcatctctgaggtgtgcttcttctctaccttttcctccccttgaaccaacccagatactctagcatccccgatgctccccagaacatgcccaactccaaagacagcctgatttttttcttttaaaacccagacccagaagcaggtcattttggggtggtttagcacaaggctctccacagacttgtgttgctcataggcgaggggtggccccctttccgatagtgtcattgattttcttttggatattctccctttttttttaatttgaaaacatattctctcttaacggatgtgactgatgcttgcacttttggatgcttgcagacctaggacactgcagaatagaattaattggagtctgggttttctaacagtttagatgtcattcactgcctcactgcccacacggatatatgtacttgtctcacgttctgtcggctgagccttcttttcttacttatgatttgtggccaaagtgggtcctgttcttgagaactgagggcacaagggaggatccctcactttgcccagattagatcttgaatctcagctctctcgaggattccgtttttgtttttttttttcctgcctttggtggctttctcaccatggagctggagaagtcactgtgggctcatgaagggtctttgctgcttcaaactcagaacacacatcccgcaagctctagtaataatataaggtgacagccccccaggggctcttatgggcagccagacccctctctggctgcaccctttgtcccaagcctgctattttcccttaacttccaggtcctcctcccctccagtgtgctggggccctgtagcacacagcaacatcagtgcagtcatcagacaaatgcacacagccgttctccaaatcacccttaattttttttttttcttttttgaggcggagtctcattctgtcacccaggctggagtgcagtggtgcgatctcggcttcttgtaagctccacctcccggggtcatgccattctcctgcctcagcctcccgagtagctgggactgcaagcgcccaccaccgtgcctggctatttttttgtgtgtatttttagtagagacggggtttcaccatgttaaccaggatggtctcgatctcctgaccttgccatctcccacctcggcctcccaaagtgctaggattacaggtgtgagccactgtgcctggcccatatcacccttaattttaaatctgaatgtcaattcccttgttgaaattgtttatgtttcatgttcagaaattaccatatttcatcaaaaccattggtttagtttggttttaggaacagatgtttcttttctgtcaatcttatttccatttttggttgccattgatatttcaaaaggcaccttttttttttttttttttttttgtgatggggtcttgctctgtcgcccaggctggagtgcagtggtgcgatctcggctcactgcaagctctgcctcctgggttcacaccattctcctgcctcagcctcctgagtagctgggactacaggtgcccaccaccataccaggctatttttttttttttttgtatttttagtagagacggagtttcaccgtgttagccaggatggtcttgatctcctgacctcgtgatccgcccacctcgtcctcccaaagtgctggaattgtaggcgtaagccaccgtgcccggccagaaagcaccatttcttatatacctttaaaaaagaaaaatattgctaactaaattaagacatgtcttctgttgtaagacatattctggtttaagatatgttaaatggaaaaaaaacaaacaaactcaaaacccatgtacctttttctttttcccaatgtgctttttagaatcaatacaatctgtgtcaggactctattagatttcactttccctctgacagagccacttatgcttttgaaatagccaggtaagcaggacaatttcctttcagcccatctctggctctcatggcttccttcttacacatgctaggtaagcactttgaacttgaaaaacacttgactaaacactcatatgatctggattgtttaaccacaaaagatttggtcttctctagtgaaaaatgctgtgggtttcttttttacctttaattttacttttcaagttaaaaaatagcttttaaggtcaaaattttcagagcaatttgtaagtatagatacagtttcatggtgacagtttcttatgttgaaaaggtgacacaaaacacattatcttttactttagattcaaggggtacatgtgcagatttgttacttgggtatattgcgtgatgctgaggtttggggtactgtcatccaggtactgagcataatacccaatagttagtttttcttttctttctattttttttttttttaatttttgagacagagtcttactctgttgcccgggctggagtgcagtggtgtgaacttggctcactgcaacctccacctcccaggtccaaacaattatcctgcctcagccttccaagtagctgggattacaggtgcccgccaccacacccagctatttttttcgtacttttgtaaagttggggttttgccatgttggccaggctagtctccaattcctgacctcaggtggtctgcctgccttggcctccccaaagtgctgggattacaggcacctgccactgcaccctgccagtttttcttttcttttctttttttgagccagggtctcactctgtcacccaggctggagtgcagtggtgtgatctcggctcaacctcctgggctcaagagattctcccaggtcagcctcccacatagccttctggcaaatttttgtattttttgtagatatggggtataactagtttttcagttcttacccacctccctctctcctgcctctagtagtccccatgtctattggtgccatctttatgtccatgagtacccaatgtttagctcccacttttaagtgagaacatagggtatttgaatttctgttcctgcattaatttgcttatgataatagcccccagtttcatccatgttgcttcaaaggacatgatttcgctcttctttatggctgcatagtactccatggtatatatgtaccacatttcctttatccaattcactgttgatgggcacctaggttgattccatgtctttgctattgtgaatagtgctgtggtaaacatacaagtacatgtgtcgttttggtagaacaatttattttcttttcgatgtatacccagtaatgggattgctgagttgaatgatagttctgttttaggttctttgagaaatctcccagctgctttccacagtgactgaactaacttacactcccacctacagtgtgtaattgttctcttttctcctcagccttaccaccatctgttgttttttgactttctaataaccattctgactggtgtgagattgtatctcattgtggttttgatttgtatttctatgataattagtgatgttgagcattttttcatttttttaacagtttgtacgtcttgtttggagaagtatctgttcatgtcttttggccattttttaatgggattgtttgtttttttgcttgttcaattgttaaaagttccttaaggattctggatattagacttctgtcagatgcatagtttgtgaatattttctcctattctgtaggttgtctttttactttgttaatagtttcttctgctgtacagaagctctttagtttaatcaggttccacctgtcaatttttgtttttgttgcagttgttttgaggacttaatcatagattcttttccaagattgatatccagagtggtgtttcctaggttgtcttctattattcttatagtttgaggtcttacatttaaatctttaatccatcttgggttaatttttgtatgtggtgaaaggtagggtcaagttttattcttctgcatatggctagccaagcaccctagcaccatttattgaataggaagttctttccacattgcttatttttgtcaactttgttgaagatcagatggttataggtgtacagctttatttctgggttctctgttgaacagaacagagaacagaatattggtcaatgtgtctatttttgtactagtaccatgctgttttggttattgtacccttatactatagtttaaagtcagttaatgtgatgtctctggctttattcttttttgcttaggattgcttttgtatttgggcccttttttggtttcataggaattttggaatagttttttttagttatgtgaaaaatgacgttggttgtttgatagaaatagcatagaatctgtagattgctttgggcagtatggccattttaacgatattgattcttccaatggatgagcatggaatgttttttccattcgtttgtgtcatctgtgatttctttcaacagtgttttgtagttcttatagttgtctttcacctccttggttagatgtattcctaagtattttagtttttttgctattgtcaatgggattgcattcttgatttggctcacaacttgaatgtcattggtgtatagaaatgctactgatttctgtatgctgatattgtatcgtgaacttcactgaagtcacttgtcagttcgaggtggaggagtctctagggtgtttctttctttgtttgtttgtttgctttgagacggagttttgctcttgttgcccaggctggagtgcaatggcatggtctcggctcactgcaacctctgcctctgtgttcaagtgattctcctgcctcaacctcctgagtagctgggattacaggcatatgccaccatgcccggctaattttttatttttagtagagatagggtttatccatattggtcaggctggtctcaaactcctgacctcaggtgatccgcatgcctcggcctctcaaagtgctgggatcacaggcatgaacccccgtgcctggctgtctctggggttttctaggtgcagaatcataacatcagccaaaaaaaaaaaaaaaaaaaaaaaaaaaaaaaaaggtagtttgacttcttttcctatcttggtgccttttctttctttctcttgcctgatagctctggctaaaacttccaagcctgcttatttttgagcagctaaacttactagaaatgtcagggcaattgcattattttataataattataaaatatgcatttattttcttttcaaggtagaatacagaaaagttattacagaaacttcatgtttgaactaaattttctttttttcgttttttcagatggagacttgctctgttgcccaggctagagtgcagtggcacgatctcagctcactgcaacctccggcttctgggttcaagcagttctcctgcctcagcctcccaagtagctgggattacaggtgcctgtcaccatgccaggcttttttttgtatttttggtaaagatggggtttcaccatgttggccaggctggtttcaaactcctgacctcaagtgatccacctgccttgacctcccaaagtgctaggattacaggcatgagccaccacacccagccactaaaatatattttaaaatgacacttacccattcatactggttctgcttctctagcatgagccagtcatgcaagtcttcttaacccactgtcatgtcttctctgaggcttaaaatgcccagtttctataagacaggaagtcagatagacctgggttcaagtccagctttgcaatttactcttcgtgtaatcttgagtgactttctcattttcctcatctttaaaatggggataataacaacatctgtctcaaagagttttgtgaggattaaattaattggtgcacgtgaagtccttagtacactgcctggcaaacagtaagtactcaataaatgttagtatttttagtcaacattctggtaggcttctactactctctacccccaaactgcagtaaaacaaaaacatcttcctcttttgtaacttccaaatgtctatgactggcaatgcaagtcttctagactaataattttgaaatcttttttgttttttggttttaatctcttgtatgattttcatgtctgatcagttatcaagtctaccatcctttagtcctccagttctcatgaccacttgctttgacaattataaaaaccactacctagtttgttgtgtctagcatttccaggacagtgtggtgggaaaagcaggggctttcatggtagtctccgttgggctcaattctattgcatacaggagtgtatgggcaagacattgaagcatttcgagacttagttccagcactaggaagatgggacctccatgtctgcctcttctagagtgattgttgggtaatgaggtaggattgtaagataatggctggagaggcctgggtataccagaggcattcattaaatgccatttatcttccatttcccctctggttcgtcctacatgtggtgaccacatgcactcatgaaatcgcaattgtaattacacagtgtcttgattaaatatcctcagtgactccccatttactgtttaggcagatctaaactcttctgccccactgaactagagaaccaggctgaatgcgtttgaattctggctctatgacttactagctaccttgaaacaaatttcataaccttctacctcagtttccacatctgtagaatggaagtgacaataattgtgcctgccttatgaggttatgtagctcaattgtaaatattgaattagcccacatgaaggacttagaaaagttcctgactgtttcacgccctcgctctgtcacaccagcattctctccatctcttcttccattgctcatctttagcacccctaggccctgacaagccagaaaatttgttctcctaaatctgtcccccagttctgcctccctttcttacacagggtttactgttccgaagaacagaaattccacctgtacccagactttcacactaatatggggcagtcctgaaactgaaactatcagcactgcccctctgataacagtttgtatagtcatcctaggtttggcctgagtggtcatcttgcatatgctaccacaagagccttctttatggaggtctcttgttgctgctgtcttcccaaatcactttctctgttgcgttgcccttagtgattgtgagtttagagtttaccctaagcatcctacatgttatcatgactcatgccagattaaattctacttagttaccagcttttggcaccttgttccaggtttctttagggaggagggagaaaagggtatgtcttagcatacacagctcttatcagactgttagcattgcttgtttacttctgtgtttgccttattggactgtaagctctatgagggcaggtaatgtgtgtgccttgttcatctctatctgccaacttatagcaaagtatctggaccattaattggcattcaatatttatcgagtagatggatggatgatagatagacggataaagattggaatgtacatgccccttttggcatatacaaacatcaggtgaacttttttctctgcctagggaggaagctattcctagcaagaagacaacttaatactctagattattcctgggctactgaggttactaaataagagcatcttatttagctctgctgctgataagaccatgggaagttatttacatttaggagtggtatcttactaataccaactttcacaggtacttgggtggattccagatttatttccctgctatagttgcattatttgctttgtatgatatcttccttacaaagcacagtgttttcatagaaatattttgaaagacttgctaacggatcctgtagacctcacataaatcctctgtgaagttcgctatggaaagcaagaggattgatgtctaatccgtacatgacaagataaattttataattgaaagaccagtttatatgggcaagaagtgatcagacttccgaaaaataaaaaataaataatgtaggaaagacaaatgtaaaaaagcgtatgcagttatttggtcttaatatcagaattctttctggcttttattcatttccattcgttttctttctttctcttctctctataatactgctataatagtgactgctgggaagaaagagtgctgcccacaaatttttttggcagacttgggtatgagttaattagcattttggcctccagtctggagagcagaccctattctctttgtaatgggtgccggcaaggaagcttttcaaagccaagggaaaaatggcatccactctgctgtcaaggacttttatgagggtcaagtggtattggcaagaattcaggccagaatgatttggcttcagcaaagaaagccacagcccttgtgacaggttagattagccataaacctggatacactaaattcttcagatggtgagagattgttgcactctggcccaagaatttcttgtatgctttttcggtttttgcaagtggaggtttgatggtttgacagctgccctttccttacttgctctgtctcctgctgctcaggctccttctcagaatcaccacgagccaaaccactctggtacttgttggcccacgggtgcctcagtgcaaaagtattcctcagtgtctacaaaatgttacaaaaacgtgtctgagtaagctgatggatcgcagcttatttgtcactgagaaagttcaagttagtgctctaattccacctttgcaagtttttatgctaagcctcagacaaatataaacaccaatcttaatctaagtgtgcttattttaatatttttattaacagcaacagcagcagcattggggcattatttccaaaggcaaagaattcaaggaagaggttaatgtgatcattttaactaatcattgcacatacaagagctcattcaatcttcctcacagtctgatgaagtgatataagtatcatgtctgttttacaaatgaggaaactgaggcacagagaggttaagtaacttacccagtgttatttcttggcagatcagaactagactttttttttttttttttaatttttagttctagggtacatgtgcaagatgtacaggtttgttacataggtaaacgtgtgccatagtggtttgcttcacctatcaacccatcacctaggtattaagcccagcatgcattagctatttttcctaatactctcccccgcccaccctaactagtagacctttcgtaagaccccttccagttctgagattaaaatgttttatgtggatggggatggcaatcaggtcaaaacatgtagccaaagaagtgagtgggagagaaacaggtaggagttgtgtactagttaaggcttttgggggcacatgtaatggaagctattgtttaggcaacacagagaacttacttaaaaaaatcatggtctgttgcctcacaacatccaaggaaggggagaagccagatagcttcaaaaagctcaagtaaaggagactttgggtctcctctccccatcagaagctgtaagctggtggcccccaggctccatgaggcctggagatgtatttatttggcccatacgtttattaaaaattgagctggtgcttaaaaatcaaaaggttactcatggaaatccagatttccagcttctctagaaaaatcagaccaggcaaccttgaggcctcattccccctgccaccccgcctgtggtaacaattggctggagctagatggaagctgcctcctcctcagcccctctacctccagcagtcacctaagccagggttttacaacattgacactactgacattttaggccagagagttatttgttgtggaggtttgtcctgtgcacaggaggatgtttagctacatccctggtatccactcactagataccagtagtaccccctcctcagtctgaccaccaagaatgaatccatattctgccaaatgtcctctggggagcagagctgccccggagtgaaaatcactgggttgtataatgagcctaagccactgaccactcagtccctaaatctttccattataccatttctgggagtgagatcacttggtctggcttgggtcagaggccttctcctgtgaccaggtggcagggtggcattaaccatcatggctgctacctcctgcagagagggaatcagggcaggcaactcaataggtatccctcacagtatgtgggaaggagggatgcaaaagacactgtgtgaaaacaagagagtccaggaataactatcaatagtataacaatcttcacttcccagaagttctttgaatctgttttctcaagtttattctctccagcattgtgtgaaatagttaaggcacagagttgtcattcatattcaggggatggggaaactagggtgcacagaatggtttaagtggctgcctaagtgcacatagcgaggtagagaaaggattctggagcccacctctgcccctctggctacccctaaaatgacagtcctctgtaacatactctgccctgtctagtccagggagattgaggaagaaaagcaacaccggccatcatcagactcagcccaggcctgaaagcatgaatgatgcagtcacttgtgtttgcagagcaggtttagctggcaggaggccacgctgtctaactcctgttccagtcagtctgggcgtaacccagccattatggtctctctcaggtttcgaatgcacaggagcaattaagtcattctcataatttcatgtggtacagaaagtcccaagccaaaaataccatccttggttcctacttttagacttccagggaacttccccctccctctctccctataattcactttgattccttctatttttctcttcgtgaatgcattggccagacacagagtcctagtttacttaacaaggggctacagagccaacacaaatcaaaataaatccagccttcatttggcaggaatggtggaagttgggaattgctggaggttctcagaaacaagagcttgaaataaaagagcatgtaccctcatctctaggatgtgagcataggagataggagaacatgccacagaatgatcactgaaagatgatggagtgttggaggtggggcgggggtggggtagttgcatctgtactcccattattatttcagggtcctagataaccacaattaagtcactttatcgttagtacagaagatttcttgtcccatagaaccatgacatcagacctgtgttgcttccttaaataatgaatttttccaaatatccttcagatgcgtattaacagttgcttcctggcagtcaggtggctgatttggtctgtgtgtgtgttgggggatacatatgtccatatactgactctcccttcatgtggacccccatttgggttatatcaagagctaaatgaaatctagttggagatgatttcaatgtttcttctgtaggaatagataattacaaacttatttataagtcttctcactaaagcagtggttctcaaaagccttagccagcaccagaatctacgggaggacttgttaaagcacagattgctgggccccacccccatgcccagagcatctcatttagcaggtttagggtggggcccaagatgttgcagtgcaatggcgtgatctccgcctcccgggttcaagcgactctcctgcctcagcttcctgattagctgtgactacaggtggcatgccaccatgcccggctaattttttgtattattattattattattattatttttagtagagtcggggtttcattgtgttagccagatggtctcgatctccagacctcatgatctacctgcctcggcttcccaaagtgctgggattacaaggcatgagccactgcgcccagccaagactttgtatttctaacaagtttcctggtgttgctgatgctgctggtttgggggccccattttgtgaactagcatgatcaaggatggtgttctcgcctaatcccagcactttgggaggctgaggcaggaggatcgcttgagcccaggagtttgaagctgcagggagctatgatgccattgtaacagccagggtgacggagcaagattctgtctcttaaaaaacaaagaatggtgctctaaacgcaaggtttttcacagcagtagtgacagctgctcctttatgcttctgtttcttcatttgtgttgtccctggaaagtccccctcgtcccagtggctgagtcctctgcttcctccaggctcggcccaagttcctgttcctccacggaacctttcctgactagtgcacacgatcttttctcttctctgaactctttcagttgtaaaaatgaaaccctaaaatttcttttgttgccttgtagtatgctcagattgatgcatgataattgttttcccaactagactgaactgatttgatttgtgaacacgatcatcccttagatgctcttatgtgtgttcttgaacttagcacagagccaagcacaggactcaattatttattttgtgatgaaagttcaaagtgaattaagagagaaaatatattgctgagtgttgtagtccatttggtttgctatagctgaataccacagactgggtaatttataatgaaaaggaattttatttctcctggtcctggaggctgggaagttcatgatcgaggggctgcatctagtgagggccttcttgctgcttcaacacggcagaaagcaacatatggcaagtgcgtgcacgagaaagagtgagaaagtgtgtgagagatagcaagacagggccacactcacttttaaaacaaacccactcccacaataacagcatccatttatttatgagggcagagtcctcatgacctagtcacttcttaaaggttccccctttttctaccttcagcactgtcgcattggggattgagttttcagcacatgaactttggaagacacgtttaaatcataacgttgcctataacaccaactgggcttgcctgatatatagtgccagagatacccaccaaattaagctttatggttcttatatggtaaactcatgtgatttctgtgcccaaagctgcaggtccttctgcctgcttcagaactgcccaaacttctggtcttctagagcaggggtccccaacccctgggcaatacggtccgtggcctgttaggaactgggatgcacagcaggaagtaagcatgcatgagtgagcattactgtctgagctctgcctcctgtcagatcagtggcggcattagattctcataggagcccgaaccctgttatgaactgcgcatgtgagggacctaggtgacgtgttccttattagaatctaatgcctgatgatgtgaggtggaacggtttcaacnnnnnnnnnnnnnnnnnnnnnnnnnnnnnnnnnnnnnnnnnnnnnnnnnnnnnnnnnnnnnnnnnnnnnnnnnnnnnnagtaagactctgtctcaataattaaaaaaaaaaaacatagaaaggttcccactccctatgactgtcatggaaaaattgtcttccacaaaacctgtccctggtgtcaaaaacgttggagactgctgttctagagtaaggaccttgtggttttgctcgttatgatggacatccagggccaccctggatggttgccttgaccatgcctgttgtctactgtgcatgagaatcagttgctggactccagggcagagtgatggctggaggtcagcatgcaggcagggaagtggagggggaagatgatcatgagtacatgagtacgtgggacaggcaggttggggccagacttgagagggcttacatggcacactaagggcttgcttggaatttgtcctacagaaagtggaggtttttaacaaaatcacatttgttctttagaaccataattctgagaccactagcttcttacagagtatatatacgaaactaccaaaggcaacttggtgaagcagaggaatttgggcacgaaggcttgtttcatcttggtggtcagcccttcccacctttctttagatactataattcatttcctagggctgccttaacaaattgctatgaactggtggcttaaaacaacagaaatgtgttctcacaattccgaaggctaggattcaaaatcagcatgggcatcaggaccatgctccttccgaaggttggggagattctgttccatgcttttgctcagcttctagtgttgctggccagccttggcattccttggcttgtggctgtgtcgccccaatctctgcctccatcatcacatgaccttctccctgtgtctgtttctgtgtctcttctcttctttaaggacgtgagttatcttggattaaggcccgctttgctgacttcgtcttaacttgattctatccgcaaagactatttccaaattaggtcacattcacagatactgtggcctaggacttcaacatgtcttttttggaggcaacacagtgcaacccacaacagatacacacttcgctgcaccttatcattttaggactcaagggggcagtgggtttgctgccacactcaagctggtcaacttggcagtgtcatgtgttcttggtgagcgctaggaagctgcctggacctagagtaagtaatactagcagctcacttaagtaattatgaagggaaggtgcacaggacctaagcagcaggctgtggagaactgaccaaaaagacgagttagggcgctattgcaggtgagaaataaggggaccttaagtaaggcagtggctgtgagaacagagaggaaaggggagtagtcgaggggtgggtctgaaggagaaccactaagatctgatgtagtgggaggaaggatcaagggtgattcttagcctatttacaaatgtggtgggtggggtatataatccctatcagtatatacgaaggcctatccagacaagcttctctttgactctacccacttaagttatgctttatgtgctgccaagaagggtaaaaaggtgaaaatgatatggaagaaaccgaagggcaaccttagaaatgcatgtgaataaagatattttaaaggcagaaagacacacatttggcctttttgggaagatttctctaaacggagtgtagatgtctcagggaatggcagctactgccatactgagtggacttctcacaaggcggttctagggccgtcgtccagcctgagaatacacagctggctgacctccagggagactcaaaaattcttagtgaacctgtgttgcaggtcatggcatcaccatcatgatgtcctgttattcttcagtagcatttagtaaacagtttttgcatctgtttagtttacacagcaatcttggaacaatggaaaatcctttgacaagtcagaaaattcaagtcctgtttgttgttgttgttgttttagttgcttttttgggggttgtagtattgtgaggagacacttaacttatggaagcttcattttgttttcagtaaatggagcagcaacaccattcttatagcattactctgaggatagacatcagttaatgtatgtaaggtgccgggctcagagctagtgcatagtacacagtcatcccttttctccctccccatcaatcttccttctcttctttcttccaggtttttttcttttaatttatttttagagacaaggtctcactctgtcacccaggctggagtgcagtggtgtgatcatggcttactgtagcttccgaactcccaggctcaagctatcctcccacctcagcctcccaagtagctgggaccacaggcatgcgtcaccaagcccagctaatcgaacaggttttctgactctctgaggcccagagctctttctgcaattctgcctctctggggctaaaatataaatatataataaataaataataaacaaatccctctagaggattttttttttttttgagatggagttttgctcttgtcaccaggttgaagtgcaatggcacaattaccgctcactgtgacctccgtctcctgggttcaagcaattctgcctcagcctcccgagtagctgggattaggggcacctgccaccatgcccagctaatttttttttttttttgagatggtgtcttgctctgtcacccaggctggagagcagtggtgcaatgtcggctcactgcaacctccacctcccgggttcaagtgattctcctgcctcagcctcccatgtagctgggattacaggtgtgagcccccacacctggctaatttttgtatttttagtagagacggggttttgctatgttggccaggctggtttcgaactgctgacctcaggtgatccacccgccttggcctcccaaagtgctgggattacaggcgtgagccattgtgcccagcctaatgtttgtatttttagtagagatgaggtttcaccatgttggccatgctggtctcgaactcctgacctcaggcgatctgcccccctcagcctcccaaagtgctgggattacaggtgtgagccaccatgcccagcctattttttttttttttttttttttttttgagacagagtctcactctgtcacccaagctggagtgnnnnnnnnnnnnnnnnnnnnnnnnnnnnnnnnnnnnnnnnnnnnnnnnnnnnnnnnnnnnnnnnnnnnnnnnnnnnnnnnnnnnnnnnnnnnnnnnnnnnnnnnnnnnnnnnnnnnnnnnnnnnnnnnnnnnnnnnnnnnnnnnnnnnnnnnnnnnnnnnnnnnnnnnnnnnnnnnnnnnnnnnnnnnnnnnnnnnnnnnnnnnnnnnnnnnnnnnnnnnnnnnnnnnnnnnnnnnnnnnnnnnnnnnnnnnnnnnnnnnnnnnnnnnnnnnnnnnnnnnnnnnnnnnnnnnnnnnnnnnnnnnnnnnnnnnnnnnnnnnnnnnnnnnnnnnnnnnnnnnnnnnnnnnnnnnnnnnnnnnnnnnnnnnnnnnnnnnnnnnnnnnnnnnnnnnnnnnnnnnnncgccgttgcactccagcctgggcaacaagtagcgaaactccgtcttaaaaaaaccaaaaccaaaaacaaaaactaaactcattggaatcatttacaaataatatactcacccaaatagctagattaggggtcttagagtctatgaagcaaaccctgagagtgaaggtgggaaggaaatgtcagaattataagcaggattaacgtagattaaagttgacagaatctggttcttgctctgtccctttcccatggtggccagccccagctgcccagctgctgttgtctgtaagccaaagctcctgcgtgttctccttccaatagaaaacgactgtgcggaacctcatcctccccgggcccagggtgttggtgcagctgctgagggatctggtgaggtagcctatgctcatgtgccactggagatgcccggagagttccaatgcccaggccataccagcagctccctgggtgatgtccccttggacttagtttcactctgaagctgggaagcaatagcctacattttcagttaaataaaagctggaaatgatgatctcgttaggcctgcctcctgtacttcatgctttggtgctctccttcattttcctgccaggaagactttcccagtgcctctttctatatgcttgcatcccgttctcaagtctctgaccagcggttccactttgaagtccatcccacagaagtattagctcaaggctgcaaagatacaggaatgagaacgcttgctgcaacgctgctcataacagggagaccaggaaaataacccaaagggccattcacacaccaggtttttgagatgaatgacatcatgagcaactcatgagcatgagcaccaggcgtgcctcaccatcttggctccttgttgataacgtgtcagtccctaatatccagcctgactccaaggactgagatgatgagtgtgaaagtactttgtaaattgcaaatggttttgcaaacctaagggatatgatgaatcaacaatgagcaaagtcctttgagacctttcacaaataaaggcattttatatatttaaatccttggcactcacaaatttagcatttgaggttttgccaacctgtggagcaaccccatggcaatttgccatttagctgaggcatatattttcctccatccacaacctgagtatctcagacgaggatgaggagtgagtgaatgaaggagaaatgttaaaatatgattacattatagagtctttaaatgctcattaaaacatatattcgttcagtatcttttatgctttcattaatgtgccctaggctattgagaaagaaagagtaagacaaaaaggtgaaaactagaaatattctatgtaatggaaaagaccataaatatactcataaaacaattagtgagcacagaaatatacaatcaggtaatctataataatgtacatgtaataatctacaacagattttttcccttattttggattctgagaagtgagcactaacatattgcaaagggatttaattgcaaatgatttgtgtaaacctggtgccatagaaaaacttctggggttgaatttaattttatcgcatttaaatagaaaaatgcccacctgagaatatgcagctgtaattacgagggagttttattggttgttactgtggcatgtgtttatttctctcccacttaacattctggatggagggagttcaaggctgctgtgtagctctgcagttgtctggttttcctgctctgccatccttagggtatggccttggtctgtcctcatccttatgggcccccagtgaagctctgatcaagacctcctaattttgaatgtcctagaacttgaatacaccccttccacttatgtcacacggccacatctaaactacatggtaggctgggaatgaattttttattctgggtaactgtgtgtccaataaaaagcccgagattttataactcaaggaaaggaagcacagctcacaattgctgccacaggtcagcctctgtctgtccatgagccagttgttcagatgggaggaaatctgaatagaggaagagacaagtcaggcaagaaagttgtgactcagggtttatctcatctgctggggagttcaaggggcagtttaatactggctgtatttttcgtttctctaagtagaagtttcatttaagttactgtggagtaggctgggcgtggtggctcatggctgtaatcctagcactttgggaggctgaggtgggcggatcacttgagctcaggagttcgagaccagcctgggcaacatggcaaaactccatctctactaaaaatacaaaaaattagccgggcatggtggtgtgtgcttgtagtcccaactactcagaaggccgaggtgggaggattgcttgatcccgggaggcagaggttgcagtgagctgagatcatgccactgcactccaacctgggcgacagagtgaaaccccatctcgatagataaataaataataaataaattgtggaatgatcttctttgacattctgctagatatgaaggctgcttagaggcagttgtttgagaaagaaaaaagcaagccctgacctccaggaactggtgacagtggacgctatacaccactcgttcacagtgttgctcgacgctggtcaggtgctcacagctcggccatgttgtcttcctgttggccataagccgactcacagagcactgaccttggacaaggtcatggtgaaaccatggtaaatagagacaaagcaaagccacttcatatttttttctgagcacagacacaaaaaagtttcctgtaggacccataattttgattatgacagggtaaagacaagttccattttctaggatttgatttgagccaaggtcaatgaatagcttattttgtagcttaattgacaacagtaaatacttttgcagtcttaggtcccgcttgatctgtactagggagggtaatttgaaccaagagcctgattcccgggcatttctgccctaaccagatcacgggctaaggatgcaacagagcatagtttcagcagagcccccttgaaaaaaaagttatgctgaatccatgatgcaacatccatttgaaatgaggaaaaagaaggcaaagatgacatgatttattttgtgtcatacctaaataattagaagaaagcccctttttctagtagcacctataaaaatttcactgggctttggaggtctaaagggaaattctagcacatatttcagctccagttaatccaaggttaccatcatctcagttttgtgaagagatggaaagaagccaactgaaacagtagcgtaggaacccagccctgccttttgctttatatgtgaccttggccacgtacctgaccttcacctttctcatatagaaaaagaaaataggcgggccgcagtggctcacgcctgtaatcgcagcactgtgggaggccaaggcagatgactcacctgaggtcaggagtttgagaccagcttgaccaacatggtgaaacctcatctctactaaaaatacaaaaattagctaggcgtggcggtgtgtgcctgtaatcccagctactagagagactaacgcaggagaatcgcttgaacccaggaggcagaggttgcagtgagccaagattgcgccgttgcactccagcctgggtgacaagagcgaaactccctctaaaaaaaaaaaaaaaaaagaaagaaaagaaaatgaaaatagagacgcctgcctgatactcctccaggcatcactttaatgtgtatggaaactcttaactgtgaaaggccatatatccaggaaacgggccattatattcctgctgttgttgttaattttatcagaagagagtcctacactgccgactcagtagaacaagtagcttttgagcaatggttttgtgtgcagtcactgtgcctggtgttttgtgccaccgcctttccctgtcacatttgtgagccagggagaggggcaaatgcgagatgatcacacttcagtgccactactcgcagataccatctcgctgtgggattatgctgcttactccgaggagagatctggaaggcactgttgcctcttgcttttgcattttatgtatctatttatttatcttttttaatttcttcctttttatttatttctttctttatttttagacagagtctcactttattacccaggctggagtgcagtggtacggtctcggctcactgcaacttctgcccctcgggttcaagcaattctcctgcctcagcctcctcagtagctaggaaagggtctcactgtgttgcccaggctgaaggactatggcacaatcccgtctcactgcagcctcgacctcctggctcaggtgattctcccatctcaggctcccaagtagctagaactacaggcacatgccaccaccacacccggccaatttttgtatttttggtagagacagggtttcgccacgttgctcaggctggcttttgcattttagatgatggattttatcaagctgacatctaattctaacaatcaaatttagacttgatgagggtctgaagctgaagactttatttgcagcatggaactcacctgccaagctggcttctcaaaataccagccaggcattacattttcttctgtgtgggaaccagttaatatgtaggtggcttggagtgattctgaggggtattctcaccagacaacaactgaaagtttcctttctccactctagagatgccttggcctaagagattgtattcataggtgccctggtcaaaatgtccttctcccctgggcaggactggagacagctttaccagtccttaacttccaatgccatttttagcttctaaattggcaagtgtcttttatttactttcaataatttttaacatatttgtataatttatatagtgtccagagtttataatgtattactttacacctcatttttcagttgtaaatggaataaaattgatcaagccccaaggtgtgtcaggcactgtgttagatggactctggagattcagagaaaaagagacagatttctttgctcaggtggcatgcagcgcctagtcaaaaaatcagttgtgttatgtctaattaaggtcaagacgacatgtgaaatccaataatacagatgagtcctagacacagaacttttcctcctggcctcatgagttagattgtggcacccttgtcatggatgaggaaagtgagactaagcggccttaagtgactgcagtggtcacccagctaaggtgttctgacttctaaatactggccttgtctacccagcacactgccccgcgtctcaccttgtcagcattcttttgcagtatgttgccatttcaagatggcatgttaatgtctgtgatcatatagaaggtctattttggggtgccttttttctcaagacatttaggacagtgccttcgttaattggacatgtccctaaatcttacttgagtcacaaactgatcccctcattggcacgctggtttctgttagcctcaaggtgtactcttttctaacttttcctgcctttttttctccccacatctgatgctcatggtgcctgggactttcctgagaattggccagaccccatgttcttattacctccaacagaggctttagttctgccaggcaggggacgaacctacctttacgtaggtgttctgtttgcattagtttgaaaatgggtttgagggcaggggaaggtaagttatttgagtgcatagcaattaggatgagggtatgtattaggaaaaacgaatcagtagtatcacagatgatctcttgatgttatcaaaataactcattgatatgacatcttcaggttagctttcccgttctctatcttggaagtcaaccctgtgaggttggaaacaaaagagttaaagagaatcccctgggccacccagccagtagtaagtcgcagaagaggaatttggagtccgctcttcaggctccagcaggctccagtgctaagcctcttctctctgccaggtcatggcagaatatggacttagccacaataaagctgcctcaaggaccgaggagagtggttgttactgactgactttattcctctcagcatccaagaagatctcttcaattaaacattatagccttcgggcattagcccaggagacacagttgagggtcctaggtgctttcacttaaggcagggctgttgagtcggtgaggggatgagggcatctcaaaagaaggctggctttcaggattgcacagagatgttcctgctcccagcagactggggtaaaatttcctgggaatgagggcatttctgaggaaaagagaagggaaattttgttgactacaagttgctatagtataaatgggagaattaatctatttttaaatgctcagatgtaaagatacattcttattgttgaatccatattttcctcaaaagagagtggagacattaattaggaagacatttttaatacatcttgaggattcagaggctgccactgataaaatttaaaaaggaaaacaaatgtgccaggtgcggtggctcacacctagcactttaggaggtcgaggcagacgtatcacctgaagtcaggatttcaagaccagcctggccaacatggtgaagcaccatgtctactaaaagtacaaaaattagccaggtatggtggcatgtgcctgtaatcccagctactccagaggctgaggcaggagaatctcttgaacatgggaggcagaggttgcaatgagctggcatggtgccagtgcactctagcctgggcaacagagcaatactctgtctcaaaaaaaaaaaaaaaaaaagaaaaaaaaggaaaaaaagaaagatatacaataagctccctcctccaagagtttgttatgattgtgattttatcgtttggctagcttcttagagctagcctgtgagaccttcaagaaagcctgtcaggatttttcataatcatagctccaacaaaagaggggcagtttgggaatttcttttttaatgggaaccccggaagatttatagctagaaggcgatcacaggtttctagatcagtgcaccagcgttcagcttccttttacaacatgtggcccacttccaggtttcaaaaagtgtgaccgcatcatgggtagactcacttcctcttgtgcttaggtctgagaatgagcgggcagagtggggaaatagcagtgggtggggagggtggtgtctgaagatgtttgtgggagtgtccagtggttctaagcctctagaagtatctttgccaataaagactcagaaatgggaatgggggtgtgtgtgcacaccagaaatggccgtgtgtgtgtgcctgtgtgcaccagaaatgaccgtgcgtgtgtgtgtgtgtctgtgtgtgtgtgtgtgtgcgcgtgctgggcaggcagagccatgggaacaggaaaacccagcacccccttcagccttttcctagggactggcattcattgccaggcatgctggttgggaagaactgcccaagattttcatctagaagagattcaagaggacccaaagcccaggctcttaggatttcaccagatgataaattataaagtagctgactggtttgtggtgaacagttgctcaaatgcccttttagcttctcagtggtgacaaagtatatctcacggagatcttacattacattaaagatttaggggttccagttaggatatttaaaacctttgccagataggagatggtatcacatacctcacaccaaatttgtgcgtctcacagctgggcattgagatttttaaaatagcaacttctgagtggaaaattgttagggaaaatctaatcaacttaatttaaatggcataaatgatgattagagctaattatcgtcagaatttgggctggtgtttctaaaatgaaactacagagtttctttaaatggggtcatcaggttaggattcagttgtcaagaaagatcaatgatttgtgtgaactcacagtcttctcagcttacctggtagccaggggtaatatttcacacttcggagtgaattgcatttatattctttttcttcatagctcactcaggatttttagaagatgaaagaattgaatcttatggcaacaaagcccatttcttcacagtggaactataaatgcagacttaagtaattaatttgtaaacctttgtatctttttaaaacatcatcctatccccaaggcctaacataagttttgttgactaggtgaaatgattgaatcagtgaatgattgaataaatgaaaaatataggatgcagttcaggaaagaaaaccacaagagtgcggcggctatttaaaaaatgccatccctgtaattactgttattgccaattcctgtttgtgtttatgaagcctgaggaattttggagggcactaccagtaatttgtatctcattactcaagctaagggagggataaatgaatcctaaatgtaaaccttttaccgtcaaaatggaaaacctgtgtttttccagtgatgtgtcagcagtagctattaatattaaaatcacgaacctacacacatacctttaagaaatggactccaggcttgtaaaacatgtggccgtaatattggcagagcaagaatctttggcctctgaataagctcactggccttcatgtctgtgataatttgccatagagaccaggctttttttctgaggatctatcccagtcactgtagttgtggaagtggtggttcttgtataacaaagtcatctgaggtaatatttccacacaataatttttagcaaaaagaaaatgtttaatggttatcccaggtggcagcagattcccttgtggaaacaagaatggcgggaatcaaaggttgggcatagagaagaactttcctctttgtgattcaaggacagatgttggcaacctctttgaactgaatgattggactccatccttttcactcatgttgtcctttacccccagtcctcacctggatttaagcgatctggtctgaaagaactccttccatttctaccctttaaataggttcttatttaatgccactgtagtcaaggaagagagggggaacaggattggagcaggggtgaggttcacaggcaccccgagggaggaaaccagacgtgaacatcccacacatagcagctttgcatatggacagacctgatttccttctatgcctcttcccacagtgctgtctgggccattaagaatcaccttgactcatagttctggttttcagttcagcttctaggaatgcatgatttcacaccttgtggaggtagaacgcagtatcactgatcagggcacagctatcgggcaacctcagcctctctggaactcagcgggctgtgaggaagtcatgtatctaagaagcccaaacacatactccatggcccttgactgtctgaaaaactcagtttcggagtttaatacattcccccagggtaccaaataactagatttgtaaatgtaaattttttcagtcagttcttaaggtttgatgaggaacaggatatttacatagtcgcaaagtatctcaccacaaatcactttgcatttgtaataggaaaaattacgcagtggggaagttggaaaatacttaaccaaatgatgaaagtgaatatcacctacaaatatcatgtacctctggacatcatgccctcagaaggacacaaaattatttgcctagaattctagtcaaaaatgtaaaagatgaatctaagtatgacaaatatcaggcaaactcaaatggagggaaattctataaaataacttgcctgaactgtttaaaatgtcaccatcataaaagacaaaggaaaactcatgcctgtaatcccagcactttcaaagcccacggtgggaggatcactcgagcttaggagttcaagaccaacccgggcaacatagtgagacctcatctgtactaaaattcaaaaaaattagccaagcatggtagtgcacacctgtagtcccagctactccagggctgaggtgggaggatcacttgagcccaggaggtcgaggtggcagtgagccctcatcgcaccactgtactccagcccaggccacaagagcacgaccctgtctcaaaaaattataaaaattttaaaagccagacatggtggctttttatcccagcactttgggaggctgaggcaggcagatcacctgaggtcaggagtttgagactggcctggccaacatggcaaaaaccccatccctactaaaaaaaaaaaaaaaaaaaaaaaaaaaaaaaaaaaaattagctgggtgtggtggtgcgtacctgaaatcccagctactcaggaggctgaggcaggagaatcatttgaaccaggagacggaggttgcagtgagctgaaatcgtgccactgcattccagcctgggtgacagagtaagaccctgtctctaaaaaaaaaaaaattctgacaaatgtggtacatgatcctgcaccaggggaaaaaataagtaataaaggacatgattgggataataaaattagaatattgacttgtataaaaagtattctattgatgttaaatttcctggccgggtgcggtggctcgcgcccgtaatcccaacactttgggaggccgaggcgagtggatcatgaggtcaggagattgagaccatcctcgctaacatggtgaaaccccatctctactgaaaatacaaaaaaaattagctgggcatggtggcaggcgcctgtagtcccacctactcgggaggctgaggcagaagaatggcgtgaacccgggaggcggagcttgcagtgagccgacatcatgccactgcacttcagcctgggcgacagagcgagattccatctcaaaaaaaaaaaaaaaaagaaaaaagtatgtgaattctttgtatatttgtgtaactgttgtgttgaatttaaaaatagatggtttaaacagccctaccttcattgtcctgcactcaaacacaaaacaaacagaaaacccagttgtctgctttactctgggatggatcagcaatcactaaaaggactggaagaggtctccatcccctctgcccctcacccttcctccaaaatcaagtcactccagttgatgtggacagtgcctgcagagagacacctaccagcacgtcccgactgtgtttcaagggcaattaagcccagggaactgctgggcaaatgagctgttctccctaggccttcatgctggcctgtgttggtaggagcccccgctctgccatgcagagccaagaattttctcagcaacagtaatggtggccgcaaattgaggtcagtaggaaaacagatctgttttggtttgtaatgttgcacacaatttggtgagtgaacagaaaagaatgtaccccagtgaagggacagcctgtgaaccctgtgtttggttctgaatatccttatgatgcccagcatagaaaacaggaagcatcagttaaaatgggaaattgctgtgggctggattactgtaattcctcgtcttacttagaagttggcatagagcagggtcctttatccacagcgtgatgtctcttgcttttctatgccttgataattttgccctttctttagggtggtgcattgctaagctgacaggcttttaggctggaattgctaccttttagtatgcttagaaattgtgtttttaaagagctgtttgttttttctctgtctctaggttaaaagcagtctagctccactgctggttctggttccctcctcctgccccctctttaggtctaagtaggcgagattgagcacacagagggactcacagctcagcttaataataaccccgcagtaagtgacatagccattgttacactagacagatacacagaggtaagttctccaaagcagatgagctggaccggaaatttgcacatcagtccttccccgtctcttccactcctttggggtcctccaaagcaggaggggaattttgccagcctttccacgctgtaacaccgagataattatacctgctctccgccctcctggcagagttgttttaggactctcctgggatgattaacggctaagttgtgaaacactgggagcaaatgcgaggtggcattattttctctcgctggatggggatctgactacagtagttggtccctttccctctggaaagaagacagtttttctgcatgacctgggctgcaccctctgatggagattccatcttggctgcctgtttcctgtctgtagtgccaagtactcagccttgccttcctggccctccttcggtcagctctattttcctacttaaccgaggctaccgtttcctcaacacaaatccgcctttctagtccagttggtctttttagggggttttcacgtggtgaaaagctcagtgcaaacacaagcgatgttgttaccctcgtccatgcctttactctccttgtttccctctcaggaatgccttttttttcctcctctctcccaattcagtgcttaagcttttttcagtcctaactcaaatctgatctccctgaagcctcctaggatgactcaacttttagtgattttgtctcattcattacttcattgaacaggcatttataaagccacttatgtgcatggctctttattaggacaaggagagttcagagatgaggcatgccccatcctcaggtcacttacagttgagaaagggagggagaggagatataaataagccaacagtgggggtcagaggacagacaagattaccgataatctgggaacttgcaggctttaaagaggtagcatttgcatggggtcttcaaggatggactagattgaacatgcaggatatttggtccaggtggtgagaacatcatggactaagatgcagaggtcagatgttccatgcaaagagccccaggcagactggtggcaggagcatgaggcattgtgggaaatagcactggcaaggagagtgggctatgagctaggctaaggaatttgaacctcactgactggtagggaggagctcccctgagggcaagagaaaccctggctgttaggaagagtcaaacccccgtcctgtgggggctgaaacgacaggggcaagggagccaagaaggcctgtgttctcccttgagttcctgtggctgccattgacaattgaaagcgggagggcaaagatactggcatttccaggacattttgtggtatatggcatgacgtgaccaagcacagctatctctcactatccaaagctgtttatttccaagttcaatggggtttgggtaggacatttgggaataaggaatgctcctttgtccaaatctatttggaataggaagtagtgagattccagataagaggtgatttatcaaaaattttatacagatctatttagttcctgattttggacctcagagaatgagggatatctgcctttgaagcagctggcccaggaaaatccgagagacctctaaggggcacgatcatgagatagaactcacaccaaaccatctcagactgttacagtttgtctagttggttaacataagcaggggtgatataaaatgtttaaatagttagcaacatgaataccgaacaatcagggtggaagccagccagacgctctttccagtgggaactgagtatcagttctgtatatatgtcagggtttctgttgttattttgttttgtttgagacagggtcttgctctgttgcccaggctggaatgcagtggtacaatcatggctcactgcagctttgacttctcaggctcaagcatttctccacctcagcttcccaagtagcagggaccacaggcatgcgccaccatgcctggctaacttttgcatttttagtagagacagggtttcaccatgtttcccaggctagtctcaaactcctaggctcaagtgatccacccacttcaacctctcaaagtgctgggattacaggcgtgagccaccacagctggcccatatatcagggttttttgttttgttttgtttttgctacatcagatgaaaaaacttttgagggcttcatttaccttttctgaattcactgtgatgcctaaaacaacactgtacatatgttaggggcttaatattttagattcagctgaatttcattagctttatacatattttttaatttcacaaaaattatttattttattttgtttttttttttagagggagtctcactctgtcacccaggctggagtgcagtggtgtgatcttggctcactgcaacctccacctcccaggttcaagcgattctcctgccttggtctcccaagtagctgggattacaggtgcctgccaccacgcctggctaatttttgtatttttagtagagatggggtttcaccatgttggccaggctggtctcaaactcctgacctcaagttaataatcatgccagcattatggactgttgggacaattgaatgagttagtataagtaaagtgcttagaatgttgcttggcagatagggaaccctcaataaacttaactgggagggggtttcattctaagccagtgtgccttccatctggtagatgggggtgattgtccgttgcccttcttttcctagcagaataaaaagggtgccttgctgaattctaaactgttttctcccactcagtgcagacttattccttacctgtggtgtttggaccaatggtacccccatgcctccctgtgcaactccagaaaagtggcttccccagcccagcacacaggacagcttaaacagtttatgagccgaggcctcccctttgtctacaaactcccatttgcctgccacctcaaatcctatgggatagatccccctgagactttatacaacaaggtcacctctcaagctctggcttgtagaaatttagtcccttctttggcaatgtggatgcctgaagtagtagatagtgggctatgttcagataagaaagaccccctaaatgggtagacccacgctcatttcgcggtcttgtttgtagctgtagtactgtcgcagttcagttgagattttcatcacactggtcaggaaattcatagtgaaggttactacagcaaccttaactctgctctggaaagcatagcccttacaatggggcctttcagaggctggccctgaagctgggcagtgattcagtctattcagaacacaatggggcaaaccagaatagaaaggaactgcacattgttttaggcctcccattgccatctgtagcatttcgtattgttgtccatccttgcggccaacatgagttttagtttctctagtaacgcactttaaatttcagaactcatatgcctgccagtcgtagtacatttcatgggagttgaaatagtaataataattctgtagtggtgtacaaactcacagccagaagatgctgtagaaacacatgtaggaaaaggtggattaaggcttttcatttggagacaagggaaacacccattgggtgtgtttgaaacaaaactgatgaatttgccttgaaatcctgtaaaactatcatagatttttttctttaaaaagaatgtaatctttaaatgaccagtaaaataaaatcaccccttgcctttatccacagccactcaaaacaaatccactcaccaaacaaaatttacttaacaataggatctgaacggtttacttacatttttaaatctagagagtgttgggtagattttaaaaagctgaatttagctatttagcatgtgaactatagttatactaagcaaaagagctgtggtttccttagaatgagagttggaaggaaactttttaaaatttttttttcctttagagcatttatggtatttgatttattcatactgcttgccctgtgatcaaacaacttttctttgttgtctatttagatccctagggttgttttatttccttcccttctttaatgtttccctcatgtttaatttaaatcatttgctttttatcttcctcggcatctcaagctatttctctttttgttaatctttgttttctctctctctctctctttttttttttttttttttttttttttttttagtatttttagtagagacgggatttcaccatgttggccaggctaatctcaaactcctgatctcaggtgatccgcacgccttgacctcccaaagtgctgggattacaggtgtgagccaccacgcctggccacctttgttctctttttgctgcactaaatttaaaaaataaataaaaaataattgaaatgtgcttttgtttgtttgttttagtgcaaagctagcagctacttctgtatcttaaacacaccagcctccaacaaacaccaacaaacaatcggtgaaaccttttccttttaactccggtgaacttgaattgacatgtagtcacacccaggtatctttgggtgttggttatttgattaggaggtaatactgtgtttttggtccaactccaaggaaaggaaggggtcacagaccagcaaagaatatcaggagtactggtgctgcttttcttcatattttgggtcgctgggctcaggtagaaagagacttttgtgcacttgggaacagagtatcgtacaaatcctttcagcatttttgcaaccagaaaccatgcaaatgtttttgcagatatgcttgtggtcttgctggcagtttgtgagcacaacgctctgtttgaggtggtgatgttgacttctgttttctattcactgtcctgccccaaatcgagcatgccgtcttgtactttaattgtgtgagcacactcttttctacctaatgcggagagtgggtatcagttggtctccattccttgcataaaatgatttttactattactgctttgagataatttgtgtgtttatctcagcacctttgactctcattcctgtcagtacagcaagggaacccagcatttactaccagctctgactttgcagggttgagagtggcatgctgtttgactttggaaactatgttaaaaattcctccagtggatccctagctgggactgttttggcaattgatgtctatcttgcctactttttctgaggatttctgcaaggttattttaaacatattcaagttgtctgattgtgctgaggcaccgttgtcacaaaagaaagtcacagtctattacctctgcaaaatttttgaatgagaagcccgctgttactgaacaccaggcatggggagtctgactttgaagctggctacgaggcatgctttcaaggagacaaggcagaggcccaaagatgtcgcagggtggctccaaagctctgatctcagctttgctgaggcatctcctgtgcccatgatctttctaagagtcagtcattcaaggtacccaaaatgtccctctgtttagaaagggtagctctgttccgtagccaaggtaacacttcatccagtttaccactgtgggatctaaaggcagcttcaagggttgcatatgaaacctggctctcagaggacatctcccgtgagatattttcaccgagtggggaatccatttcttctgtcttctaccgtagccttaatagaagctgccaggtttctaaagccaccaaaccagtacaaatctggattccatggacacacacactctgtcaccaagtttttcatctgttaaatggggatcacagtacctccctgtttctagaattcttttgaaaccaaatgaaacaatgtacgcaaagcacctaacgtagcattgggaacatggttggtgctcaagaaaagtgatgcccgttccccgatccccaaacattgtggggcacacttcttgatgtgggttgcccttttgatgccatattatatttcacagatacaatgagaagtaagtattcttggagaaggaaatccaaaaatttccttggattttctagggagttgtgagttttaaactggtgtgacccaaccatgtccataatcacatcagacatggtcagtttgtgttttgctttcagttttagtgattctggcaggagagagttactggcagaaggaacaccttgaaatgctacagccagagatctctaactagatgacagctttctaatttctgctggcattgcccctcatcttctggagattgcctttttcctttctgtctgtcttgtttctagatttcaagccaatgccttaactcttactttcttcccataagcagagacctgtgtcttgggtggatgacaaggggttctgggaaagagatctccaaagtggggtctatgcacttttatgtgcaaggaaactcactggaaagaaaatattaaaacctaatttgtatttatctttacattaaaaactaagatgaaattgagctgctcccatatataatatttggatggaccccagtctcctcatgcagtttgattgccagagggtcagggctcacaaatggtattacttattatttgagaaattcaaattatataaatgcctggattcagctgattattttatggtaagcatccaaaatagtgccttatttttcttcccagaaacaaaaaacttttggtacagatttgctcaggagggactggaagcagagagctgcacagtgctgggctgggagtcagaggacccgagttctagtcctggttccagtccaggatggccccgtggacacatcctttcacctctctggccctcaggtccctcatctgtaaagtaaaagttttgcactgcttaatcgataggccaggccccttccagctacaatattttagggttctgaatgtaaatatgtaagtattctgccccttccttatccctgccactttgttgtttgtttaaacaccttaattttttgcctacaaggcatcagtctgttgctcaaatggtctttgtcactggcttccattttggttagcctgctgaactccctatgtatcttctctgcagctactgtctgtcgtcttcttttctgtggcggatccctattctcagaatcccatattcaaattgactcacatttatagtgtccagttatacatcacttgagcatcatgaaactttaaaagttctatattttttatttgaatcctgtccctcctattatcttattagccagatgagatgacagtacccagtctctttcttgaaatatcatacatccaatcagagctatattagtggctagtagtatcccagttcacttattaataaccaatgcaaaactttactcatctggtactgtgagcttgggtaatatgaaatctctgtgcgttatctcttttaatgtactcaaaagcactgaacggggctgggtatgacagctcacacctgtaatcccaacactttgggaggccaaggcaggaagatcgcttgaacccaggagttcgagaccatcctgggcaacatagtgagacccccatccctacaaaaactaaagaaattagccagacatggtggcacacacctgtagtcccagctactcggtaggccgaggcagaagaatcacttgagcccaggaggcccaggctgcagtgagctgtgatcacaccactgcactctagcctgggtgacagagtgagaccctgtctcaaaaaagaaaagaaaagaaagattaatttaaaaaaagtaatagaattatttgcccaatatttggtgagtcggtgagtgacagtggtagtagtagtggggtttgagttaaggaataattgtttgcaaagtgagaactgtaaggagtgcctctgtgcaccatgcagttcaaaacccatcaggaacatggcaggctcgctgagcgccttcgctgcacattgttgattgtcatgtatttgtatgactatcatctactttaaaagttttcatttgacaataacttataatcattcattcacgcattttctgatccactccttctagttgagggttgcaggtggccagagtctatcccggcagctcagggagcatggcaggaaccaggcctggacaggaggccatcctatcttagggtgctcacacaatcccccacattcactcagactgagaccatgtcaacaccccaatgtactcaatgtgcatgtctttggcatgtgggaggaaaccctcacagacatgggaaaaacatgcagactcctcactggctggaccaggaatccatttttcttcctcattatctttatcacaaaatggcgtcatccgaggacctgctctattggcttgctgttgaacctttaataaagatctaagctgatcaaaggaaggcagaatctacctatttgtggccaccctagaagcatacaacagtgagggtcctggtaagatcagtgaagccgtgctgatcttccaaattggtttttattgcaaattcattctagagcttgctgattgaacttggggctggggaggtggcagcaactgcaggtagccctcagaaagtctgtcgggaaggacacatcaatagaagataaggctcccgtctctgcatgctgcattgcttgccttctgcaaactgggcttgcgatttgggtgtgggttccgagagacaagcccctagcaggcccattagaagacagtgcctcccttcatgtctatcctagggcttttagttgaattatcaagcttgttcttaattttccccaccccttctaagttccccaagcccactcctaaagtccaaggtatggatcagaagaaacagcaagatagccctgcatcctctgtcaggtggtggaagggagtgagaggatgaacttgtttgtgatcacacattgagcggccctgagcctgcaggacccttggcgacactgatctgccatgtggattagtggctgctcttgtggcttctccctgagatgtgcccacgggactctcatctctgccacccatcaaccagctgtggtctgagatctctgtttgtaaacatgtgtcattgataccctaaaggcccctagaccaatgcccttatggttacattttgccccaagagggacatggtgccactgtgccatagatcagagcagatcaggcaagccaagggtccagaagtaaccatgccagaaacaggcattcctcacttctgcatttggttcagcgttggctagtggttgttcagggaatgctccttgcccctgagcttggcttgtttccctggactccgtatccctatagcaaacccacaacaaaggctgtgcccacatcaagacacccctgatcacatccagacccttcccccgcttagcacgtccagacacagtacccctaagtgagagatgacacaccaacaccttacctgtgtcaccgctccttaaaatccaactctttatactcttgtggagtttccacgttggcttttaaaagacagagatgagaaaataatttcatcaaccttataaaacttttaaaaattgagttcttattcagatatgccccaaacatttttcagaaaaatagggcaatctgagaaaaccataacatgtgagtagttggttaactcatgtcagcatacctccagcattttgcatgacttataaataatgcgtattttgcaagcagtataggagagattcttccaaggataggaagtcctgactttttggcaggttgatatcaactctgccacagcctgctgataactctttgcatactgttctttttctcagaatagcatttaaattagagtttctttgttccatggtacagggtgatagttcatattatgtcacaagaaattgttcagttacctccctgtctttatttatatgcacagctgctggtgtttctagctagtcttcctgcctcattaccttggctgtgtaattgaattagaaaaaggtattgagcagctactacttcagagactatcattttcaaaccacaaattaggacacagagtctggtaggatttttgacttatgaatctattaggccggtgccattaatggcaaaaaccgcaattacttttgtgccgacctgtatgattaataaaaatcttaatggacatgcacacactaatttggtatgcatttaataggctgacttaattttttcttttctttttcttaaaaatttttttcacttttatttttaaaattcatttcagctaattaattaattgattttattattttttttaaagacagtgtctggtcgggcgtggtggctcacgcctgtaatcccagcacttgaggaggccaaggtgggtggatcacttgacgtcaggagttcaagatcaggagttctctactaaaaacacacacaaaaaagaattagctgggcgtggcggtgggcaccttctgtaagcccagccactcggggggctgaggcaggagaatggcgtgaagccggggggcagaggttatagtgagccaagattgtgccactgcactccagcctgggcgacagagccagactccgtctcaaaaaaaaaaaaaaaaaaaaaaaaagagacagtgtcttgctgtgttgcccaggctgttctcaaactcctggccttacgtgatctttctgtctcagcctccactgagatgaaggacatgaaccgccacaccttgcaagattgctttaaaactgtaaataataaaattctgtgaaactggccttgcccaaggcacagaggcatgtgagaggtagagcttgtacccaagtctgttgattttaatcagtttgctagattaggaagaaaagttacattcctgaatcgtattaccgaatgtctaagagctttgcacttaaaaacaagagtggtgatgtgggagctctcttaagggactgttaagtgcttgatgtatgtgacatgctagcagagccacagctgaaaagacagggactaacatcagtgtgactctcttgtcacttgtttgattaaaatataatcagagcagaagtgaaatgagcatttgtcatattaaggaatctcaagcatttgattcatattattctgtagcttgaaatgtccttacctcactaatgatgtggtgaagattaattgcctgttattctgtttaaaaagttaatcatccaggctgggcacggtggcttacacctataatcccagcactttgggaggctgaggcaggaggattgctcaagcccaagagtttgagactagcctgggcaacacagtggaaccccgtctctacaaaaaaaaaaaaaaatttttttttttttggtagagaaacacagccaggtatggtggtgcacacctgtagccctggctactagggaagctgaggagggaggattaattgagccctggaggttgaggcctcagtgagctatgtttgcgccacagcactccagcctgggtgacaaagtgagaccctgtctcaaaaaaataaaaataaaaataaaatagtaatcatccaacctcaaatatctgttactcttaactggactacttacatggttaagagaaggagaactgtgtttaggggcaatatctcttccctttgatctcctgagttgggggcaaataggaacgccttggaaacttatttcttccttggagcagactctgggcccaggactcctatttgccccacgatagctgctgccacagtgctgccgtgtacctacagcaaacatgttgtgaggtgagtcagtgtagcctggaatttattcacccagctagtaaagattgggcactcccatgccccaggcaccaccctggtggggacatggcagggggcagacatcatcccaaggctgactccagggcacggaacttcctctgcattatgcaaggctgtgcagagccaggctgctccgtgagctcctagcttgcagggctttgtaccaggtattctgtttaccacgtggtacttctttttcttctgtaaaaaaaaggataatacaagtacttggtggtgtcattgggcagatgaaagaagttgatacgtgacacatagtaaacatgcaataaagcagttactatgaactttagaattattgctgtttccaactgctgttactttattatgagaggcagtaggtacaatgtttaagggcaaagatctgaagcagactgcctgggtttgaagcccagctgtgggagctgagcaagttacttaacttctctgtgcttcactcagtttcctgcctcgtgaagttgtaaggattagataagttatatgtaaaatgcttagagcagtgcttggtatgtaataagaattagctgttacgtgagaataataataatgtatttcattcattcaacaaatacttgggggctgcccatgccatgcatcatggcactctactaggtcttggggcagaatggtgaataagacttggtcctaggggtcagtttaatcagggagccaggcactcaggtaatgctgttagagcaggcttcttagcaagatgatgcctgacctgtgctgggtgagagtttagtaggcatagagttgggttgaggtagggaggagttcatagaagaataccctaagctgggggacagtgggaatgtaggtactgaagatcccacctcacacacacactgtggaaaaacagaaacaaagcacagcatggtatgcacagaaaatggtgtggtgggaacctcaaaacggagaaagcaggggttagagatggacaaggacaggtcagggaagcctcgctaagatttgcacttcaaatgcatgcgcagctaccttgaggggttccagaccaggcttgtgaaggcagccactgtcctctgaccgcccgtctccctgggatgagggcaaccagagccctttttgtgccctggaggatggatgccctgagcatctcaaagagcctgggctgcccaggcctttccctttcccctttcccctttcccctttcccctttcccctcccctctcccacttcctcgtgcctttacttgccttctttttnnnnnnnnnnnnnnnnnnnnnnnnnnnnnnnnnnnnnnnnnnnnnnnnnnnnnnnnnnnnnnnnnnnnnnnnnnnnnnnnnnnnnnnnnnnnnnnnnnnnnnnnnnnnnnnnnnnnnnnnnnnnnnnnnnnnnnnnnnnnnnnnnnnnnnnnnnnnnnnnnnnnnnnnnnnnnnnnnnnnnnnnnnnnnnnnnnnnnnnnnnnnnnnnnnnnnnnnnnnnnnnnnnnnnnnnnnnnnnnnnnnnnnnnnnnnnnnnnnnnnnnnnnnnnnnnnnnnnnnnnnnnnnnnnnnnnnnnnnnnnnnnnnnnnnnnnnnnnnnnnnnnnnnnnnnnnnnnnnnnnnnnnnnnnnnnnnnnnnnnnnnnnnnnnnnnnnnnnnnnnnnnnnnnnnnnnnnnnnnnnnnnnnnnnnnnnnnnnnnnnnnnnnnnnnnnnnnnnnnnnnnnnnnnnnnnnnnnnnnnnnnnnnnnnnnnnnnnnnnnnnnnnnnnnnnnnnnnnnnnnnnnnnnnnnnnnnnnnnnnnnnnnnnnnnnnnnnnnnnnnnnnnnnnnnnnnnnnnnnnnnnnnnnnnnnnnnnnnnnnnnnnnnnnnnnnnnnnnnnnnnnnnnnnnnnnnnnnnnnnnnnnnnnnnnnnnnnnnnnnnnnnnnnnnnnnnnnnnnnnnnnnnnnnnnnnnnnnnnnnnnnnnnnnnnnnnnnnnnnnnnnnnnnnnnnnnnnnnnnnnnnnnnnnnnnnnnnnnnnnnnnnnnnnnnnnnnnnnnnnnnnnnnnnnnnnnnnnnnnnnnnnnnnnnnnnnnnnnnnnnnnnnnnnnnnnnnnnnnnnnnnnnnnnnnnnnnnnnnnnnnnnnnnnnnnnnnnnnnnnnnnnnnnnnnnnnnnnnnnnnnnnnnnnnnnnnnnnnnnnnnnnnnnnnnnnnnnnnnnnnnnnnnnnnnnnnnnnnnnnnnnnnnnnnnnnnnnnnnnnnnnnnnnnnnnnnnnnnnnnnnnnnnnnnnnnnnnnnnnnnnnnnnnnnnnnnnnnnnnnnnnnnnnnnnnnnnnnnnnnnnnnnnnnnnnnnnnnnnnnnnnnnnnnnnnnnnnnnnnnnnnnnnnnnnnnnnnnnnnnnnnnnntttgagaccagcctgggcaacatagtgaaaacccgtctcctactaaaaatacaaaaataagcttggtgtggtagtgcacgcctgtagtcccagctattcgggagactgaggcaggagaatcacttgaaccagggaggtggaggttgcagtgagccaagatcatgccattacactccagcctaggtgacagagcaagactctttctcagaaaaaaaaaaagaaagaaaagaaaaagaaaagaaaaggaaaagtcatggggaaagtcagacatcatagtaatcccagggcagacatatcgcatggagggtgggacacctttctgcttcaaatggtgttaatattgaaagaacctgtaggctgaaagagatacaaacttgaacatgtctttacaaagcgaagaggaaattacgtaaagaccttgctttgcgagctgtggtctggtgatgggtggcttctcttgggcagcttgtcatccaggacccttgtcctcatcctctagtgggttggaggtgaggatgggggagggggtggcagctacaaaaatttctgcaacaaagcctctaaaactgggtgatcatcagcctcaccagtaaagccactacacagttcctgacgtgagattagtatttggtacaatgcttccagagtaatcaaaatttttataatattttttcatctgtgatgatattaaacagtgatatttgaagagtacctggcccttagtaaatgtcatgcgccagaatatatcacacctaagatgctactggttataaaaggagcatcattattttatttacagtattgaaaaataaaaaaaaactgccagttaagctataacacatcattgattataagacatccttttttttttttttttgagatggactttcgctcttgttgcccaggctggagtgcaatggcgcgatctcagctcactgcaacctctgcctcccaggtttaagcaattctcctgactcagcctctggagtagctgggattacaggagtgcaccaccacgaggctaattttgtatttttagcagggacggggtttcacaatgttgaccaggctggtcttgaactcctgacctcaagtgatctgcccaccttggcttcccaaagtgctgggattacaggcatgagctgctgcgtccagttgattataagacatcctaatttcaaaatgtgaaaatgtgaaaaagaatgcatcttagagttgatggaatacattaactgttcatttacaacatcttatctttgaactgttcattgatatagaaaatgatccttttgagattgacatttcaggcagagaaagtaaaagaaagctgtcgtgtctcttctttctgggagcctattgttaaaaaaagtttgctatatctgcaagctggaataaacaaaaagaattggagactgagttgacatgaaataataaaaaatatggaaaacagtgtcagacatttatatatttcattctgcttagcaagactttcacatccattatcttatttgatctaacttttttcacaatgaaaacagctctgtgtgtgtatattttatatatacatactcagaaaaataaaacagtgcagaaagtacactgagataaacaaccacaacattttaacaactgtatttttgtacagagatagtgcatataaatactatcatatgttcaatcaaaacaaaattggggctccttaccatcccttgttattttcaacaaacctttttttccctcccccttctaacccactcagccaatgttgctagcttggtgtgcaccttccatgcactggatcatgtcatcatgtaaaaccagctctacccctaaaaggattgggggtggtttgatggtcagtcttatttgatcttcccagtggcccaggggggagtgtagtgttatgaacccctttttgctgaggaggggacaggctccaagaggttgactgatttgtgtgacaccctatggctaagtggcacagggtcttggctgggagggctagtctttgagagttgtccttggcttttttgagatcaagttggtcacagatgcaacctagcagcctgagacagtcccagtttatgtgccttcctccagctttatcattaacaacactctcttctgcatcaaaagtgtcccgggctgaatgatacattatatgtttgctctagtggtggaacacttctccaccgggggccagctcttctaggaaggttgattccaggcaccactgactaagagatcactggacccacagtagacctggagcctgtgtctacacttggacttaacgatgatattggaagtgagctttggtatcgcagaaagagcagagaaaaggaagtcagaaatccctgtgtcaggtctcagggatgaaaggagaccacgtgtatgtgaaaatgctacacaaataatgaatctgtggtatggtcacatatatttaaatggatgaaactttatgaataagcacatactccatattcattgagtattcccttccccgagcttcacgtgccaccccctcagtgcacttttccacccactccaagcagaggcaacatggtacattatgaccccaagcttcagtttctccatttgtaaaatagtgcagaaattataatacttgtgtcttgcaagtgttgtgagaattaaatgagataattatgtaaaaagcattggcacgtatttctggtttcagtaaatgttccaattatctaggagtgtaaggggttgagagtgggttgttggctactgactaccctgtcccccatgcactgtttcaggaacactttttcctcatattgtactctgtgcactgaagtccagcacacacatacttgcttcagagacacatcttcccatcaccaaaatattaggggtttaaatttcataaagttgaaataaagtgcaagcccaatgctggtttgtagaccagtttgcaagtccagtgccttgtatgtagcagacagacaaatatttttggttgatttttcatcatttgcagtggaagtaaatgtttcagtccagtaaaatggcagaaatgtaaaaggtggaattccagaatgtcttaaaattaaaataggtagtccctttcctgttattactcacggagacagaaaaatcccattacaaaacaagctcagtttgactgcaggccagagtgttacccattgtccattgttcaccgtaagaatatggtttatctgcttctcagggtgatctacttataacactgggggcattctagtcccaggttttctgaaatcaaatctgctgtcctgttgtgctcatgggccaactaaatggctcagacatgatactatcttactgtccacacagcgtcttccaatcacctttcaaacctggacttagcatagaatccagtcttaggacagtcctggcttttgactttgagagcctggtcagtgcccaacagcaacccagaaaatgctcaattatattgatgtttctatttattttaagattttactaacacatgcatatgattaaaaaatgtaaactgtacagaaaggtctaaaatggaaaataaaggttacatttctcctaaaactccaggtcttctccccaaaagtaccaacaaaacaattatagcaaacatgccgttttaaaaaaattacacaaattcaataattccatatgtattccacatattgactactctttcaatgaaacagtatcttcaagctctttccatatcaggacatgcaagttcctttaatgactgcaaagtactcctttgcagagcattctgtattctaatcagtcccttaatgatgcttctgtttccctattacaaactttgctacagtgaacaaccttgcacatgtatcttttgcaggtgtatcttgaggtagtttcctaaaaaatacagttgctggctcaaagaggatgaggctttgatgtttttttttgttttttttttgttttttttttttttttgtggggggatggagtcttgctctgttgccaggctggagtgcagtggcccgatctcagctcactgcaacctccgcctcctgggttcaagcaattctcctgcctcagcctcccgagtagccgggactacaagctcatgccaccatgcccagctaaattttgtatttttagtagaaacagggtttcactatgttggctgggatggtcttgatctcttgagcttgtgatccgcccaccttggcctcccaaagttctggaattacaggtatgagccaccgcgcctggcccagactttgatttttatttagttaactatgtttatatattggtctgtgtgtctaaaatttcaataccgatttctaaattgctacctaaaaatactgtgcagtttactctttgtagaagtttgtaagagtattgatggtcacctcctccccactgccctgtacggggtgggggaccttgttgtatttacacaacacacttaattgtctcccttttctgggcatttgaaggcatttgaagatagtggttaccaagtatatgggtaactcctcctttctcccagatgcatcaaagaacagtgctccctgggacactaatgaagtgtttgcagaaccgctgccgcgtggggccaggcctaccctggggctgtctcctgggcaatgaaggtggactttcaggagagaataatccttcctgtgtatgctgactcacctttgctcttcctggtccccaccctggtaaacagacaccagtcagtgaggttccacctttgaaaaaatcagtcagggaatcacccatctgaggttcccagcctcaaggccgagttcttcctgtgtgtgagggactctggtgtttgggttccacctcttaaatgttagcaacaaaccaggctattatgtggataggggcgtaccctactttccagaacttgcacatgaatcaactgctttttaataaactacgtcatccttagaaacggaatgtggatctgagagtgtctgcactcaatctctatctaatggaaatttctccgtcataatttgtaggaagtgtcagggataagagtaacttttcattattgttattattacgttcatgtcgtagctggcacgcccgccactgccctcctccctttgtacagtgtgctgcgctcaccaggagctgctgtaaaatgcaataccttgctgagtatccacctgtttaaaatggtaccatttttagtgggggaagcaaaagggaattactcaaaaatgaagctcgcctgagagtcatgaagtagtagcccaataaacaatgcctttgccctctgaagagaatggctgccctcacactgatgaggaaccatctctgctgcccctctcccagcacacatggcagccaaacctgcccctgcctctcagcaggggtagaggaagaaatgaggggcaaaacgggtgcgaagggttagttgccccagagccctattgcatattctcacaattctagggcggtagtttgtgtcttagaacaactttcagcctctgctccctagagcgtaggatagtgcgtggtaacaatgccccaccacaccgcccatgtaactcctggcattcagcggctgtgtgcagaggctgtgtgcctctggacaagtcacactagtagcaaattctgttgtcccctacccagcaacagaaaatggtttttgtttcactgtggggaacttttcagcttccctggctgggctgagggtctgcacatccatgtttggtttccagctttgctgataaccatatcaccctctgctaaagcttcccagctttcattgatccaccttgtccttgacgatctgggcaggtcaggttctcccaaaggctctgagttgctcccacctccaggttctttactctctccctttgcctcatctgggtgggtttttaggggagtggggagaataaatgcatagtgaggagtggtcactaaagacagaagttaccattagaaaaccttgggcagtttacagttttttcagcagtaaaatagagatagtaatacatagtatggggggatggttgtgaaggttgaatgagttcacatatgtaactataattgcctggcagagggagggagagacggggaagggagacagggagggagggcggaagagagagagggagagggagagagagatacagaaactgatatgtgacctattggatataaaaaacgtatcaaatcaaaaataactttggtgttttagtctctaatgctaagaggaggtggtcatgaataaaaattgtatgtctttttaatgatacattgggttttggagacagtctgtcattccattgtcatgttaaacttaacgggtagaaatatccaataagtcagtcattcatgtatgagactgtgaagaaaccacgtttggatgcgtccatagtcatcgaatcttcggttcacatcttggcttttgctacttactagtcgggagatctcagtttcctcctatatggcatgggaatgttaacccctctctcctaggattgcttgcagtagtaagtagaacaccctccacaaatcaaataactaattcctttgcatattgtaaccactgtcaccttgttatatagacagcagactggaaaatgagtcctctttgagcattagagactggggctaggaatcttcagtatcgagtgatacttggaactatgagaatcaatgaactctaccgtgagtgcttttctgctaggaaataactaccatgagaaaaaggaggaaacagcctctgaggtggggcagtcaggaatgtgtctctgtgcagtgagacagagaaagaccaatgggtttgatactgagacaaacttgggttacgctaggaaggcagtttcttcggatcaatacaaacatacgcaccatgacacagagcttctctgtttcttgtcctttatagaagttgaataagtacttattaacagcccttgtgttttattcaactctgcttccatttttagatgtctatgggggttaaaaaccaaccaaccaatctgcaggttggttactctgggaccctagttttctgtgcagagtaaccgtgggtgcccagaaagctggaaaaggtggggaggtgaggagaggaggaatcactgggaattatctggctggaagtagaccatgggcattcaatggaaatctagtgagtcatgctgtggccagtgcttttttctctttctgctttgccacaagaggaagaaggagtggtgaggtctgaggtaattttgtagaattgatgctgtatgtggttctgagaatgccagatatagagagtttccttctgcaagacagcatgggtggcaggccttccagaatccctttccagagcaggagcccatgacactgtacacttttcctgtggtagctccttcttggctgattttaaaagatggcttttcccagagcttcttagaacttgctcttagcaaaggatctgtgtttcccatcgaaaaaaaagtaaaccatttaataaatttttaaaataaaatttggaatggcttccatcttgtttcttgtcatcttctcctctcaaaaagcctccttttcccttttttcatcctagttttgatgtctgagcagttggcctttctagatacccttatttagaatttttctcttcttcattcgaagtcccccgagcagtgagcagggagggggcaggggcgagtctcacccagtgcagtgcccactgcacttacccactggcgacactcccagtagaatgcaagcatttgaaggtaagggaggatcttccaatattgtcatgtaatatttgccattacttcatatttattagcttttttgctgataagtgtagattataatgaatgtccttcctcctctggtctcctccggcatagattataatgaatgtccttcctcctctggtctcctccggcaaattctaaatatcttagacctacttcaaatggctccttttctgggaagtcatttcttctgcctctcccaggacaaagtggcctaacctccactcctggaacacccattttgtgtgtgtttatgttgactgttattgacgcatgaatcactttattccatcattatctaggtgtccttcaagggactttgaactgcccaagtgctcagctccccaagtgctcatgagtcactttgttccatcattatctaggtgtcttcataggactttaagctccccaagtgtgccataagaacttgtcacgtagctgaacacatgggggaccccactacagaaatgccaaatgaaaggaagccctgcagcccacagagtgttcagaggccgcccctggtgtgaagctgaaaaatcccagacgtagatgagggccacagcttcatctacccaagggggccatgcggggatgaggccttcccctcctgggcatgttccgtgatctcgtttcgtctgtcctgtccacatcctcgttattggagcagtgatcagtcataaaaatgtagcctatcttttgaatatggaaagccagtattacacgtatgacagtgataagtttatgaagggaaagtaatttagatgacttgagaaattatgaccgtgtgacatagcctttgtgtgatacatattctttccatttctggattctgtcatgtagtttgcaaaacgagactagaaagtttctatgtcgttgcttattttcaccgacaaattcaacacaacagtatggttgaaggatagtctcatccgagactgtcgaccgtgtgttgtgctgtattcctgacactgtttagcacttcacacatattattttatttaatccttacagcagcgttgtgaaatgggtctgtctcccattttacaaatgagaaaagagaagtcactttgtgtcacttcagggacacatgagcttaggtagcttttccccacttaacttagtctgtaggtagcaaagctggaacttgaatcctcatcttattgattgcagaatctttctctgcactgctctttctgctacattttattttaagaatatttgggaaattaacagcattttgtctttgttactacaggggaaaacaaactatcctagtaattgtatgttttatgttcccagggaagcaaaggtgtctaccagtaccactggcaaagccacaatgtcaagcacagtggtgtggacgacatggtgctactgtccaagatcacagagaactccatcgtggagaatctgaagaagagatacatggatgactacatttttgtatcctttattggctgctttggacatttctaagtgatattacagtgtccacagttaaattgtggctttatgctgggtgcagtggctcacgtgtgtaatcccagcactttggaaggctaaggcaggagttccagaccatcctggcaacacagggagaccccatctctattataaaaaataaaaataaaaactgaacttgtggctttattcctggcttgagaagagctatctgaaagtccgaacagatgctgtgtgctcacattgttttcaccgtttcagaatgaggttttgtatgtttatatcacttggttcaggctgtgcaaagggcaaagatgatgcccggttattctcctggcatttcacaaagtaaagatgcagccagtattcatctactttaatctataatatcgtccctttgacatgctctagtcatgcacgtggtatctgaaacctctgctcttcctagaggaagtcctggtttgcaaagagttctatcaataatgcatcctgactgcaaagcagagacatttgagtctgcacttaaaagacttaaaaatgttgccagtttttctgcattttaatgtttactaaaggaaatgtgagaagtgaagatggactattgaaaatgcttgacgttcttcagttgttctttatgtttcaattttagcttgccggatgccattttttatggggctttaaaaaatgcagaatggaaatttgattcaaatatgggttgacttcattatcaacagggaactgtgatatttgcttaagttctataggaattttgtttgatgcaactatgtaaagatatcctggtggaactattgtgagagttagtcatggacatgcaaaactctgtgtcaaatctatataatagtaccaaaaagtttaactttgatgccaatagtgccttctgaaagtatggtatcatggatgacttattaaaaagtggagtctttgcttctgatgtaatatacatcttagatttttacccaaaaagcttggggaagaatagttttcacatcagtggcttattatgattacttaaactggttttttgactattagctaaaagcacgggaacctttgcagtaataacttttgcagcggctgcctatcccatcactggtaagtcgtggggggtcgggttcaacttatcaggtatttaacaaacaatactgttaaataattaacagcattattccaaggcatttggaccattctgaccagtactctgctgtttcttatttactataagggaattttaccaatatctgtagttaaacctctgaacctctgttttcaaggattaacagatatagttggatttattggctacattataattgcatcatttaaaacatttattttctttttatagcactttgggaggcagaggcgggtggatcacttgaggtcaggagtttgagaccaggctggccaacatggtgaaaccctacctctactaaaaatgcaaaattagcggggtatggtggcatatgccttgtaatcccagttacaaggcataacttgtaacttgggaggttgaggcaggagaattgcttaagtttgggaggcagagattgcagcaagccaaaatcgcaccactgcacttcagcctgggtgacagagcaagactctgtctccaaaaaaaaaaagtgaatttattgtatttttaaatgacaaatagtaattgtatatagttgtgggatataatgtgatttttttttcttttttcttttctttttttttttttttttaagacagggtctccctctgtcacccaggctggagtgcagtggcacgatcccagctcactgcaacctccgcctccccggctcaggtgatcttcccacctcagcctcccaagtagctggactacaggcagacaccacgatgcctggctgattttttgtagaggtagggtttcaccatgttgcccaggctggtctcaaactcttgagctcaagcaacccacctgcctcggccttccaaagtgctaggactacacgtatgagccactgcgcctggcaatgtgatgttttaatatgtatatacattttggaataataaaatcaagctaattaacatatccatcacttcacatacttattgtgtgtggtgtaaacatttaaaatctatactccacaattttgaaatatacattacgttattatttacttatataacttctggatcagggtggtgacctatggctgacagacaaaatcttacttaccaccattttttggacagcagttttgttggaacacagccatgctcatttgtttagttattgtttagggttgttttcacactatggtggcagagctaagtagttgtaacagactctctgcaaagtctcaaatatttactttctggccctttgcagaaaaaaatttgctgacttctgctccagatacctgtgcagggcttccttttttttttttgagatggagtcttgctctctcgccaggctgaagtgcagttggcgaaatcttggctcactgcaaccttcgcctcccagattcactccttcctcagcctcccgagtagctgggactacaggcgtgcaccaccacgcccagctaatttttgtatttttagtagaggtggggtttcattcaccatgttggccgggatggtctcaatctcttcacctcatgatctgtccacctcagcctcccaaagtgctgggattacaggcgtgagccactgcgcccagcagcttcatttaattgaattgtacaaaaacagttatgttcagttgcaggtttttattttatttggtcaaaatactgaaatatgcttactttatccggacttaacaccgtcaaaaaatgttaatcacttttacgtgcagcacccacagcacatgaaaactggcagttaattgattagaaggagctgggtggcaggatgtggatctggactgtctggcttcaaaccttgctctgcatagatttggtgaccgaaacgttttgtgacctctgtgccttgctttccgtacctgtaaaatgggagtaataataaaatctcccacataaggctgttgtagggtgaaaccaaataaagaatgcagcaagtaaacagtaagtatgagtcattattaccatgcaggtgtgtaagtgcttcccatatttccgagttattttccaaaaattccactgtaaacttgtttattggaaattaaaatgcattttgccacagaaaccgttataaatggagtattgacaagcccatagaagtcttcatttccgctgaatgtagtagttgtacaaattatattttgaaatgttcttggaatgtgggctggacttactgcattataaagatggaaatacggttttttggtaagctgagtataaaaacaaacaaatgatgtccgtagtcagtccttcataactccaggcggcctcactcctcccaatcacgattgtttactcccaaaacaccagaagcagggactatgtcttatatatcttcttcaaaaagcagcatataaaaaccctttagagcaatgtaggttcatttaacatggctcataccatgcagtgaagcaaaaaaaaaaaaaaaaaaaaaaaaaaaataccaaagtcacccagaacccatcaccaaaggttagttcttattaatctcttggtgtagagctttcagtttaaccacatatggccatgcatatatgtgtgctttcttgttaattttaacaaaaatggcatcatcctgcctcatgtatttcttggttttctgcataatttttggcatggtgcattgtattaagtattcattgacaatttgttgactgttaagacttgctttttaaattcagacaacagaatttttaaatgactcacacagagagggctgtttatgcgcctttgaattaatgcctttgaatcgatgactgactaatcgtgtgttctaccaaggaaatgagttacttgaccactaatgactttatgttttagaaatctctacccactgaatatatgggaagcccagcataaatgtgctttctatcattagcacagagtagctttcagctttgagggagcttgatggatgtttgtgaaataatacaggggctctgctgcaagtcttcctctgctaagtggtaaaagcatcctttaacacttcaatgttaagggaatattataatagaatggcattactgtaagtaagagttgggttttttcctctcctatgtttaattgttaagacgagaagagacttgatttcacattgagttataaaattgctcactttatcccttctatatctaattcctgcacattgtcttgtgttgaaagtcagcatttggggcgatcgattgttaatgcattcaggctgaatgcacatttcttctacattaggaaaaaaaaatccacttagaaaatgctgacatcgtttaccaataaaactccctatttttgagttatttgtcctatgacaaggtttaatttgccatctgtttgtcatcaatgttgccacactttttacaattacattgtaagatctatgaggaaaacattacagtgttgtctattgtgcatagggagagagcacttctgaccacttggccgacgaaaagagttcctgcgcaaagcactctgtgctcattcggtccaactttctccaaacttgtttttactcaaagaccacactcaggtgtgtttggcatttttaatccttgaattaggagtccagattttcgtgccagacccactagatttcaaagcagcgtagttgttccgagtgaggtctggcccttggcatccagttcactggaggggcagcatgctatatagcaagacagatgccgggctggagccaaagcttcgagttccaggccacccactctccacgtgactctggggaagtcaactcacctccctgtgccacctcagggatgaacccaaggaagtccactcgaccagcgtaggtggttttgggaaattcactgactattcaaatagattttaaccggctgggcacagtggctcatgcctgtaatcccagcactttgggaggctgaggcaagtggatcatgaggtcaggagattgagaccatcttggccaacatggtgaaaccccgtctctactataaatacaaaaattagccgggcgtagtggcgcatgcctgtagtcccggctactcgggaggctgaggcaggagaattgcttgaacccgggaggcggaggttgcagtgagccgagattgcaccactgcactccggcctggtgacagagcaagactccacctcaaaaaaaaaaaaaaaaaaaaaaaagattttaaaagttcaactcttagcattgcctaataagactattaaaaacaaacatttgaggctgggcacggtggctcacgcctgtaatcctagcactttgggaggccaaggcgggcggatcacaaggtcaggagatcgagatcatcctggctaacaaggtgaaactccgtctctactaaaaatgtaaaaaattagccgggcgtggtggcgggtgcctgtagtcccagctactccgcaggctgaggcaggagaatggtgtgaacctgggaggcggagcttgcaatgagccaagatcacaccactgcactccatccgggtgacagactgagactccgtctcaaaaaaaaaaaaaaaaagaacagcaaaacaaaaaacaaaatttgaaagttgtactgccatcacatttcataaaagaaaatatttttacaccaaaaacgtaggaaggacataatctaagaataaaggacagtttctttattttgaataaattaagctttatgaaaaattcagtgcattgtttgtttttttgtcattcttgctgcaggtcaatgaaaactgatagatccacgggcaggcatttgggaacccatcagttaaagatatcttgggtttcttctgtctcccagagtcttttaaataattggcatttttttccttctgttttttggtatcatagcttcatatctttatgcagtttgaaaattaaccttaggccacaccttcaccaccaaggattatgtgggtaaagacaatgatccgaacggcttttcccagaggcacacctgaattatgcaacaggagtgggagtgagcattgttggaattacctggagttcccaaagcagcaggagagcacaggtgtccggaaaatagctaaggtctctgcagacatagcaaggtggaaaaggtgagaattgtttagataaacaattattccaaactctcaccggaaataactacgatatgtttattttctttaaatcaattaaattctccttagtttttctgtagaaacagccattttattttttgagacttttttttaaattttttattttattttatttgctctgtcacctaagctggagagcaatggtgtgatcacagttcgctgcagccttgccttcccaggcctaagtgatcctcccacctcagcctcccaagtagctgggactacatgtgaagaccaccatgcctggcaattttttttttttttttttttttttttaaggagatggggtctcagtatattgcccaggctggtctcgaactcctggactcaagcaatcatcccacttgtcctcccacagtgttgtgattatagcacccaaccagaaacagccattttaaaccaaactttattttttaggtgtcttcccaaatagtattatccccaagaaccctactgataaatttagggagcaggtacaaatttccctcttcatttcattctgacctgagtcattgattcacgattggcctagaatagtccaaaataaatttttgtttttgttttttttcctgaatatctccttaaccaggccctaatcagaatttatgtaatctacttggtgaaaaatcaagacttaatgagatatctctttatatagcaaattaacagtttttaaaatgttggtcactttaggagctcatatgcaactgaattcatatttattgagtaaccaagggattggtggggagttggtacctttgtctgttgtcctgagggcagccctttattctttgtgtgcagtgatcaatttgtctaggacaaggcggcagtaaccacattccctttacaactaagggaacaagtaccctcctccatggaaggagcttatttgcctgtttgtttttccctggggatagatgtagacatgaaataaacatcttcctcttctgaagtgaagatggttctagcagtgctgtgtttctttaaaattgggtttaccataagaatcattattacttcattcattaattgtttgtttgttttcttttttgggagccagggtctggctctgttgcccaggctggagtgcagtggcatgatcatggctcactgcaacctcgacctgcgtggcttaagcaatcctcccacctcagcaggaactacaggcacgtaccaaccaacatgcttggctaattttaaaaaaattttttgtagagatgaggtctcactagattgcccaggctggtttcgaactcctgagctcaaggggtccacccaccttattctcccgaagtgctaggactacaggcttgagccaccacaacctgctcgttcattcaattttgattaggtccttaccaattagaaaagatactttaaaaatccacctaagggaattaggttttcgagtatgcaaagcatcagagaatctaagttagaagaggctgccaatttagggttgccagataaaattcaggactgctggttaagtttgaatttcagataaacaacaagttactttttactataagtatgtaccaaatattactggggaacatacttatttggaacatacttaaaaaaattcttgtttgaatgactttccaatttaactagttttctgtgtttttatttgctaaatctggctaccagtaataatattaacgcaacagtacctgcttatcttagacattctagcttttgattaagagtatgggcgtgggatccagactgcctgagtttgaatcctagctctgcaacttatagtgtgtgaccttaagcaacttttaaaaatttctccgtgcctcagtttccctgtacaggctgagtatccttaatctgaaaattccaaatttgaaatgctgcaaagtttgaaatgttttgataatcgacacgatgctcttcagagcatttcgattttggatttttgggttagggatgctgaactggtggtgagtgtaatgcaaacgttccaaaatatgaaaaaaagcacaatctgcaaaaagcattttggataagggacagtcaacctgaagtcaaataggttgttatttggtgctaagatgtaaatgtatatgtgtttaattaattttatgacgccttattgagtcttggctacggcatcatggacgtcttacctgcttgataattttaacagtacatgtatgtgtcctaaattttcactaatctatcattggcctcatctgactttggcaattgggaatacattttccatggcccttcttccataactcttcagtaattttcagttatggctcaatcactgtctcatcagcattttctcttagcactatggcctgcccttagaccagaactgggcactgctgaagtggtcttaaaaccacttcatcttccctaatagcaattcatgttccaccccttcaagtatgaagatctttctggtcagtgacaaagagaagtaaaagcataatcatgtcattctgcatgcttacctttgtatatgcacaataatctaaaatattatctttaaaaaaattatatgattatatgatccatctcacattgatttgtattaagtagtaataacactgtgtctaatagaaactaacaaaccattgcctctaaaacagcacctggcatgttaagccacacttgaaacatgcatcatgatttgagatattacatgataaaacatgtgccttagaggatattaattaaggaaaagccattactatgtgctgtgctcacagtgctgagtgttctataattattttatttaagtaaaatgagactatcaggtaggtcctattttatctccatcagcaccagccaatctgactgaacacctgggctggttttcatggtacacaggtcttaatatgtaaatataaaaatgttctcctgtgggaggaaatctcatagttttaagtctttatctaaaactatatatttgtaaataactttctgtttaacaatttatttgtaaaatttctaaacaccttgaaattgatcattgaaagaaacagttttgaatgtctctgtgtgttgtttagattttttttctccatgaagtcaagaagttatatttattctctccatgaagtcaagaagttatatatattctatttattttgttcactgtcatatcccgagcatctaaaacagtgcctggcatgttaagtaagcacccaattcaaattagttgattgttgaatgaataattggaaatatttttcatgtgatcataagtcttcatttattttcgtatattaaaatgtgtaaaatttttaaggcccagcataagcatagcctctctgagaggccatcttgtattccccaagcagaaataataccttctttccctaaacctgatgtaggtgggtttataattttcttctctgaaaactaccttatttatgattattactgttattttgagacaaggtctctttctgtcacccaggctggaatgcggtgacgtgatcttggcttgctgtaacctctgatctgggctcactgcaacctccgactcctggcctcaagcaatcctcccgcctcagcctccccagtagctgggactgcaggcacacgcccccatgcctggctaatgtttttgtttttgtttttgtttttttagagatggagttttgctatgttgcccaggccggcctcaaactcctggcctaaagcgatccacccccttggccttctaacatgctgggagtacagacaggcatgagccactgcacctggccagaaaattacctcattgatgccttttaattcctctaagcttctggagaacagagctgttagttcatcttgtatccctgtatttgttaaataagtagatgaatatttttttttatttttttttttggagacaagagtctcactatgttgcccaggctggagtgcagtgacatgatcttggctcactgcaacctccgcctcatgggttcagacgattctcctgcctcagcctcctgagtacagtagcagggactacaggcgtgtgccaccacagctggctaatttttgtatttttagtagagacggagtttcaccatgtcggccaggctagtctcgagctcctgacctcaaatgatctccccacctcagcctcccaaagtgctgggattacaggcatgagccatcacgcccggctgatgaatatgtttttagtgtacctaacggatacgaaagttcaaaggaaaaaatgcatatcatttgaggggaggactgataactgcttttttcactctttggccatttttcctttgttttcttttctccttgctgtacgtgtcacccatcttgaaagaatgtgctttagttcatttaaaataatgatttcattttgtagcaccttggtaatttattactcttccttaggaggaataaagcctgtgctagttggatgattgctttcgtctttacttgtaatcttttagaaaacaagtacacaaactttccacttggacagtcattgtgaattcttgataacatctggttacttaatttgaaaaatgtgtagctatgaatattaatgatggaccttaactgagttaaattcagacatatataggatctgtattaatctcagtcaaccctttcaagcagatgccatattttggggaaaaggaaattgaaatgtaccaaggagcggtaagttacgtgtcacataaattactgccttatttagggcttttatgatgcagacatggtttttcttgaagttagcagtacttttgcacttttctattatgaattttttattggagaaacttgagtgacattgtttgatttttaatgatctgctttttatttttattttttaatttttattattttatttttattttattattattattttttttgagacagaattttgctcttgttgcccaggctgggcatgatctccgctcactgcaacctccgccttccgggttcaaacaattctcctgcctcagcctcccaagtagctgagattacaggcatgcaccaccacacctggctaattttgtatttttagtagagacggtatttcaccatgttggtcaggctagtcttgaacgcctgacctcaggtgatccacctgcctcagcctcccaaagtgctggtgagccaccacgcctggccaatgatctgctttttagagcagagctcaaaaaagcttaggactgtctaatatttgagccttatttgcatagaaaattagttaaataggatgtaggacctacagcttagggatcttcctgcttccatatatgccacaaaaatctaaggaataaaaatcagttatgggtaaaaaaatagagcaatgggtactgatttgcagaatcagaaccattgttaaactatgactatgacttcaacatgaaaaatgaatcttgtattacttcatttattaatttgaccctggttcctattcataatcagctccatagccatttcagttgtatagtaaaaatggaagctgtaattctccttaatatattttattctgtggttcatcacttccccaggcctccccatctctgcatctttttcctttccttttccttcccactgcagcagaagcacaagagtattcattaatcctgacccctaaaaagcaaacaaaagagagcccacacaaattcatcagttgaagtggaaggcaatttacccagagcaagagcccaccccattgttgccagatgaatggtgctggtagctggagccgaaggaggctgccacgcgaaagacctttgataatgctgcctttatgggagcccagcacaagggaaacactgtcagcagaggctggccctgccctagtgccctgatcagcaggcgcacagagctggcttggcgtcctcaatgacagccaaggcgctgtagatggtagtgctgtgcatgtgtgtttctctccagttttctgaaaagggttgctgtatacacatcccttttagaccatttatcttttgaagtgttctctttaaggaaatgtagaatttctaaaaaatatgctcaattttactgctaatagtaacagattattgtaaaactggtatttactgagtgccatgtactatgttatacttgcagcaataataaaacagccctggatgctggctgtgtcataacatctatctccatttcacagatgaggaaactgaggctcagagagatgaagtactaaaatctactgagtgatggagctaggagttgaagtcaggtcctaatgactttgagagtctcaggggagggaagaatcaggtaaaggaaatgcccactctatagttttgtcacagatagctgagaggttcagtaagaccacagataggaaacgagtttggaaaatatagagtgacatgcaaaggtcaagtatgacagttcagcagcgttgaagccttactgggcaatgactttcccccactgcccatagcttgcttttcactccatttccttccattttccatcttcgtgtctttcttacagtcctctactttctcattttcaaagagtcattaatgttgtttgtgcacttgagaccagaaacccaaaatgagggtaactgagaggggtgctaagggctaagttttggtgacactctcacctaagtgagaacctgacctaaagaggggaatttttaaacaaaattatgagagtccgttgttttggactgatctcatgcagtagcccctaacagaccagaccaaaccaaaccaacatggaatcactcatgttacatgtgacataatcgaaactttaaagaaacagaccaggagatgccagcaggaggaggtccgctctactctaacccttacaaaaagtaacctagagtctttgttccaatcttacaaaccctactgttctgttatttctcaatgatatttgagaacaagtaagtacatttttacaatggtgacagagtgacatcagtgcctaaagttttggtcagtgtctcaaaattgagaggacgaccaaaagagggaaattggactgggcatggtggctcatgcctataatcccagcacattgggaagccaaggtgggaggatcactggagcccaggagttcaagaccagcctgggcaacatggtgagaccctgtctctatttaaaaacaaaaacaaaaaaaaacaagagaggggaattgttaaattaagtttagcctaaagctgcctccttacatattttaagttggatctaaatgttttcttcttttttttttttcttttgaaacaaagtctcactctgtcacccatgctgaagcgcagtgctgtgatcttggctcacaggaacctccacctccaggactcaagcgatcccccgaccgcagcttcccaagcaaatagctgggactacaggcacacaccaccatgtccagctaattttgtttcttttttgtagagaggaggtctcactatgttgcccaggttgatctggaactgctgggttcaagtgatcctctggccttgcctcagaaagtgctgggattacaggcattagccatcacacccagcgctaaatgtttctctgtgcacagtgaactgtagcctaagcagatgtataaacaaactataacctacttttctgccagtcactgagttttggccaatcaaaggtggccaactattcaaactgtgttcaaataaggcaaattctaaactaatctgtaactaatctggctgtttctgtacctcacttccattttctagatatatatttttttgtttgtttgttttgttttgagacggagtctcgctcttcaccagactggagtgcaatactgcaatctcagctcactgcaacctccacctcctggattcaagcaattctcctgcctcagcctcctgagtagctgggattacaggcatctgccaacacgcctggctaatttttgtgtttttagtagatactgggttttgccacgttggccagactggtctcggactcctgacctcaagtgatcctcccacctcagcctcccaaagtgctgagattacaggcctgagccagggccagccctcacttccattttctgtatatcactttcctttttctgcccaaaaatcttatggcatatggcagcactggaggctctgtgaatctattcttgttccagggcggccttattcacgaagcattctttgctcagttaaactctgttaaattaaaataataattataataatcctgcacaatcttattgtggactagaagtccatttaaaaccatatcctgaggtcctatccaggtatccactcctgaccataaggttaaggcagagatcacatattctggttcctgcatagggttctttaggtgaccagtcctaggcatagcttgcagccctcactgggtagctccccctatgagccccctgcctacagcatgggaagaacactgggtatcggatacaaagccccctcatcctaacccctccccaccaaactctcatcttccagagcacggcagtgagcagcaacttctcagccaggcccccttttctacagtaagtcactgcacaataaaatggattaagtaaattaatccaaagatggattaagtaagttaagcttcacctttgtatatcactctgtcttttcaaattgctttcccatccgtcatttacactgtgagacttgcagcttggacgctattattcccacaattgtagctcactgcgtcctccaactcctggactcaagctgtcctcccacctcagcctcccaagtagctaggactgcaggcatgtgctaccacacccagctaattaaatttgtgtgtgtgtgtggagactagactccaagtcctagggttaaacaactcttctgcctcagcctaccaagtagcttggagtgattacaggctaggagtgttctttctccatatatactcaacaaagtatttctctttttagtaatttttgaggttgtggtaaaggtaggtgtcaagaaattgtataaagcagggctgaagtcagcctgataatttattaagcatggaaaatgtatttagtttgatatttgtgcatagctaagatatcccataagatgaaatcacaaacccaggagaatatcttagcgtggtaggatttttttttccaatagagatgaaacaaactggccaaactagcttatccctttaaagaaccacaccttcttgccctcttcttatggaaagatttaagtattttttctgatccatagataatctcacctaattccctctgaggccccagaatctacaacgtggcctcttagaaaaaattacgtaagagtttagaattctggtagaagtcagatctaggtgtttggcaggcctctccaaagacctgttgcccaagtgtctacagaaacatttagaaatggactgtcacctgcagaggcgtgtatgggtggaagggtggggtgttggagtgtctaaagacacggggcacatccggaaggctgaatcatggatatgcctatgggagactgcttccaaattccgtcttaattttgtgagggtgtaaccttgatgacctaggaagttttatgaattcttgtatcatgcaacctttaagatgtaatgataggcattggaactatagtgcacgattcgtttccaaattcaggaaaagaaattgagtgtattgcctatctgaccatgattttgtttttatttttaaatttttattattatttatgtattattattttttgcttttctaggcacagtatgaaaacccaccacatatctatgcccttgcagataatatgtacagaaacatgatcattgacagagagaaccagtgcgtcattatcaggtatgaaaaagatccttatcagtgggcgtggaagatatgagactatgctgtggttatggatttcggtcgataagcagtggttttgcaacagctactgatgtcacagcctggttaatgtgtctgagtagcaagcaggttagctgctttatcttgctttatttataactctatataatagagctccatatcataaaacttttgagcttccatgggattgcagtaagtataataaacatgttttcactgtttagtcaggtgaattccttttctgtaggtccctattttttcattcccttcataatttagtagttcatgtttgaacatttttggtgaactttgtcatttgcattgaatttgggggaagattactggtaattgccagcattaggtgtctgtagccacatttcataatccctctagtctgacatggctctgaatcctggctgggtttaagtcaagcttgtccaacctgtgggctgcaggccatgggccacatgcggcctaggacagctttcagtgtggcccaaagcaaattcgtaaactttcttaaaacattatgagatttttttgcaattttttttaagctcttcagctatcgtttgtgttagtgtattttatgtgtggcccaagacaattcttcttcttccagtgtggcccagggaagccaaaagattggatactcctgccttaagtgcttttaaaattctgcttatttacaaaaattagctgggcatggtggcgcacgcctctaatcccagatactagggagactgaggtgggagaatcgcttgagcctgggatgaggaggttgcagtgagctgagatcgtgccactgtactccagcctgagtgacagagtgagactccatcttgaaaaaaaataataaaataaaattctgcttactaactccagttggggtggctcacacctgtaagccgcagagtttgagaccagcctgggcaacatggcgaaaccccatctctacaaaaaaatataaaaattagccaggcgtctggtgtcatttgtctgtagtcccagctactgaggaggctgagtggggaggatcacttgagccagggaagtcaaggctgcattgagctgagattgtgccattgcattccagcctgggtaacagagcaagaccctgtctcaaaaaaaccaaaccaaaccaaaccaaaaaaaaaggcttataccttagtggaggctgagacaggcagatcacttgaagtcaggagttcaagaccagccttggcaacatggggaaaccctgtctctactaaaaatacaaaaattagccaggtgtggtggtacatgcctgtagtcccagatactcaggaggctgaggcaggagaatcacttgaacccaggaggcggaagctgcagtgagccaagatcacgccactgcagtccagcctgggcgacagactgagactccatatcaagaaaaaaaaaagctctgcttactattgtgaatattttcaaacactagaaagtataagcatccatattctcatcacctagaatttgacagttcacaatcttatcatacgtatttgtgttcatcttttttagttaatttttctgagacatttttgggaaaaaaaaaaccttttattgtggataattacaaatatacacaaaatgagaaagaatagtagaatgtgtccctgtatatctattatccattttgcactgttgtcagtatatggccaattctgttttatttggtcctcccattctgtcccacttgattacttaaagcaaatctggcagggcatggcagtagattcatttccaaggtcaagaaaagagtatatgtaatactagcactttgggaagccagggggcaggaggatcacttgaggccaggaattggagatcagcccggacaacatagcaaaccctgtctccataaaaaagtttttttaattagctgggtgtggtggtgcacacctgtagccctagctactagggaggctgaggcagggagatcgcttgagctcaggagtttgagattacagtgagctgtgcttgaaccactgcactctagccaggcgacagagatggtgttttgttttgttttgtttttttaataaagcaaacccaaagatcccctttattcctcaataattagtatgtgcctctaagaaatcattcttatcacaccttaaacatgaagaattcttttatagtatctaatatcagtattccaattccatgattttcctataaattcttttttatagttggtttatttttatttaggatccaaacaaggcctacacaccgcacctggttgctgtgtctcttaggtgtctcggtctttaacaattttcccttcccctttttgttttcttggctttgttaaaaaaaaaaaaaaaaaggttgtttgtcctgtagatcttactatacagtctggcattgcctaattgtatcctatgatgttgcttaagtattccattgtcccctacattttctgtaaattaatagttatatctaaaaacttcattagacgccgggagtggtggttcacacctgtgatcccagcactcttgggtgggcagattacgaggtcaggagatcaagaccatcctggccaacatggtgaaaccccatctctactaaaatacaaaaaattagccaggcatggtggcgcatgcctgtagtcccagctacttgggaggctgaggcagggaaatcgcttgaacccaggaagcagagttttcagtgagctgagattgcgccactgcactcaagcctggcgacagagtgagactctgtctcaaaaaaaaaaaaaaaaaaaactcgatcagactcagattccgtttttggcaaaggaaacttcatcagtgatgctgtgcacttcatgcctgttgctctctcttcgtgtgtccagattgtcagtgaacccggctgttataaatcatttnnnnnnnnnnnnnnnnnnnnnnnnnnnnnnnnnnnnnnnnnnnnnnnnnnnnnnnnnnnnnnnnnnnnnnnnnnnnnnnnnnnnnnnnnnnnnnnnnnnnnnnnnnnnnnnnnnnnnnnnnnnnnnnnnnnnnnnnnnnnnnnnnnnnnnnnnnnnnnnnnnnnnnnnnnnnnnnnnnnnnnnnnnnnnnnnnnnnnnnnnnnnnnnnnnnnnnnnnnnnnnnnnnnnnnnnnnnnnnnnnnnnnnnnnnnnnnnnnnnnnnnnnnnnnnnnnnnnnnnnnnnnnnnnnnnnnnnnnnnnnnnnnnnnnnnnnnnnnnnnnnnnnnnnnnnnnnnnnnnnnnnnnnnnnnnnnnnnnnnnnnnnnnnnnnnnnnnnnnnnnnnnnnnnnnnnnnnnnnnnnnnacagtctcttcaggggccttggttcttttctttttcctttgcttttccttttcttttgagaccaagtctcattctgtcatccaggctggtagtgcagtggtgtgatctcagctcaccgcaacctccgcctcctgggttcaagcgattctcctgcctcagcctcctgagtggctggggttaaggcatgcaccaccatgcctggctaattctttcgctttttttttttttttgagacagagtctcactctgtcgcccaggctggagtgcagtggcacgatcttggctcattgcaacctccgcctcctgggttcaagcagttctcctgcctcagcctcccgagtagctgggattacaggcacacgccaccacatctggctaatttttgtattttcagtagagacggggtttccccatgttggccaggctggtctcaaactcctgacctcaggtaatccgcctgtcttagcctcccaaattgctaggattacaggcatgagccactgcacccagcctcttttgcatttttagtagacagggtttcaccatgttagccaggctggtcttgaactcctgacctcaagttatctgcctacctcagcttccgaaagtgctgggattacaggcacgaggcaccgcaccccgctaggccttggttcattttaatgggaaatggcattaagagaccactaaactagacaccaagagtgctcactgccctgtgttttcagtgcctatagttctttaaaagtacaaagctagggaatatgagctttttaagagaaaaatgaagttgaaaaattaattgttttcaattaatttttaagatttcagagtttttatttctttgattttaatttttgtatcccatttatcttatgctgaacaatcttagttcctgattacattagcaattatttgcattgcattgtatgcgttttagacagatagaataagtttgttaatgctgttaaagtaacaataccagtattattagtagcaatactgaattcattttaaaatttcttttctggtttttgtccaaatatccaatatttgcagtcaaaatactgggtttcataaaagtcacttaaaataatccttttctatgtcaacctgacctacagttgggttcatttatttcatttacaatttcagttgttttgcatttttaaatgtaattttgtttttataattatgcaaaacatttacatggttcccaagtcagtactgcaaaacatgagcactgaagcatttcaaggtaaatacatatctgaagtatttggaggtaaatatagacttcatgacattttacccctaaatatttccacatgcatctctgagaaattgaaacattttcttactgatccgaagaccattatcataactcagtaattaatagtacattttcaacatcatctaaaaacttcaaacttctctaatagtcgcaaacgtccttttctgctggtttatgcaaatcaagtaacgctgactgcatttggttatgaatcataaatttatttttatcctaccacaattgccctattactgctgttttttttcatgacactgactttttgaagagaccaaaactagttttcctacagacatcatttacatttgtctaattgcttcttcctggtctcactatacttattccttcagttggattttctacaagtttaaggttatatctaatgacttgatcagatgcaggtgcaagttaaattttatgaggaggaacacctgggtcatgttgaatttggttgcttaataggaaatgcttctgtttgatactaagcggaggtcaccgactactagagaggcaggaggtattttcctagctggaatttaatgagggtccaggatgagttttctgatagagtcctctgccctttctctttcctcacattttccctcttctgggtgtgtgccaaaacgagtgggatgggaatggtcttcttacatgagcttgccagtctggaggccccctcagtcttctgcagcccacgtgtctccctccacctgcactgcaaggtccacctgcactgaagcgggatgatgcccacttcagatccttgtttccagctgttcaggtggcagagatttcaaggacctgctcccaaggatttctgttgcagtggctgtgttttcatttaggagatgtgctttaatttaggagctacctggagttgggccaaactccaggttaagggcacaggcctcctcggtagactgcccaccctgcagacatcagctgcatgttcagggctccccaggccaccctcatcaattcaggggttcccactaccccccgcccccgccaggttcagtagttcactagaacaactcacaaaactcagaaaagccctacacttaggattacagtttcgttctggcaaaaggaggatacaaattagagccaaacaaaagaggttgagggcgaggtctgggagggtcccgaggtggagtttctggttttcctctccctgtggagtcatggacagcgctacctcctaccggtatgaggtgtgacaatactcacagtattgccgaccagaaaacatcacctgagcctctgatgtttggcctcgatcacgcaccgcctgcctggcccaccttcagtttccagctgctctcgaaggcttgtgcaaatgcctttagtttccagttggaggtcagaattgcgatggtatgtcccaaagcccccgacataaatcatatcgtcagactctcctatggtcaaagcccccaagaaaggaaaagcactcctcttaggtaggacattccaggggcatagacatcaccgcccagtcaccgagggcaaaagcctgagcccttgagttaattctcttctgcaccagggctgtggtttgtctgctttgagaaagcaaattggaaacctctggcatgccgtggttcatgctcacctgaccctgggcagcacgcctcacacctgtctgggccttggctttttcacctgtgaaggaactggttttggaactcttccttccaaataatgttggagaggaggaaaggcagggaaatcctgttctgggtggaaaggccaagtttgtagcccctgacactggatggggcaagtgctccatctgttannnnnnnnnnnnnnnnnnnnaacgaaaaaaccattttcttggaggctggaagagaagcctgctcctcatgctaagggattctggcatggctggaaagactaggaatctttagtgtcatttaattaggaaataaaaagtgagcgatgacctaatttctatggtggtgttttagacttccacctcccagtttccctggtgtgactttgtctaaatgacactttagatggcataatgcagcccataaaggcggcgtttctagtttcctgtcagtcttactcatattttccaacgcagtggatacggtgacaggatggacaggcacctgaccatttcaagactagaaatgagtgtaacaaatcggatttttttttttttttttgagacagagtcttgctctgtcaccaggctggagtgcaatggcgtgatctcagctcactgcaacctctgcctcccaggtccaagtgattttcttgcctcagccttctgagtagctgggactacaggcacctgccaccacacccagctaattttttttgtatttttagtagagactgggtttcaccatgttggccagggtggtcttgatctcttgatctcgtgatccacccgcctcagcctcccaaagtgctgggattacaggcgtgagccaccgcgcctggccacaaagtggattttgaaagaaataaatcaaggaaggagacgtgctgctttctcaagcacagggctccatggacgcctaggtccatctacaaacttgatttgtcaaaacagctggagttgagcagccttgggtagactgacttgccaagcaaactcacaaggaagtgtgaatcagaccccaattcattattgcataggcagaattctgcctgtggacagccgattatgtgccctggaacacagtccacgaagggagctagattaccacgagaacgctggatagaggggtgaattctgagcgaagggatgatcgtatttgctaaatcagctcacagcagtcacctctatctgaagatgtgaacacatgaactaagggtgttgctctagtctgcagaacagtctttttacttggagaaaaccccccatctctgctgtttactttcctgtcctgactctgctgtaagtcaaccccctttcattaacctacactctctcctgccaagccctgatgtctattaggccaacttctagtaaggaataaacacctggggttgaccttggatatttcctatgccttcctcctcagcccactggcagacaaatcaggaagagtggcttctatggatgctaacttttttttttttttttttttttttggagatggagtctcaccctgtcgttcaggctggagttcagtggtgtgatctcggctcactgcaacctccatccccccgggttcaagcaattctcctgcctcagcatcccaagtagctgggactacaggcgcccaccaccttgcctggctaatttttttgtatttttagtagagacagggtttcaccatgttggccaggctggttatgagctccagacctcaagtgatccacctgccttggccgcccaaaatgctaggattacagttatgagccaccgcacccggcctatagatgctaattttatctaccatgccttgtgttcactaatttatccttttttttttttttttttttttttttgagacggagtctcattctgtcacccaggctggagtgcagtggcacactcttggctcaccacaacctgtgcttcctgggttcaagtgattctcttgcctcagccttctgagtagctgggattacaggggtgtgccatgacacctggctaattttttgtttgtattttttagtatagaaggggtttcgccctgttggccaggctggtcttgaacccctgacctcaagtgatctgcctgcctcagcctcccaaagtgctctgattataggcgtgagctgccatgcctggcctaggttcaccaatttaactttctagggataagtatttctgattcctgaattgccttactagttcagtggctctacagatatgtaggctccacctccagagattctgtttcaactgatttgtggtggccttggagcattaataccttttttcaagctcccccagctcactctgcttaaaagccagggctaaggctcttgaaatcctgatttcaggtcacctcttgctgttagcaccatcagaccccgcaagatagacttcctgagtgcctgccctctgctggttgctttcgtataggttgtctcttaatccttaccactctgttggcattgttttttgaagctgcatctaaaaaatgaggcttaagagaattccaagatccaaaactagtagatggcagagcctctatttgaatttagccctgtctgacttcaaaccttatgcactttctttatacctattagcagtgatgtctctctaggtctcaaatttcccatattttaatggagatgtaatagttaccatataccataggacagaggtcaggacaggttcgccaggttagttacccctggacttgagctcctaggattaaagtctctcactctgtccccacaaatacaggtgcttttttattttagtttttgaaaaagagtctcgctctgtcacctaggctggagtgcagtggcacaatttcaacacactgcaacctccgcctctcaggctcaagcgatcctcccacctcagcctcgcgagtagctgggaccacagatgcgcaccatcatgcctggctaatttttaaattttttgtagcgacagggtcttcttatgttgcccaggctggactcaggtgctttttaaaactaaccctttgtcattgttggccgtgatgctctctgcatacccaggaggatgatgattgggcttgtcatcaacggaggataaatgacgcacagacttagttaacagaagaacatgaccttattgacacattagctttgatttcttaccaagaggtgaagatgcatttatacaccaaatggccatacctgggcagtttctgtattttacctgacttgttatccagtggatttgtctgggggccagagctcagtcttccccttcttttcatggttctctatggcctatttctatattatagcaggcctctgagcagagacatgatagcactgacacctggttcaaaaagataaggttactggtagaaaagagatgggatgttgagggaatatggaaatctattgcagcagtgagggcctgacctgagttagaaaggcgaggaggaagccgacgtatgactttcagtaagcctgtaaagaaataaaggaatgggcaagtgtgaaggtagactctgggcagtgccaacagaaaaatgcaacagcaatagctacattagcatcattaagaatgatagtgaagctgggcatggtggctcacgcctgtaatcccagcaggtgggcagatcacctgaggtcaggagttcgagaccagcctggccaacatggtgaaaccccatctctactaaaaatataaaaattagctgggtgtggtggcaggcacctgtaatcccagctacttggaaagctgaggcaggagaatcagttgaacccaggaggcagaggttgcagtgagccaagatggcaccactgcactccagcctggatgacagagcaagactctatctcaaaaaataaaaaaagattaaaaatttaaaaaatttaaaaaaagaatgataatgagcacctgaaggcttggtaggtacctgtgagcccagtaaatgagccacccatatctgcttagctcattaatctgttctccaaaatccagaatttggatttgtgcattaaaaccacatatgtgatacctttggatgtcaagagacatctctgcaaatctgtttaacaaaaaggtcatgatgtggtaaaggaagaactggcaagctttgttcatgatctctaccatctctccatcaccagacaagatcttgacaatgtggccagaggcatttctgaagcccttgccaactgacccatggagaatcatcgggccttggagaacatttatgtggcagttttattgctgccatcaaaagtgaattcttatcacttttggcctaaatcagctcttgcaccttaggctgtttaaaaaatatgatgtcaattggaaagcatcccatttggtgctgtttctactttttttatttgaagtatcctgacgcagttgttttctggtgagtagaccatctgtcctaaatatatccaataccagtttgcaaagtctttgtcaggtgcatcctgcatagaagctaaataaatacttttttaaataataaatagaggcgagagatattttgaaggtacatcagtgggatttgctgactgattgagtaagagagttttcatagaggaaaaggagatagtagtcatcactggagctaagatttctgacccgtgtgcttcaacatatattttagatttgaaatatgtaatttttgcagtagtaaagataaaagggaaaaattcccagtgccgctcatatttggctcgtgggtctctcgtgctctttgctgtggcaccatcaggtgtctccggattctcaagctatcttcctgcctttgatgtatttcaggaaccttttattattagcatggggacgcttttcagggctctcctgagttgctgtgggtccacccaatttcttgtttatcccagcagcaccggcctttgacctcgccatccccctggcctggctttgggaggccctgtcagcccatacctctgactatgacggggttgcatggggctgccgctggctgtaaatctgaagagcaagggcctagattgaccctgttccccaagctttctgcaaatcttacattctagtctggttgctaaaattcctttatcatcagccaaggagtgctattcaggagggctgcctaattaatatattacccataaacataacagcaactctttttcgagtacttgctttgcatccttttaattgtatcatttttcatctttacgtcagcctagcaaactaggtattgctgtcccctacttttgcagatcaagaaactgagtctcaaagaggtaatgaaactgttaaaatcttgcatttgaaatgtgacaaagttgtgctcccagccagagctgcccgcctccgatacagcagtctttatacttttctctgctgctttgagccagcaggtgttaggttaactggttaataatccattaccactttcagtcatgaggtgcagtggaaagacctctggggtgagtcatagggtagactctattctctctgtctaaggcgtgtgacccctgcaagcctcagttacttcatctataaattgggaatttataccttaaaggaatataaagaaagtgtaatgaggaaatatacatggaaaacattttttaactcttaaagagtaatgtaaaagatctgctagtaacattcaaaggaatttcagagctgggaagtagctgggctgggactcaaacttggtcttcatactcaacattgggttcctctgactgcatcaggctgggccaagatgagcattgccatggggccatccatattcttggcagagtaggtgaaaattttgtttgcttgacaacaccaattaactagatatttgtctggggttgggaagaaataacagctgttggtcttattcacactttcctcaatctgttaaggaatgaatttgtcttatttaaccagtggtttcagcatggctgtttgtttttgtcttttataccattagccatggcatgtatttgagaattagttttttagtgtaattctaaagtccgatggaggacccctctctccatgaccctggaacctcccagatgtgcttcacctccgacttgtttctgttccagatctagtagggctgccaggaagcggagtctgtgaattgagccattggagaagactgtccaggaccttctttgatgtggtttctcattctcgcagaattatttgtcttatgatcacagtgatgtaggctatttattatttgttagttccaactctgcgtgaggtaataaatgttgttggcagaaggcttgcttaaatgggtgtgtatcagtaaagactcaggagtagctaaaagtttgctgatactatgaactgtgctgttcatggggttcctttgtgaaaccttgttgatttttattgactagtcaacccatatgagggtcttaaaggtttaccgtcctctgagcagtagagctcttgcccctgacacagactctctcacctccttttctagctcttccactcactagctaagtggccttcagcaagtttcttaccttttctcacttcaaataatggagattataaaagcacctaccacacaggactcttatgtggaccaagtgattgacacatgtaaagcacttataacagtctctgacatgcatgatacacacaatgaacacatcgtacctccaattatcatagccacaatatttcagtgtgttcctttcaagcctcctttggaattgatgttatttctcatcgtctagactatgttttaatagatgaacaactgcgttcatcttttataactctagaattacaaaaattggtttttaaaaactatcactatatttttaatccttgggttataccttttgaaataagagttgtgttcaatactatatctctctatatttgaaaaaaaaaaaaaaaaaaaagcagggtctaattaaataagtccagtgggaatttccactgtcttgtttatctccctgacacattgacatggttaatcccaactccgttggcccccatgaagccacatgcatcttcctgcttctctgtgtacctctctgacttttctatcttgttctctgtgtttgccatgttttttgccctttacagctttaaagagttcaggcattaaattttgtgggatgacttcaggctgagtctacccatttcctcgtgaccaggctcaggtcatgcattctaggctggactaccatagaaacaatgcagggctcttgatcacctggttctgtaggcatctgctaggtttcttctcattaaattaattttattttcttttaggatgtgtattttgtggggatatattctcagatcatgacaacatccttctccacatccaaacctccacctaccagccttagcatccattaatgactcctggtcacctgtatgatggctgccaaatggtgatatatctgtttccatcattccttccacatttattagttggtattccactgtgaggaagagctttcctttctctcctatttactgattgactcgtttactttcgtatggcactatggaattatggcttcctattttattcaaaggatcgtaatccattattatcattacttattttgatttggccagtgggaaccccttccagctggctcttatatgcttgacacgtccacaccagtcactgtacatttccttaccttttggcacagttatatgttccacgcccagtttgaattttccccactccagccctggcattggtcatttcccaaagcagcccttgttctttttattgaagaatagtattcagagaccaacaaaaagtgtgtcaattttgaaaactaagtaaataatatatcagttgttctgtataggtaaaggcaagttcgtcggtatgctgccttgagaaaatggaagtctagagtctatataaaatgtagcacgaaatggcacaggccagaacccttggtgcatccccaaacctgaacccaaggtcactgtcttggatctctgcactgccttccagttccactccctacccctcccagcttcccacatcacagtcaaggcctattatttatttacttgtttattttattttattttattttattttttagagacaggatctcactttgttacccaggctggagtgcagtagctcaacaatagctcactgcagcctcaacctcctggactcaaacaatcctcccacctcagcctccaaagtaactaggaccacaggagcacactaccacacccagctaattatttttaattgtttttatttaaaaatttttatttttatttttatttatttatctatttatttttgagatggagtcttgctctgtcaccgaggctggagtgcagtcgtgcagtctcagctcactgcaacctctgtcccctaggttcaagtgattctcctgcctcggatctcttgagcagctgggactacaggcgcatgccaccacacctggctaatttttttgtgtttttagtagagacggggttttaccatgtcggccaggctgctcttgctgctcttgaactcctgacttaaggtgatccacccgccttggcctcccaaagtgctgggattataggcgtgagccactgcacccagccaattgtttttatttttatttgttttattattattgttgttgtttcttttgtgttttggggttttgtttttgttctttttaagaaacgagatcttgctgtttgctaaggctggttctccaactcccttggcctcccacattgctgagattacaggtgtgagccactgtctcctcaagtcctgtttaactacccatggttcccttcatgtgtaccccacagaatttttgcctcttatgtatggctcaggcttcatcctagcccctgacatgtatacacacaagtacacatacacacacgcaacacacctggctgatttgattgtccttattgagatgtaactagttgtgacttcgtttagtaatcttctgatcagggatagctgccacccccaaatccctaaagccatacccacatctccactgtgttattaatagcctttgtatactcgacttccctgtaagacagtgagtgagctcttctctgacaggagccacatctcattctggccttcggcttaacacactggggcagagggggttgttagacagtgtgtgttgcatgaacaaaagtagacatcatttttgttttaagtgtttgtcctttttaaaccacaaacaaaaagttggaaaagtgatatttcaattacgttgattcagccagttacaagggaacaccagttcctgtggtacagagccaggagagagatttttagatcagaaatgggggatgggggtgcattggtgagtcgtccaacagtggtaacagcggatcctacttattttagggaatatctcaaaaaatcaaaataaaaaagaactgaaatatttttacatttgctgaataagttgaagtgaatagaaaatactattgacttttaagtgaggaataacctttctcagaaaaataattatggtccttggattataccattgtaaatggctttttttccccagaacattctttccatttcgttgatattttaccgtatgtttccatttctatagttagtacacagaccccccccacacacagacacacactctacaatacttcctatttgaattaatatttcctataaagtctgttatgactttgatttaaaattgcttggcttgttcccagctggctatacaagaactagggagtttgttagaaattcctattcctagactctgtccctggagactgggatccagcaggtcagaagacgggcccagacatgggcaattaaaaagtactctgacgattctgatagactgccagatttgggaaccactgggatattttcctaatttctagagtatttgtgtgtgtgtgtccattttataagtcaattaaattaggacgggctgcctggaagcgtaaacaaagcaaattgctgtacaataactgctgtgagatgcaaagtaaataatttgggatatattattttgtctaagaccttcactttcttttaacttgggttttagtgccggagaagaaacaatattttctcatcccaaacaggccagcataattatggttgcatatactgtaggtttcaagtcattctgtaacattccattattgtaccatattttgaccaactcaccagcctctgatcaataaaaattcttcttaagtgtctgtaaattgaaaccaagtaatgaaaattccgatcaatgtttagtgagaactaattattttaagtctgctggaaaagatcatagttgctgagaatgcagatatcctatttttggaactggtatacttattttgatatattaaaagagctactttccattattattacttgcttttgtttccaacaaaagagacaaaatatttcatgtctgaatacagtattaaccaaagacacagtgggaggattactgggattactgtccttttataattcttttttaaatttaataaattcccctttatatatattattttataattcttatagggtttgctcacgcttgctctctctctctttcccagcttgttctagtaaagtttaaatgtgacagtgtaaacttaaggaaaatatacatacttatggtgatatgtaggaagttgaataataataatgtaatgaaattgatcagtggtgattattgtgaggtgtgatccctccctcttctctggaaaagctgttttaaaaaatctgaaatacacaaattttaaaaaataaaaaacacacatatatatatattttttgacacagtttcattcttgttgcccaggatggagtgcagtggcacaatcttggctcaatgcaacctctgcctcccgggttcaagagattctcctgcctcagcctcctgagtagctgggattacaggcacctgccatcacgcccagctagtttttgtatttttagtagagacggggattcaccatgttggccaggctggtctcgaactcctgacctcaaatgatccgtccaccttggcctcccaaagtgctaggattacaggcacgagccattgtacccggcataaaaatctaaaaaaaatagaaaattatgagaaagcacatgaaaaggaaaaagagccaggtgtcgtggctcacacctgtaatcccagcactttgggaggccaaggcaggcggatcacctggggtcaggagttgggaccagtctggctaacatggtgaaaccccgtctctactaaaaattaaaaaattagctaggcatggtggtgcacacctgtaatcccagatacttgggaggctgaggcaggagaatcatttgaacctaggaggtagagattgcagtgagccaagattgtgccactgcactccagcctgggtgacaaagtgagactccatttcaaaaaaaccattcctataccagcctcctaacaagtaaggaatatttctttttccttgtcaatttgtttttgcccatacattattttcacatagttgtaaacttgttataaatatagtatcttctattcacattaccacttaacttaggctgcattatctttatgttgctacatactctttgtaagtacttcaaatgcctgtgcagtattatattgggtggttgtgccattgtaagcttggactttccaatattcttgaatgtttacattgtttacaacttctaaaatggagtttcattgttgccaaaccgtgtaattccaatgagagagtgtgtgtgttgaccctggatctagtaaatacatcatctgagtatgtcaaccatttgaaaagataatttccccatggagttgaatttgcccgacctagttgctgcctgtgagtaagcatgtcctctggaagagtgtgacacctcgtcccaggcttgctggttttctacttgctactgtagcttacgaaatttcagtttggttttcttattcatgtgaccaggaagccaggagcatagcactaggatggtgagtgacttgcataggtgggttcagacttttgcaggtcatgagctctgaacagaggatggttcccgcctccccataatttctttaaaaccgtattattagttcaaggaaattcagcaaagttctgagtttcgctatatggccagctcaattctctgttcatttgtttcttttgttttgttttgaaatgtaaaattatttcaaatttcagtttccttttgggaataggagtgtcaccttgcttggttgttccccaagcaaatgttttctctttccttgagtaactcagcaatcgataacaattaatttgggctggatattcatagaagaacatttgctctgcgccctaaaattttttatcgcgaagcgcgaacaaaaatattgtcctatgaacttgtagcagtctgcatttttcatactaactcccaccatcattttatatgatatggggttctttaattctatcctggtaacacaaagggtaccaatagaaagatgaaaaatctgactgacttaagcatgttttgaattgaggtcattatcaattcagggggattttgtaggaagaatggggattttgaagagcagactatatattattaacaaaaggctctccccatgcaggaaggctacccagcggaaggtggcctttgttactccggatgtgattaatattgcttcaaggtttaattttagaacttctaaaataaggaagcttgcatcaattcaaggcacatggtttgaaacctcagagtgcccactttttcttttctttttttaaattacaaaaatagcatatgcattataaaatgtttgaaaactaatgaattaaaacaagtttctctagtctctggcttgaccaaagcctttgttaatattttgtggtagttccagtcttttttttaagaaaaaaaaattgtaatcatgttttgtatataacttgaatgacttatttcacttaacatgatttcatttgcttgtttcctgtgtttacagtcttcatgtcagttgtaatttatgtagaattccacccttgtgatactccataattttcctaatcatatcccccattattgggcatgtaaaatgcttaatggtcagtggtgtgcacagtggtaattatccacaccatgttaatccggctcacacgggtcacatgggcgacctaatcctgctgtaacttgcctttctctactggtattgtacttaaaaaaaaaaattcttttctgcctgttttttttgtttttttgtttgtttgtttgttttgtgtgatgggggagacaaggaagggagctggtcgcaatccacttctcaggtggattctttgtctgtctttctttagtggtgaaagtggtgctggaaaaacagtggctgccaaatatatcatgagctacatctccagagtgtctggaggagggaccaaagtccaggtgagtgggcagtggcccattatgataccttatgttatgggaaatgtaagaggctccatttgctgttagaaaagaatttttcttccacagaaaagacactggttcttctataactgtgaaacttgaaatctggaatggaaaggaatagcatatgtatgtgtgtttgtgtgtgtgtgtgtgtgtgtgtgtgtgtgtgtgtgtgtgtgtgtgtatattttttttttttttttcttttttgagacagagtcttgctctgttgcccaggctggagtagtgcagtggcgcgatctcggctcaccacaacctctgcctcccgggttcaagagattctcctgcctcagcctcctgagtagctgggattacaggtgtgccccaccatgcccagctaatttttgtatttttagtagagacgggggtttcactatgttggccagtctggtctcgaactcctgacctcaggtgatctgccctcctcggcctcccaaagtgctgggattaaggaatagcatattttaaggtagatgtgcctaatatataatgaactcctacaaatcaataaaaagatcagcagcccaaaaggaaaataaacaaaggacatgaaagacaactcatagaaaaggaaatataaattactcacaaaacatgaaagtatgttcaccatcatgataagaagaaaaatgcaaattaaaactgcattagaaaactattttttgcctatcagattggccaaaatcttaccatgttttaaacgcttgattggtaggaagtagggacacagttgttctcatacattgctggtaggagatgaactagtacattttaatgaagaacatttcagcaaaatctgttaaacttacacatgtatgccattcgactcagcagttctgctgaaaagaatttattctttagatatgctgaaatgtatacaaaataatacatgtataaagttatttctgtcaattttggtaatgcaaaagactggaaacaacttaagtgttcatcactaggcaactggtgaaataatttgtggttctttatataatagaatattatacagcaataaaaatgaggcttcatgtaccgattgtactgatagagaatggtctccaagatgtatcattaattacaaaagacaaggttcagaacattgtttgtaatatatgctgccatttgagggatcaaaagagagtgcacatttgtatttgtttgggtatgttatcacatatccctcgaagtatacacaagaaactgtcaacaatggttgtcttgagggaggggagctgggaggttgggagaagggcctacccttcctgtataccctttagaaacttgcatggtttgagctatgtgaaccacttgccaattcaagaaacttataaaaattttaaaggacgtagacagagaaaggatttaagagaaggaaaaaagagagattaaagagtgtaaaggagtgttgggaaagagaaaagatccagagaatgaggatactcaagaggtgaaaattaaaatcagcattggcaggaatgagtaaagcctgctccccagagccatggatgagggtgatggcgagctaaggtccataaggggcagcccaagcttggcgctcatcaccagtatgcaccgctggtgacagaattccttccaaagattagttttttaaatcagaattatgtaatgttattgccatggtcagctgtagactttcaaaagacacataaaattctctttattgtggttcccttttttttttttttttttttgagatggggtctcactctgtcacccaagctgaagtgcagtggcatgatctcagctcactgtagcctcctgctcctgggcttatgcattcccttccacctcaacctcccaagtagctgggaccacaggtgtgtgccaccatgcctggctaatttttgtttgtttttggtagggacagggtttcaccacattgcccaggctggtctcaaactcctgagctgaagcgatccacccacctgggcctcccaaagagctgggattacaggcatgagccaccatgtctggcccctttctattaattaaatagtgttctatcatgtactggtagatcagaaagcttaaggtagagccaaacattcctcctttgagtttgtggatcaactctttctatcttttgtttgcgggccagacgtgcctataccatttaacgacagcttctgtcagggagagaacaaaggacagaatcttctctatctcttcccttctttaattacagactttaaaactgagaatatttatggatccatccatccatccatccgtgcatccatccatccatgcacccatccatccatccatccatccatccatccatccatccatccatcagtgatcagtgatgtccaacagaattttgtggcatgtggtgagcatatcagggaaaagagaaagagcaaactaaggttgcagagtgaagggtccttaaagtggcctctttctctgaatgaaaggaagatggagagcagctctgtgcagtagaaagatgaagcaagccatatgtgtaattctaaattttctagtagccatgttaaaagaagtaaaaagagaaaaaggaaattactttttaaaacagtattatttaacccaatatgtaaaaaaagattttattatataattaatataacaaaattaatgagatttttttttttttggtactaagtctttgaaatacagtgtgtattctacagttacacctcagttggggtagcttatggcttccctattggacagtaagggcagctatagaacctaggttcatgtggttcagtccacttgcttttctctattcctgtgattgtactggatcctgagagggttgacatggagacaagaatccaggatgctgttttgctgccttttttttttttttttttttttttagacggagtctcgctctgtcgccaggctggagtgcagtggtgcgatctcagctcactgcaacctctgtcttctgggttcaagcgattctcctgcctcagcctcccgagtagctgggactacaggcgtgcaccactatgcccagctaatttttgtatttttagtagagatggggtttcaccatgctggccaggatggtcttgatctgttgacctcatgatccgcccgccttggcttcccaaagtgctgggattacaggcgtgagccaccgcgcccggccgatgggctactcttttacctcagtttgctctttctcttttccctaatatgcccgccacatgccacaaaattctgttgaacatcaccgattgttgatgaatacatatggacggacggatggatggatgaatggatacataaagattctcattttaaacactgtaatttaaaaagggaaaagatagaagaagattctggcttttgttctcttcctgagagaagctgagttttgttaagtggtatgggcatgtctggccagcaaaaaaaaagatagagttaatgaagatccacaaactcaaaatagattttacaaagaaaagcagagtttatataaatccatgagtttttaaaagagagtaggcaggttgggagtatgtttctaagctttgaaactgacccatgaaaggaccacccagaattgcccttggtgccatggctaaggatgattccctcgtcacaatgaaagcccagttctcatttctcatggcagtttctcttctgaatgttcaggagggtgcctgttacaccctttgtaacactttggctgttacatagtcagttagtagttcattaatttactcctctttgctacacccctacgacctagtagccagactgcagacagttaatgttgatttttctcttcctgttttcctatgaggacaatgatacagagcccttggcttggaattagtcagtagctaaagagcacaagccagaagacttgttatttctggaacatgtttaaccatagcatgtgaataattagaagtacaaggaatgactcacttgttgaaagacttctccaacatcaaattctatctattgagctgtctcatgtctatggtgtgttttgcacacttctgcatagaactgggatgtttgaaaaacaaatccttccccccaggccaggactcgttccacacgatccactgttgacccttgctgcttaaagtgtgtatcagtgctggcaaaaccagcaacaccagggagctggctacaaatgcagattcttgggcctaccccaacctactaagtccacatctgcattttgacaagatccccaggtgattcatgaatattaaagtttgagaaacaccaggctatatttccataaccttgtttggggaggagaagtggattaattttccttaaggtaacttgcagtgaagcaggtggagatgggatgagatgggttggtagagtagttgggaaggggtagtgagaagaaagaccctggccagaacagcaaggacacgccccttcaggtaccacttcacttttggtgaagttgcagcaatcaatttggacactgagaacgtttgtatgaatagttcctgattgacagtggggccctggctcctggggactctgcatcaagccatgggaattggaagacccaaatacacaaacaggttgaggtctgtcatggtgaaagaataaatcctccagaaaccccaccagtgacacacgggtgtggggcccctcaccttaatgcattcagaaaccaggtccttagagaaggtttggcgtacactgtgtggtaggtgttcacaccttcctaacctccggtctatttgctgggacagcacgtgaaggacattatcctgcagtccaacccgctgctggaggccttcgggaacgccaagaccgtccggaacaacaactccagccgatttgtaagtcccttccctgtttcagagagtgtcgcttgattgatgatgttgatgcttctgactgaagtctagtatcccacaggaaatgggagcctttcacatatcatcaggaggccacctcttcgatctttccttcattttctatagcagcatgccgccaagctgcagtttgcctttttttgcgccccggggatacaaacaagataattttgaaaatcattttccacatcagttgccttactaaggaaaataaatgatgaaagtggcagctttggccttggaggagttgtctttatgccctagagaaaagaccttctttcccagaccaagaaataactagagtagaggggtatcccaggtatcatttcccactggcagtggttttgcttcttagaacttggtccatagactctgaagggtgcacagagttagactgatctggcaccttggagagaaacttcctcctctccatccctcagagcgagctgcctgcccaccgcagccctctggctttgtgcatctgtcttatgccctactcatgtaacctaacgacatcccaaagtgactggacctggcctcacaggttgcctcttaactggcttacctaactggtaatgaaaatgtcaaccaagtgcattgttatgaatgctcatttagtcatgtttctgtctgggtgtctccagagggggtaaataggaaagctggcaaggctgaatatgaatatgttccccttgacaaaagccacatttacaaagaaacaaatgtttatccagtaaccttgatttatatagattttgcatcttatttcaaccatagatcatgtctggcactaaagcattcacggagccatctgtgaggctgattctggaacgttttaaaataaataagtgggaattttggagaaaaacaattttcttttccactgtctattttggaaagaagcttctatttccaagagaatttttactatgtgctcatataataactgtcaagttccctggtgggttctatctgttagacttgcccttactttctttgctttccaatattattcaaactactcatttgtttgtctctcatatttgggcccaatgcctgagttgtgttatcctgaagaagttttccagataataaaataggaaagaagaattaaacaaattttccacttgaattaattttcaatctaaatcttataaaaatggacttgaccaaatttaactctttatttaccttttcccctgtcttggattccttggagaccagaaaaaaaaaacaattaaattgatattttcattgatttttgcaatataaattattcattatatttggaggatatatcagtttctgtaaataacaaaaacactcaacatttattatttttctaattgcaaaattttatacaaccctgatagaaagattggaagagacaattcagacacacattcacctgcacacacacacacacacacacacacacacacacacactgtctctctctctctcactattcaccatcatggatgagagaaatgtaaatgaaaaccacatataattttctgtctctcaaatgggcaaacattaagttgattgataataatcgagaaaacacgctattggttgagaactgacacattcttccaggaaagtgattgggcaattgttattaaaattttaatcgttcattatctttgcccaacaatacttttagaataaattacataagcttcctgcttaaataactacttattttaaaagatattcataatatattgttaaattaaaaaaacagattacagaacaatatttacaatatgttcttgtttttttttaatgtgcacattatatgaaaggtaactaagaggtatgtaaatcaaagtttgacatctatgacagtaattatttagcaagagaatgaagaagtggcatcagggtagaattatgagtaatttcactttaaaaaatgcacaggtattatgaagcataagaatgtatatatttaacacttacaaatcttttcaagttaaagaatgtattacgaaatacttcaaacacgatttaaaaacaatgcaatgaacatctatgtatctggcacccagcttaggaaataaatcattaccaagagtcgaggtgaaacttcttttcatttcattatcaaaatgcaaatgcaaccttttattccctttataaaatttcctgtcatcccccccaggctgctatacagcagtcctaaatatgttaaccttttgttagaaattttaacttttatatgacaattatgagccatgcatatgcattttattatgttagagcagtggttctcaaccttgaccacacataaaaatcagctgggtgctttttgaaaaccacacagctccgggccctggtcctagagtctgatgtgcgtggcctgggctgacagcatgttggaaaggctccccaggtgtttctaaggggcatccaaggttgagcactgctgctaggaggacttgggagcttgcctgtccaacacctgcccttcctgggtcagatgttctgtttggtttcattttccctcaactgttgaggaatgggggacaggcactgaagtattccctctatcacatgccaaaaggaaagggtggtgaaggtggccgccaaaggaagcacgggagctctctttcagtgagcttttctcaggtgccactgacattccgcagagcgatggctggtggttctctgtgcctggtgctgctgggtgtttttgttttttgcctggaggaaaagaatcatcagattaagacacatagacagttagaggctggccgccttcggtggtctttcttgacacctagaataattacgaacaggaacacggcatgtactcacacatttgcagtgtgcacagtacttttcttgcccttaatgagtttacagctccagtcacagacataaaacccagctgaattcatccctgagatgggtggatttagtcagcatacacatttttatgttattaaatgtgaatgcgatgaggctgggcatcttctccagtttgaccatagaccacaccactccctcttttcctttatccgtatttacccttctggcctctgagggtgcttaagtttctaagcacaggagacaaattaagttctagtgagaaaaaaaaaccaatttaaatatacatatgaaatatatataataattgttataataattatatatataattttgattcattttattttggtttttggacagagtctcgctctccggcccaggctggagttcagtggcatgatctcggctcactgcatcctccacctcccaggttcaagcgattctcctgcctcgctgggactgcaggcacccgccaccatgcccagctaattttttgtatttttagcagagatggggtttcaccatgttgaccaggctggttgcgaactcctgacctccagtgatccacctgcctcagccttcaaagtgctgggattacaggcgtgagccaccgcgcctggctatatataattaatataacaacctagataccttttcaactacagtctaggtttttattctcctttgttccctattagcagtcatttaaagaggaattttcataacaatgacagtgacaaaaatccctaggcccgtcagtagctagaaagaactttacttttaataaagtgtttccgttctagataaacattttagatgctccgtaggtaagagagattgagtgtttttgctcaaagccatgagatgaagcctgacagagcaagagtgctcttcctctgaaagggtgccatgccatttttctgcctcatgatttacaccttctggttgagcagacaggcacctactgggggaaaatgagcaaggaatagagcatatccttatttagtcatgctggaatgataggtgctctctctaacagaatcgtgtggctggacaaaagcacgggttattgtctgattgaaaactaaggaagtctagactcaaattaggagtaattcagaatgtgtattttattaatgaatttccttgaattatatactgtattcaaagcctgtttgggacatcatgttttgttcaccaaccattgaaggaaatccctaactttcttgcagggaaaatactttgaaatccagttcagtccaggtggggaaccagatggtggaaagatctccaacttccttctggaaaaatctagggtggtgatgaggaacccaggagagcggagttttcacatattttaccaggttttcctgtttacttttttcctacccacttcctgtcccttctctacattaaaatatttctcagacttcaggcatagactatagtctaggaagccagggaggactgatgatgataccatgtacaagtcaatgtgcagaattgtgagaatgtcctgccctcaaggagagtgagttctaattggagtgataagacagaaattcctccaaagctaaatcatcaagaaagtattgatgtaacttcaaaacaaaacgaggagtgttggagtctttgccaaaggaattcaggtgggcaggtttggccggatagtaggagaggtgtgaaggaggtagagcccggatggaaagtggaggggattgatgagggaagacaggtgacctgcaccaaagcagtggaggtgggagagggaaagccagtcagggagcccggcctcagcctgcctgcagggcaggcgtctccagaacgtgagctaccggaggaaagatttgagataggtttgggatctttaatgccaaattgaaaagtttccacctagaccctcagaagtcatggagagtttggggccagagcagcttgcagggtgctttttgattatgttacaggcttcagcagtcatctgagtcagctacttttattttatttatttttttatttgagacagtgtcttgctctcttgcccaggctggagtgcagtggcacaatcttggctcactgcaacctctgcatcctgggctcaaatgatccccctgcctcaccctcccaagtagctgggactataggcacatgccaccacacctggctaatttttgtatttttcgtagaggtggggtttcaccatgttacccaggttggtctctaactctcggactcaagtgacccacccacctcagcctcccaaagtgctaggattacaggcgtgagccattgcacctggccctgattcaggtacttttgtaaaaggtttttaagtacttaaaaaatataatgatgttaataaccaaattttttatgttctatttacttattagtattttatattgaagatccacattagactttcttcgaagaaagacctggtcactgttttttgttttgttttgtttcgtttcgtgtttagtttgtggatcactggattagaaggacattaaactgtggaagtagctcacattcaatcttttcaattacacacacatcttaggcaatgccaaataattcttttagtttgtacctgttggttgaaaaagtatataaatgattaaaacttctgtgaattcagtcatttttaaaattgtattaaagcaacatatatagataagtgaaaaataattatatatttcacataaataatacccagtgctagatggaagtgtataatggatgtcaggacttctttaaataaatgcaagccccaaccctcccccaggagttctctgcccttaagtcagaaaccaccagaatagaggctgggaactgatgggcgcaggggttcaagattctgacatgaaagtaattcttggctgggtgcggtggctcacgcctgtaatcccagcactttgggatgccaaggtgggtgaatcacgaggtcaggagatcgagaccatcctggctaacacagtgaaaccctgtctctactaaaaatacaaaaaattagctggccgtggtggtgggcgcctgtagtcccagctactcaggaggctgaggcaggagaatggcgtgaacctgggaggcggagcttgcagggagcggagatcgcaccagtgcactccagcctgggcgacagagtgagactccgtctcaaaaaaaaaaaaaagaaaagaaaagaaagaaaaagaaattcttgaagctacgaaatacttgggagtggatgtggggagaaaatcctgccacacaggaccaggggactttctagatatgtaggatcgggaggcattgaagagccagcagggaagtagttgaaggataaggaggaaagccaggatcctgcagtgtcaccaagccagggaagcctcagggcgacatcgacaggatcaaatggtcagagctcttgggcaaaagggacgagctggggtgtgggggccaaaaaaaaggctgttggatttaggcactgaaaaatagccatgcaagggttccgccagagtggtgaggggagaagctagaatgcaggtggttatgtcatggcaaggaagtagatcctgcagcttggaggagttcacagtcaaggaaaagcttctaaagaaggcaaagagtaccagagagcaggaagctgcatggcagttttttaacatgcaccctgcagtgagaaacatggaaaagccagcttaaaaagccatagcaagttgggcaggaactaagtaattaaaatctgttttgctttccactcttccgagggtggcagtccagttcctttcagtggacaatggaaaatcctcagctcttgcaggtctttccagagttaggaatcaaaatttgcagagatgacctggggctactacaagtacatatttgggggccaggactgcctgtaattttagaaagcagagatagaaagtccttagggatggtggctgcaggatgcaggagtgacttcgggtgccttgtggtccacatcatggctcaacctgtgttctcttgctccagctcatcgagggcgcctctgcagagcagaaacacagccttggcatcaccagcatggactattattactacctgagcctctcgggctcatacaaggttgatgacattgacgacaggcgggagtttcaggaaactctggtaagtgctggcgcagggccaggcaggatctgctctcccaactggccatttcctgtggccaaaagggcagtgaaggttaataaagcaaagagctgcatgaaatgtccgcctctttctctgtgagcactctgtatgctcatacatgtttcagtatccttaaacagccatgtgccagttgcctgaggaccacttaatgatttgagatgggtaaaaagaaatgaattcatcattatcaccctgcaggagctctgataaataggcaaaaatgattcatacgttgagcatacctgtttgctgatggcctactctattcgtgagctatttccttagaaaagctaagcaaaccgcacgtctatggactgaataggtttagacattttggaacgtctttagtcttttctcttatttcttttctggttttgaagactctcttcccctctgtattgtttagggcagaggaccctttttctgtgccatgcccttcacattgcatgtatgttatggtccaagctgtgaaactaggtagattatggaggggttccatcctgggggcaataatgtagaactttctggaggtaggctgaacacccacttggcctcaaaggccttcattgccacccactgccctttgagtctgtttcaagctggggactattcctcaacccagatccagaactgagcagtagactctgaatgagcagcgtgggttcagtacatttgtggttgaaagggacagaaagttcaaacagactgtgtcctgggtgccaggaaacaaaatggtatcaacaggtcacatggcctcaaagcagctgcggggaaaagtgccaataaggagtctgcacactggtcctagagtgtagttttcttaggagatgtttctcttaagatttagacattttagcggtatttattgcatttaagggacctcagaaactggacttttaaatgatgcttttattggatttcctggagatttttcattaagatccttttgcaagtacaatatattcttatccctcctgatgaagggaaagatctcgagtccactttgagtaggtggaaaggtcagcagcgaccttcgaggggaagctggcaacaagaacacatcaaaggatgaagacaggacttggagactttgtgtacaactaccactcttccgagtctctttcctcctggagtattctcttattcctggaggatggcatgctatgcttagagacagaagtgcccttccagcatgactttgagacgtgagaagaatgtgtgcattgggcagtgaccatgttgtacaagaacgtcctgctgtcatcacaagctaagccacatgtgactgcacaacccaatcttatgttttggcttttttttttttttttctttgtaactcgtctgtacttgtcacatccttatttagagcagctgctgtgccttggcttcttcctaaggtgcttttaaagctggtgaccagcttctctggatagtttctcttttctcttccagcacgccatgaatgtgattgggatctttgcagaagagcaaacgctggtgttgcagatagtggcgggtattctccacctgggaaacatcagcttcaaagaagttggcaactacgcggctgtggagagtgaagagtgtgcgtagccctggcatgtggccattgaatgaggggtggctagctctgattagaagtaacctagcactttcctttgcttagatctcaaatgggaatattgggaagaagtgataaatctacatgtcctctgtggcaaacagaatggcttcacgagagaccagacctcttctatgcacctgtccctgtccttacccccagcctttccaagtcccacaccatcgattattaatggaatcgtttcaatttatcattaacctggggaaagctgggaggatttcacaccttggtttaaagataaagtgatctctttaatggggattagagtaatggcttaatgcaaaagatttattgtctttatcaaaaccttttcagtaactggtctttaggatctaaattcacttacaggttttaaagagcaagcaatataatatatgtaaatatgggaagctcacagcttcacagtttgttccatggattggattacattggatttctgaacacagaaaaagatggacattgactgttgtgttgacatttctgatgatcacttttaatgatcacatctgtatacctggagcctcaacacctaaatggtcgtttttactctttgagaaaaaaaatcagggttcttcctacagagaggtgctgctggttacatgtgcccaaaatctaccataaatacagcggcacatgactttagcctcttaggcatcaacagcttgcaggctgctctcagaacccacacatcctttaaccacccaggaagacattcttcctttctcagcattctttaaggatgataaatttagatgcttagtaataaatagcatcccactcattgctgacaatgcagtggggatatttccattccaaataaggttctttttttatgtttttgttttcttttctgataaaagagggaagttctgctaacttctgatgtctatctgataaagaaaaagatgaattatgtttaccagggaagggagtagaaaacaataaatatacagggtgtccataaagtctaaaaacatgacctaataatcataataaggataactatgtttctaaactttgtgtacattatccttgacatttaacaaatgcacatatatttccagtaggatcattaacacttggccttttaattgtaacagtgttggtttggtggtagtttctgttgaagtagactggattttttttgccttcttggatagtaaaataatttactgcctctttatgcttgaaaacaaaatcatgacactgaaacagcaaacacttccctagatgtttgaaacaagaagtgttttattgcacattgatgtccagagttagtagtcttctcagccagatgggtaaggccgagcactggcaactgcccatgaaattccctgactagaggcgatggaggcatggagattggaaaaggctgagatggaagccagagaggtccaggaaatgggcctccccctaccaataatttcctttgatttggggttttgttcatttggtaatacattaacgtggcttgagggggtatgcagtgaaagttctcccttctataccttttctagtccacttgttcccctcgtcagaggtaaccaagattcccagtctcttgtgttccctttaaaggatgtgtgttccaaaacaactacacacaaccactcctttttctcacttttgtgcaataatgggggcttatactgcaatgttctacagttgctttttcacttaacatgtgtcttaggccaggcatggtggctcatgcctgtaatcccagcacttcaggaggctgaggcaggtgatcacctgaggtcaggagtttgaaaccagcctggccaacatggtgaaatcctgtctctactaaaaatacaaacattagccaggtttggtggtggtgcgcacctgtaattccagctactctggaggctgaggcaggagaatcgtttgaaccctgggcaacgagcgagtctccatctcaaaaagggaaaaaaaattatgtgtgtgtatatatatataatatatatatacacaccatatatatattatatatatagatatagatacactgtgagatgatgctatatcaattcctaacgagcttcatcttatttgggcgtacttgtgtgtaagagatggggtcctgcttagttgccagggctggtctcgaatttctggccttaagtcatcctcccgccttggctccggaagtgctgggaatcgaggattgagccactgcacctggctgtcctttttgtagctgcatagcattccattcattggctacactttatttatctgttgttggacattaatatggtttctgatcttctgctgttacaagactgaatgaacactactgaaaggaatagccttggtttctatcatctttctcatattttagtatatctatggaataaatttgtagagggaagtggtagtccatgcctttataatggaaaaaagcagactttctcttgctcttgcagtgtagaaaaaaaatggaaaaaaatggtaagattttcatcagaactggcctactaaagcaaaatagccattaataacagcaagcttttttgttttattttgttttttgtttttgttttgagacagagtctttctgtgtcacccaggctggagcgcagtggcgctatctcggctcactgcaacctccacctcctgggttcaagcagttctcctgtctcagcctcccaagtagctgggattacaggtgcgcaccaccacgcctggctaacttttgtatttttagtagagatggggttttgccacgttgaccaggctagtctcaaactcctgacctcagatgatatgcctgcctgggcctcccaaagtgcagtaattagaggcgtgagccaccacacctggccaaacaagctttgttttttttacctgaccttagactaatggaaatgtagcatttccctggtcaaacctttacgttgctgtgaagctaaacaaactaagaaatcccttcttagttggatatgttggtgaatgtctcttgattctcacaacaacccgacatgggtccagtctgatttatgaatgtcatctgtccttactctgtgcacaggagtgcaactctgtgagatgaatgcacacatcgcaaagaagtttctcagaatgcttctgtttagttcttctgtgaagatatttccttttccacaacaggcctcaaagtgctccaaatatccacttgcagattctacaaaaagagtgtttcagaactgctccatcaaaagaaatgttcaactctgtgagatgaatgcacgtttagttcactggaagacatatccagattcctagacatgtgttaacagtaaaactaaactaaggataatggccattttcagatcagtgcatttgattttgtttacatgtcctttctaaaaggaagcccttctattgctcaaagcatttttgtgaaacactcatatagaggataaatgtcttgttctggcattatactttttcaaaatgtattcactgacttaatctcattggaaggtgtatactgagaaatgtcagcccgttatattctaacaccatctgtgaaattcaaacagattatcctttattgggaggcttgtgattttttagcattatcataaggcctttaacaaaattcttttatcagataattttggtaaagcattatgcagaaaaagaaaactcagccaagttcaaaattttcattgcatctataaaaatctttcattcatattggaaaaatctgagcattctttcatgtcaaagaatggtgtcatttatttatatgagaacgttctgcccagaaatcaagaaaaccccatttatatcactagccctccttggtaagtttcatggtctgaaacaagatgttgagctatggaagtctccgtttttctatccaaagaccacagactgccataccatgtgacattagggcaggatatgaacaataccatccccttcatttcactccatatgctaccctcagaggaatcttcttataatgcccctctttattagccatcaggcccccttttgcctccagcccaaatatatcataccattcaaggacccccagcattggaatctgtcctaaccttttaaatctgacctgaactttcacctgtagccagtgctagtccacacactgtagaccgtctcgtcttgatcatgtctcccacacttctgcttcctccccttggtacactcccttctcctctctgcatctgcacaaatcgtattcatcctttacacccagctcaaatctcttgactaccccagcaagtagtaatatcttcctgttctaatttctccagatcttgtctgtctgtgttacatattcagcttttccaagggttctttatttggcaaactatttttgcctcatctagattgcattcaagatttcttacatattttctatcttttcctctctctttagtaaccctacacatgctaaatactcaataaacatgggattggttgtaattattagttcagtaatatcaggtgcttcaaaaatgatgctatgaaaacattgtactaaaaaggaagaaaacaatatttggagccaaagaaatgtttcttgattgagttccttcctggctgtcgtgctggaagcttggagagatgtccattttaggcatttgactgtgatctcagtaggagggataggtttgccatccttcttgaatccctgatttgtattattggaagtctcagtcatcataggaattgactcatgtcataaaacaattgggaaaaacaaaggagatggatgtgtatgggattactgataagcagccttcactagaacgtaagctcttggggcccgtgattgtgccttctatgcacacacacgtgcatgtgcacataagtgcctccatatgtttgtgagatgacttggaagtgtcacaattctgaaagattgtcatgttttgttttatgttctacagttttagcttttcctgcatatctgctagggataaaccaggaccggttgaaagaaaagctaacaagccggcagatggatagcaagtggggaggcaaatccgaatccatccacgtgaccctcaacgtagagcaggcctgttacacccgggatgcgctcgccaaggccctgcacgcccgggtctttgatttcttggtagatgtaagtaacagaagttgatgctggtgatgcttcatatcttagctataaagagtaaaactagtaggctgggtgcggtggctcacacctgtaatcccagtactttgagaggccaaggtgggaggatcactgcagcccaggagtttgagaccagcctctgcaacatggtgagaccctgtctctacaaaaaaacacaaaaattagccaggtgtggtggcatgtgcctgtggtcccagctactcaggaggctgaggtggttaagatcacttgagcctgggaggtcaaggctgcagtgagccgagattacgccactgcactccagcctgggggttagagtgagatcctatctcccaaaaaaaaaaaaaaaaaaaaaaaaaaggtaaaacgactgagggttttgtgttcctgttctggctccttcctttcacccattaccttacttcactttctctcactctgtgattactgaatcctgcttttccttctagaactgcccaccaagataccttagctaaatctaatgtggtaacaagtttcttctggacaaaatatttagtaaagctaggactagagaccagaaaaagaggagagccacgttcatgggcctttcttgacttttggacctaaagatttaggaatatgtttttcacatatttctatgttacaaattaacccaaaacctagcggcttgaaaccataagcacttattttctcagtttctgagggtgagatatttgggatcggctgagcttggtggttctgactcaaagacgaggttgcagtcaggaagctgattggaactgtggttgtctgaaggcttgcctagggttggaggatctggctgaaagatggattgcccatgtggctgttggcaggaggtctcagccccttgctgcatggacctctccttgaatatcctcataacataatggttggttttccccagagcgagtgatctgaaagagagaatgagcaagaagccagttttttatgtcctaatcttggactcaggtattgtcactttgccacattctgtttattagaagcaagtcactaagcaaagatcacacttaaggggaggggaatgaggctccaccttttagaggaaggaatatcaaaaactttttgcatgtattttgaaactattagatatttttggttatggcataattatgtgtgtgtgtgtgtgtgtgtgtgtgtgtgtgtatgtgtatatatatatatatatatacacatacacacacacacacacactgggggcccttcgatccaaaagatagatagatagatagatagatagatacacacacacacacacataaactcttatatatgaatatatatttatatatgtatatcacatatatattctgacaattagtctttcagcagtgtagagctgccagtaacaatctctgttaatcactgtagcctctaaatggtaaaataataatagcaggcacttatatagaactaactatgttagtgcccagatactgttctgagtattttaaagagaaaaaaccctcacttaattcttacaacaaccctgtgacttaggtattattatctctgctttacagataaactaagggaggcatagattgattaaggaatttgcccaaggtcactctgttattatgtgagtgatctaggaggccctagattcctagctagtttgtttctttgacgtttatatattcaagctagaaggaccctagtcaagggacaacagtgggggccattcaatccaaaagatctgtatttgattccaggcactaacatttatacggcttaaggtatggttagtgtggttagagtagggtcaggcaggacagggtaggagaactattctaggtactttagtggctatttaaaggataacattgcttgggaaggtcagggtcatactaaacagaagtcatgcagttaggttgtccagacccctcattttactgagaagggaacttcaggcctgagcaatggtggttttgcccaaggctggtcagcaagggggtggtgcagcctgggactagaatccatatctcttttctctttgttcagagcaccttccagcgctgggcttcctacctacctttctacctgtcacctgtcagttttttttgtgaatagtaccagtacatgaatactcatataagtgatcctaatttgaggtgggatttactgggcactgactgtgtgttgtgtatgattactcattcgctcacaaaagatgatatttcattttgtttgcctggaaaacacctctggtacttcagaattcgtccaggtattcatcacctcaaagaattgttcgcttacattcctcccccactgcatcccccaccaaccgctctatccaaacctcccttgctgtcattacatctgttcccatgaattgcttggcctcttctcacggtgattaagaacacagatttaggcatcatactgcttaaatttagtcccagaccctgcttcttacatagaacaaccttaagcaagccttggtgtatccatgtggaaaattgggaaaataatggtatcactgccattttgagaaatgaaatgggaattaagtgaaacaacacattgagagcacttagcaaaccctggcaaaggtgaatgtttaatagacgtaagctgcttctattatcaattcaaaaataatgactattgttactatctgcagatagctcaccctctctataagcgcctaggaacaagggttgtcttgtccttagcatccctggcatattgtgttgggtcatcattaaatgactggtgaatggaagacactggaaatgacaattacagatcctttagtgtgggttctttgtgtgaaataggttttacttcgatcatccaagatgacatttttttctaattgttaagacttcctgaaaaagcttacttggacagaaattaatggttatcatcattaaacaaacattttttgtttctactgtactcgcttttctgaatcctggtggttttccaaagtacttgactttggactgagagattgttaaagcagcaagtctcctgccttcacttgtcctctgtttcctgcaagcagtagtgtttgccgtgtagaatccagcttccctttccccagtgcatgcccgtttttagtatgaatggaaaggagttcactgccatgctgtttactttctctagtccatcaataaagccatggagaaagaccatgaagaatacaacattggcgtcctagacatctatggctttgaaatattccaggtaaggccagttttaataactaggggttgaggagggtgacgtatttcatctggcctgcaagaaataattctaggcaatgcaaaaacaaaaaaacagaaaacaaaccacaacaacaaaaaaaacaactcaggctcatttttgcctttgtgagttcttcatgtgcctttaccaaattagtttctcctaaatataaacttatttcttttgatgcatccaacatttctattaaagcttttcacatgaagacatttcaataaatcactccagaaatgacttttaaatgattttgtgaaagaattacatgtgaataactttttttttccagaaaaatggctttgaacagttttgtatcaattttgttaatgaaaaactgcagcagatttttattgaactgacattaaaggcagaacaggtaagcagtccctcttccttcatcctattctatttataatttattttgtttaagagggtatagatttctgtcttttgttaatagatttcggttccagtcttatattaggaaatgcatctaataaagtcaggcagaaaaaccatatgccattgtggcattttaatctatgaaatataaataccgtctgcagcatttgccttcttctttaagcaaatgatgctgtgatgttggaggtaagactggctgcttttactctactgactcattgagcacgtgggaaatgggagcctagttccagccccgactgtctgtggcaaatattgtgttccaaataaaagacttggtttcctcagatctacgccattttcaatcttccctaacaatacgtgcatttttaacaaagctggtatttgaatacttacctgaggtaacatgccttggtatagtttcttctaaagttcactgcaggctgggtgctgtggctcgtgcctgtaatcctagcactttgggaggccgagtcgggagaattgcttgagcccgggagttcaagaccagcctgcgggacaaaatgagaccccatccatacaaaaaaaataaaataattagctggacgtggtggcataagcctatagtcccagctactctggaggctgaggtgaaaggattgcttgagcccaggaggtcgaggcttatatcatcacaccactgcactccatcctaggcaacagagcaagactctatctcaaaaataaataatagccaggcgcagtggctcatgcctgtaatccctgcactttgggaggccgagacgggcagatcacttgaggtcaggaattcgagaccagcctggccaacatgatgaaaccccgtctctactaaaaatacaaaaattagctgggcgtgatggtgtgtgcctgtagacccagctactcagggggctgaggcaggagaatcgcttgaacccaggaggcagaggttgcagtgagctgagatcgtgccactgcactccagccttggcgacagagcgagacttcgtctcaaaataataataataataataataataataataataataataataataaataaatagttcagtgcagtttccattgtttcctgatagcatattgtttaggattcctggggccaccataacaaagcaccacaaactgagtgacttaaaacagtagcagtttcttccctcccagttgtggagcccagagtctgaagtcaagaagtcctcagggccacactcctcctcctcctcaggatagaggggagaatccttcctcttctagtttctggtggctcctggcatttcttggcttatggcagtttgactccagtctctgcctgtgtcttcacgtagcctttttcaatgtccctctgtgtctatatccaaatctccgtctctttcatgaagacaccattttagctttgcgcaatggcaatattttagccagggctgttcatctgaggcatgattattgctaattgaaaacttttcacaataccctgccatgatgactggaaatacagtcagcattgacaatttttgacagtctctatggagagtgaactgtaaaaaaaaagaaaaagaaaagaaagacaccattgttttggatttcaagttcactctaaacccaggatgacttattgtgagatccttagtgaattacatttacaaagaccttatttccaaacctcacattctgagaggttccaggtggatgtgaaatttggggggatactattcaagccattacacacatcaaaggctgtttggggtcatttagttatggaagtgtttatgcctctgcttaggaaacaccataccagggggtttcacgtgaccttctgccctggaacctgcccttggttgttttgctgtagctactctaaggggtggggtaggctagaggttcacatgaaacccattgctcccattgccatctaagtccctaccacgtctagcccagtctcctgcagtagtctcctaactggtttggtagtttccatatgggtttcctgtgaacctctagccttccccaacccttagagtagccagagcaaaacaaccaagtaagagtgcaatagccagtgagatgggagaggggaggcaggggctagattgtatgggaacttgcagggcatggctgagactttgggtgttacagtaagtggaatgaggacccactgaagaattttgagggaggagtgacatgatgtgatttgttgtgtttttgaaagggtcactctggctctatagacttatagagtgggatgagtcaggggaaagcaaactagaatggaagtttaaaaaccagtgagggggatactgcaggagactgcgctagacatggtagagacttagacggccatggtagcagtgtaggtggggagggggagtatctggagagtgagagaatgggacttgctcaaaataattagcaatagccaagaaagaaagagcaatcacgggtgattcttagctttataccctggataacagggccgatggtgacactgtttactggagggtaagattagaagaggggttgtttggaggtcacgggaaatatggaatcagagttcctctaaacaggttaagtgggagaggcctatcatacatccaagtgaagattccaatctgtagaatggatttgagtctggaaccccgtggcgaggtatagactagagaaataaattcaggggtcattagcctgtaggtggtatttaaagccatgggattgattgaaatcacctagagaaggagggctgagaaaatgagaaagctgaaagattgagccctgagactctaccacatataaaggtctggaaataagaaagacctggcaaaggaagctgacaaagtgaaaccagtgaggaaagaggaaaaaaccaggatggtgttgtggtgttcaagttaaatgagcaactcatagactgaagaaccttcccattaagtacctggatgctaatctgtactcctgtcctatattcaatttttttttttttttttgagttggagtttcgctctgtcatccaggctgaagtgcagtggcacaatctcagctcacttcaacctccaccttctgggttcaagcaattctcctgcctcagcctcccaagtagccgggattacaggcgcgccccaccacactcagcttctttttgtatttttagtagagacagggtttcaccatgttggtcacgatggtctcgaactcctgaccttgtgatccgcccacctcggcctcccaaagtgctgggattacagatgtgagccaccgcgcccagtcctatgttaaattttaagagttttgtgatttttttgtaactggatttatcagttcggtgctactaaattgtagttttctttggccagaaacagttgtgtggcaataatttcatagggttcaaactaaacataaaaatcaccaagtcataaaatgttcctttcctgttacctcttagaaaataaaaattaaagtccctggtctttgttgcaggacattcaggtttttctcttttatgggaatttttgtccattcagggtctgtccgtgcagagctcttgctatctgggaaataatgtgagttccttgtctctgtgttacaggaagaatatgttcaagagggaataagatggacacccattgagtactttaataataaaatcgtatgtgacctcatagagaacaaagtggtaagtgttcatttagtatgtcttttcactgctcacaggtttacattaagtgagtttttattctctgtgtcattgttttagaacaggcaaagtgacaactctgatttgcagagaatttgagcaattgtactagttttctgtatgtgtgaaaagagaacagtacggctttattctggcagtaaatatgaacatgtggatatgagtaaaatgtcaatgtacaaatggaagttgttattgaattctaagagaagacaggatcacatgatgacttagcatggaaagagccataaaattggccctgtgttctagtccaacttctaggactttagccttaatgactgattcaggctggtcatggtggctcgtgcctgtaatcccagtactttgggaggctgaggcaggtggatcgcttgagcacaggggttcaagaccagccccagcaacatggtgaaaccctatttctaaacacaaaatttagctaatacaaaaattgtattagctaaatacaaaaattagccaggcatggtggcacgcacctgtagtcccagctactctggaggctgaggtgggaggatcgcttgagcctgggaggttgaggatgtggtgagctgagattgtgccactgcactctagcctgggtgacagagcaaggcaagaccatgtctcaaaaaaaaaaaaaaaaaaaaaaaaaaaaaaaaggtgattcaaaataaagtgatacagaacagatatctctgtaggatttttttatatatataaaagcccaaaaactggggatcctgctagtagtcgaacctgcagcgcgatggcacggcgtgtgtcagctggttctacatagttnnnnnnnnnnnnnnnnnnnncttatttatttatttatttacatgtttatttatttattttgagagacgtctcgctcggttgcccaggctagagtgcagtggcgccatcttggctcactgtaacctccacctcccgggttcaagcgattctcctgtctcagcctcctgagtagctgggattacaggcgcccaccaccacacctggctaatttttgtatttttagtagagagggggtttcaccatgttggccaggctggtctcgaactcctgacctcgtgatccacccccctcggcctcctaaattgctgggattacaggcatgagccaccatgcccggccagacaacttagttattaaacaaactatagcatatcagaacagagaagtatagccattaaaatagtaagtgtgaagaatgtgtaaaacatgaggaatgcttataaaatagtgctatgtgaaaaaggaaatgcattatagaatgtgtacactaaataactaccgaaatgatgcctatatgggtaacacgctgaaagagaacattaagaaatagattaggtcaaaggaaaatgtttttacttttggattcttaagcaagtcaatttggcatgactatgagtgagcagataatgatctgtgcatgactcttggataaaacttcagggagttaaacagctttttggaaagtggagtttcctccctctttagatctaagtggtgactccctatttgggactattaattgcattcttgcctgaaggggaatactgactttcaagatggtatcttaagtctggggagctgtttccttgcctaagaaaggacctgataagcattgtctgttttggagaggtcagtgactagggccttgccttcttgctcccatcagaaccctcctggcatcatgagcatcctggatgacgtgtgcgccacgatgcatgcggtgggtgagggggcagatcagacgctgctccagaaacttcagatgcagattgggagtcatgagcacttcaacagttggaaccaaggcttcatcattcatcattatgctgggaaggtatggccaatatccattttaatgtctatctgttttaagcctttgggtttgtgatctggtttctcatgaagcaaatcatatggctcgccgtattttattgattcaacaaacggaatttattaactatcaaaggaagcaaaacaaaagattgtatatactactgcatttttttgtatgtacatttatttttacattgtagaagaagctactacttttttacagcatataaatgaacataggtataaaccagcaagaatgaaagaaatagcatatatctaatgaaaagagtcggaatttctagaacacaataaatacctacatcctactttttgggaaccaaatgccaactacatatatataacatggcaagtgctgctacatcagaggtaccaaaaatacttaggaattgtaaataagtatcgtccagcacgtggatgctcaataaaagagctggaggactaaataaataggaaaatcactctacctactttcctgtttccatcttttaggaattcaagtttattcaaaatttcgttatataatcctgtatctatgatctcttcaataatttcggaatggtagttttaggcaactttaaagcttaagcttattctgaatttcccagagtgtttttgcactttttttcagatgggcctcttcttcaggggtcagctttatctttataaggttggtaataccgttctctcccaggatacaaggaatactgaggaatacttcttcatctattccatagaggcccttaattatggtggaaactggatgtattctcctaagattcttcaaaatactttctgttaaatcggccacagataggccaatggcccaagaagtataacctttcattttaataatctcataggcagttgcagtcacttctttgtggacatttttccattgctcaggatctttatcagttcctatatcagagttcagatccttcaaagggacaccagctatgttcactccactccacacaggaacacttgagtctccatgctctccgaggatccatccatggcagctttcagaatggataccaagcttttgtccaatcaagaaacgaaaacgagcagtatccagattacagccgcttccaataatacggtttttgggaaatgcactcaacttccaagctacataagttaagatatccactggattggaaacaataatcagtttgcagtgggggctgtactggacaatactggaaatcattaacttgaagatggccacatttcgctggactaaattaaggcgcgtttctcccttttcttggcgtgcacctgctgtgataatcactaggttggagtttgctgtgacaaagtaatctttgctacaaacaatatttggcattttcgtgaaagggctgccatgttgaagatccatcgtctcacccttcagtttgtcttcatcaagatccacaagggcaagttcatcactcaagccttttaataagatgctgatagcgcaggccatgcccaccgatccagttcctatgatggagaccttactgtgatgaacgggcttctcggaagtgaaacgctcaataagctcactcttcacagtcgccatcttgctcacgggtgtgaagagccaggtgccgttgagcgggatgcgcgttgcttgacgcagacacagggccatccccaggcataggaaattcgctcccaccgagctcattctctggctggcccgcacaacaggcacagtccaactcatggctgctcactgaagaagtggagagagagaatggaaaaaagctgctgatccgaacgttgagacgccaagagagccgttggcaggaccttcagcactctacggcaggtgcgcgtgccccgccccctggccctctactgcggctgcgcgggccttgccagagtctccgacacgtgctttccgtgggtgctcagactaaggcagtgaagggctgcttctctagcaagtgatttctggagttagttttgctaagagtattatcaatagttgacatgcttaagaggctaaccgagatccctggaattactagttttttatttttaatatgaatgctgaggaaacatgcttctgttaactacagatgaaaataaggttacgttttctgaaccgtgaccctgccaggaaggatagggctctatgctttgcgtactggtggctgcctgcaccatctcccagtgtcccagaattgggcgcctgctttctggtctatggcgctggaggcctattttgaaaggattccactgccttggtgccagtcctggccaggacccaccctgggacagtcggctggggcttcagcagggtaggggccggctgggagtcactccagcactaaatctcagcatactactgcatatttttggaaaatgaatcaccctgctacatgtattagctgctgaataaatggattttcgtcttgcctcttgctggaatcacagactggcattccttgtctccccatgcctactggtagtataaatcaaggcccagagtgcacttttggtgttcttataaagcccatcagtattgggtgcctactggatgccaggctgtgtggggctgctgatgataaaaaagttaagttgaggtcgtggtcttggggacttcctagtgctatggaaatcccctggtctcatccatcatcccagctgatctcttgttaaacagagtatctgagcatgagtttctggccagattggtgcaactttgataccacttctgggagaaactgcaaagcctcagatgacatggctcattgcagtgaattactgagcatgaggggcttcacttttgctctggcttagctaaaatttaggaaaagtattgagtatgtcacttagacacccctatggatccactgaagaaggggtatggggacttgagagctggagttctgattacggatcagctgggccatccaggcagccagatactcatcagcatctgcaggccttccccactaagtcagctaacaagtaagacgtgcacagccttcctgtgacagtgcacaatgaaatcccaaatgcaacatctggaaatccacatgttgtggtgagggtagccatgacagctttggttttttgtttggtgaaattagattttttgttcaataaatgattttgttcaattaattacattttgttcaatgaaattcgatttctttccattcttggccaggtatcctatgacatggatggcttttgtgaaaggaaccgggatgtgctttttatggatctcatcgagcttatgcagagcagcgagctgtaagtatgttttgccatagctgacaggggatataggtttgatgaaattttcaatatgaaaacaaacttatgagctgggtgtggtggtgtgttcctatagtcccagctactcaggaggctaaggcaggaggatcacttgatcctaggagtttgaggctgcactgagctgtgatcactcctgtcaatagccactgccctccagccaggcaacataggaacactgtgtctctaataaagaaaaaaacaaaaacaaaacaaaacacctgtgatgtttagtggttagcattttgttccttcatgctattgggtctggattatcatttaatctatttggtttctcaaaatagctttcttttctctatatcagtctctcccttttatgtccctaacacttcatgcccccaaattccaagtgccatctacaggtccttcagggcctcaggctttctacctttcaatactattatcagggagaaataagcccactggctttggattgggatggccatttctgactatttaagagtggaacagtctggttctatgatactttgcccctgagctcttcttcatggtcgttgaatttttaaagatggttaatggcttagcaagacccacattaaccagagtccctgaagtactgaagaaatggcttgagaactctgggagggacaactaaagaaggagtgactaagagatccattttaactcccaagaccctgtttcagctgtaggggtagaagagggagggtatcccccttgcacgctgctagaactctcaagaccacctctgccttcctccccttttccctgaaaaggttctcaagatcctggataacacataagatgtaatttacatgagcaagtccatcatgcttgcgaggcaaggcccatgcatgccagatcttacaatttctagagcttctttcaagtaagagctgcccttttgctctctgttagttaagctgtcacaatagcaaggccagcttctctgatcaacagcagcgagcctgataatttcctattaaagggctgactgcaatgaaagcaaagcaagagtttccttttcaggccctggtcagctgttctgctccgtttacttctctccctgtagctccctacccctcctcaccctctgctctccatccctgcgcttccttgcagccacaccaccatttctgagattttgcatttctttttattcaaaacatacataatcaatttgttcttctctgagatgtttaggtaagccacaagtcctggcttgtgggttttatggcagtcaggtgcagacttgcttccagagattgtttttaaaaaattattaaaattcctgccaagtttaagagctattattgcttccacataaactgctgtcatacggacatggcctattattttgtaaacacacttgatgtcaaaatctgtagttgtatctggtcaagttaaaagtagactgctggggagacttcctggaaaattcaagatgcccaaaaagtcattgaggaggaagtgagtttgagtttgaatgtcagattgctaatttacatggatcccgtcattcacccagtcagcaaatacatattatggaccaactgtgcaccatgctatgcttcagacaccagggacactaagatgagtaaggcattgtccctgccctgttgctagtgaggcagacgtataaacacatgcagctcaaatagcaccactaatgaaagtatcttcaggctgggtgcagtggctcatgcctgtaatcacagcactttgggaggccaaggtgggtggatcacgaggtcaagagatcgagaccactgtggccaacatgttgaaaccccgtctctactaacgatacaaaaattagctgtggtggcacgcacttgtagtcccagctactcaggaggctgaggcaggagaatcacttgaacctgggaggcagaggttgcagcgagccaagatcgcgccactgcactccagcctggtgacagagcgagactccatctcaaaaaaaaaaaaaagaaagtatattcagccggcagagcctggtgatttgttactgctccgcttaaaattgctcatactcaaaagcagtttgtcagggttttctgtgtagagctgggaacagtgtgctactggcatctggtgagcagagaccatggatgctgctaaatatcccacaatatgtagaagaggcgccctcctcggcccccaacaaagaattattcagccgcagataccaatggtgcccagactcagaaactctgctctagagcaaagcagcatctgcactgaatccagacatttcatataattccctgagctctggtctatcttgcttgtcttaacaaacacatgctggccaggcgcagtgcctcatgcctgtagtcccaacacttcaggaggctgaggcaggagcacctcttgagtccagttgtttgagaccagcctgggaaacatggcgaaaccccatctctaaagaaaatacaagaattagctggacgtggtggcgtctgcctatatatagtgccagctactcaggaggcggaggtgggaagatggcttgagtctgggaggtcgaggctgcagtgagccatgattgaacccctgcgctccaacctgggcagtagagcgagaccctgtctcaaaaacaaaacaaaaacctaaaatcccctactgacctccctctgttatgttctgtcaagatatacctcaattcctgtgactagggacgttggaaaggcaatgttttaaaatttattttgcagtctttgattccaaattgcttatatcttagaattctttcccttcatgacttttgtccgttgttcatttccccaagtcacatcttgatggcccgcgctgtgagtcagatggcttttctgtagccaaggttatgtgcctggggacggcccttcaccccatcctctagaaaggcaggctttcagccccagaggtacttacagattgttaattcattctctttctccttttccaggcctttcataaagtctttatttccggaaaatctgcaggctgacaagaaagggcgcccaactactgccggaagcaaaataaaggttagttctattttaggaagtttatagattcttataagggctagcgctttctaggagtaaggaactgcacccctgggccaggatgaggtcagtgagacgtgaggaggtggttacagaagatgcccagaagtaacatcgctgcttgttacaaggttccaggatgcaagctgaatttgacttggctgtaccgaaaccttaaatggatattaagtacctcatagcttaatagtcagcagatgataatcagctactttctaagaggaaatggctttaaacagaacctggaagaatttatgttaaactgtcagagaaatatggttcggagccatgttttggatactgttgacagtttaccaggccaggcccaaaaacctgccagttatggaacgttacttgccagaaattctacttggtcttttaggggcaatttatgcatccctcctcactgggtcctacaggcctctccttgctgtgaattgaagacacatctagccacatggtgtctcaaagtctgaaggaaatcttacagtgtttctcaggaagtaggcagggttctgtggtacctgagccattacactgaattaagagtttacacttaattacactgaattaagagtttgtgggctgggtgcggtggctcacgcctgtaatcccagcactttgggaggctgaggcgggtggatcacctgaggtcaggagttcaagaccagcctgaccaacatggagaaaccctgtctctactaaaaatacaaaattagccaggcgtggtggcacgtgagtgtaatcccagctactcaggaggctgaggcaggagaatcacttgaaccctggaggcagaggttgcagtgagccaagattgcgcgattgcactccagcctcggcaacaagagtaaaactccatctcaaaaaaaaaaaaaaaaaaatctgtgtcagccagatgtagtggctctggcctgtaatcccaacacttatggaggccgaggagggaggattacttgaccccaggagttcgagaccaacctgtgcgatataatgagaaccccatctctactaaaaataaaaatgaggtgtagtggctcacatcttatgctctcagctacttgggaggctaaggaaggaggatcgctttagtcaaggaagtcaaagctgcagtgagccatgattgctccagcctgggggacagaacgagaccctgtctccaaaaaaaaaaaaaaatagtttttgtcattgtgtcacacacaatcatgtaactgtaagaaatactcactgagctattttttaaaatcatactggttaagaataattttttttaaaattataccagctgaatacttcctcagttttacaatcaaaggaatggttgagtgacagcagggctttgagtttgctcgcctgtgttcgaatctcagctctggcttttcctcgctgtgtgcttgccaaggtgttacttacgctctcagtgccctcaccgcttccctgtaaaatggagtctatcttaagagtctatcttaagatattagtgtctatcttaagagattactgtgatgattcagcttcataattcattggaagcatgtaacgcagtgcctgaggcatactgaacacaagatgtatatgtatgctctgactacattctttcccattagcccctttcctgtatcgccgttgttggtctctgcttaattgttgtttttttcttttttgtaaagttggggtgtcacaatgtcacctaggctggtcttgaactcctgggctcaagcgatccacctcagactcccaaaatgctaggattacaggcacaagccaccgagtccagcctgggctttcagctgtagggtagagccctctgagcgtcaagaacatcatgttgaaagaactagagacatttagtagcctcaggacagtccctgggttaggctcactggggcagattgctgaaggcagaaaacaaatgaaattctcatgaggcccagatattaatgtctgcgtgaagtgtctgactcatgcctttactgcaaagtcctggataaggattaactctgggctggaaaatcgagtcataagactgtcacattcagatccaaggggcccagatcatccaggttatgatgactcattttcaagtggtctggattattgtctataaaaaggagagcaagggtagggacactttttcctccttaaagacttgtcccctttctttccttcgtatgcttgtctggttgaaggctcaaagtgccaccattgtgggatgtttccaaaatgtttaggtttacaagtctcaggcccttgtctagggaggtcaagctgaagtcagcagtttacctaaagagagtacagcatgttttcccacctccaggcacaatctccttggtggatgttgtgacctctgtctgcctggctgtctgcctccacgtaggaataaaagtctctcccagtacctcttacagatacatagccatggcccaatcgctgatacgttccatatctacagtaatttgcagacatcattgtcatcttaacgatgtccctgaggcgtaagcgtttaaaaggattctgagttccttgaaagaaaaattaaacttgtgttcaaggtcatcgtagtgttatagatttcattatattctaattatttaaaaatttaaactgatttgtaggatttaactaatagaatattcatttgatgggaactcttattatattgattataaataaaagtataaatatagtaatatttaatagcatttgattttgaggttttacttaattcgatattgtcgtgtctggaagggacaagtacaggttgagcatctcaaatcctgaaatgctccaatgagcatttcctctgagcatcgtgttggtgctcaaaaagtttcaaattttggagcattttggatttcagcttttcagattaggggtactcaactataaagtataatgcaggccgggcacagtggctcatggctgttatcctagcactttgggagaccgaggtggctggatcatttgaggtcagtctggccaacatggtgaaaccccatctctactaaaaatacaaaaattagctgggcatggtggcaggagcctgtaatgccagctactcaggaggctgaggcaggagaattggttgagcccaggaggtggaggttgcaagtgagccgagatcatgccactgaactccagcctgggcgacagagcgagactccatctcaaaaaataaagtataatgccaatattccaaaatctgaaaaaacccacaatccgaaacacctcccttcccaagcatttcggataagggatactcatcccatatttaaattagagccaaagattgatgactacggagaaacagaaccaagcctcagaggctggcaaaggcagactggctatagctttatctgagtgcagctggagctataagggacatgacagaggaagtacaggcatcatgcaggtgattggattggttgggggtttttttggtttgtttttttttggttttttttcttgagatggagccttgctgtgtcacccaggctgaagggcagtgatgcgatcttggctcactgcaacctctgcctcccagattcaagcgatcctcctgcctcatcctcccacgtggctggactacaggtggcaccaccatgctcagctaattttttggtattttttttagtagagacgaagtttcaccatgttggccaggctggtctcgaactcctgacttcaattgatccgcctgcctcagcctcccgaagtgctgagattacaggagtgagccgttgcacccagcctgattgtttgttttttaatatgtatttcaatctctagattaaattagaggtcttctagttcaacctacttagtttacagatagagaactgaggaccagagaaatctagtgattagtcatgtaacttgcaaataaaagtgccaggacccacagtcaggcctgctgtcatctctgttgaaggtagaatgaggagctttcaccctgagccgtttctcactgtgctgtctgcgtattttaacacctgcttctgttgagcaagtgctgttggtacttttctgtcctaactcaggaacccttcttggctggaatcaggattaaattcagttactgcttcacaaccacctcagcagacatcttaagttgacccaaggttgggcacagtggctcacacctgtaatctcagcactctgggaggccaaggtgggaagattgcttgaggccaggattggagacgagcctgggaaatatagtgagaccccacctctacaaaaattttttttcaaaaattagctgggtgtggtggcatgtgcttccagtcccagctacacagagggctgaggtggaaggatcactcgagcttgggaggccaaggctccagtgagctgtgatcatgccactctactccagcctggacaacagagcaagaccctgtttcaaaaattaaaaataggtaaataaagttgacccatagctattgaaatacaggataattttgatggttaagatgtatttctgtttgctgaaattaattattcacagcctggtggcttctgtctaatcctacctcaaccagttaattccttttatatcacactaaatgatcccatctctttgtcagcaaggcaggataggattgttgccaaagaacaggcttggtagcccatgggcgtgggttcaagccttacttctctttcatgcaaattgtgtcatcttgagcaatactttgtttctttaaggcccagctttctcatctaaaaaacaggaataatattaaatagtagccacctcttcaggttgttgtgaggcgtaaatgagataatacatgtatctaatctgcactgcaaactcagtaaatgttatctgtcactattttagctggagaggactatggcaagtgacttataaacttaagttacacttgcctctctatgttttcttatgctgaggtgaaaaagaaggaatgctgttaaatacttaggacaaaagagtttgcaaagttattcttggaaattaaaagttgtaggctgggcacagtggctcacgcctgtaatcccagcactttgagaggctgaggcgggtggatcacctgaggtcaggagctcgagaccagcctgaccaacatggtgaaaccccatctctactaaaattacaaaaattagttgggcctggtggcatacgcctgtagtcccagctactcgggaggcggaggcaggcgaatcgcttgaactcgggaggcagaggttgcaatgagcagagatcacgccactgcactccagcctgggcctcagagtgagactccatctcaaaaaaaaaaaaaaaaaaaaaaaaaaagtcgtaattaaatacaaaactaaaatctaaaaatgaagtttaaaaaattaagaatttggggattttaagaacaaaaaaaagctgtgctatattcaaccctgcagtccctctccggctccacctgatgtgttgcaaaaatcatcaaatttgttctcaagtgcagtctgcatcatcaaagaacataagaggcaatttactttttcatcatagggctttgctttgatcatgcaacctctgcagccctgtctgtcctcaatttcaagcatcgcaaagaatgctatttcctgcacatctaaacagagaacttaattcaccaatgaatatcttgctttgaatatactcaatagtttttctcaagggtttcagatttcccaaacccatgaaaacagaaaagtcctaattgagacagggttgtgtcttgcaagcaaatctcttctgctgactgtaatggttttctggctttggaggtcccttttggctttttttcttttagaggttttctctctttaggctgctttgcttggaagtggagttcgcatgtgtgccacatccttggacccacagggtgtgctcagctgtggggtgggaatgctgatgtgagctctactcctgtttcttcaaacaaagtttgagattctcagggtttaaaatacttcataagcaatttcagctttatgtggctttttctgcttgaatccagttctactttgagtacccagtgcacaggcattaatagaaggttttatatagaatattctagatttgcaaagaagtaagttggcagccacagataaagtgttcagactctgcaggtttttaaatggccatattgaggaagaaactgaatgaaatggaatatcaaaagtttataaattctcagatttttatgaatctcccattctttaactatgaattttcatcactttagcaaagtgattcttcattagttggattgccagaaaagagagtgtaggggatttgatgatttatccttacaaataattttgggggaaaaaaagttaatgagaacaatatatcttcaaaggcgctctatcagcataaaatgaacttagtttgttaactgacatgcttcactgtaccacctgaaaatcattttgtatgtgaagatttattgggatttttgttttttgttgttgttctattttattaactgtactgaaaatgcctagttgcttttgaagattgaatttcaaacccatttaggagtgataaaatcatcataaaagtcggcaaagctttcggaaagtttagtagacctgagttatgcttaacgagcaaattgtcatgaagattaattcctagctatgtatttctacaagagagttttacaagtctcctttgaaatttggtcttctttagagaaagttccatgattctgatactgttcttcctttctagaaacaagccaatgaccttgtgagcaccctgatgaaatgtacgccccactacattcgctgcatcaagccaaacgaaaccaagaagcccagagactgggaggaaagcaggtatcgggggaaaccggcttaggtggggccgggacctttttccctctgctcaagatgagccgtcctccatcacaggcaggagcagtgtcagttgtccgcacatgtctttgtcatgcccttgcatcttaactttttcaggacaaaagctgtatactgtttcccctccgtgtcatttgctaaaatgttagcagtgccattcatttcagcattagcagtttataatgttgatcttggctagtctgggggcagatggaaaaaaaacaaaacataacctcataccgcagagtcatgatggttttaaaatcagtttgaggttctgtgtagacattcttagtccacccagcccctgatcgggacccacaggatgtggcctagaatgcttagcttggggtggaaagtggagggcgtaagagctgatggaaatacaatccagcatttgctgtgcctcgtgaagacactggggacaagctggaggctctggcattccccctaagcaccgtattgatgagaagaacgactctgggaggaaagatgtcaaagggaaatgcagagcacaagaattcagcaaaccctttctgccctgacttccagtgaagcctgcatcactgttcctcccacagctaggatttagggaagtggcctgggcaggaagaaatggcggcattgaggaggagcctgttaaggtggtggctagagggtatgaattttgtggcccgctgggagacccagacacacattgttcagaggcctgatcccactgtccatagaagcatgggaaggagggagagacttaaactacagagaggaccctagccatcgtcacctagtatcagtcccaggatgggagcctaccagaattgctacctcttgtcttctctcttggagaaaagaaggtaggctcttttaggtgtcgagtgaagagctccaggtttagcttccacaggaagacaaggactaaaattcctagctgccgattatctcctgcgagggacaggtgtgtccattttccttcctgccagcaagatcctaaaccatggcagatagatgatgcctgatcctttacaggaggaaacagatccatagtaagaaaaacacgtaggtcaaacatttactgtctgaaagttcgttctatttaatattgaatacttcggcatgcagtctaagtctgttctctcctctgaagaagccaggctgcttggatgtaagagctgccatcttttcaggccactatgttctgaataatctcatccatagatgcatattcttaaggatttttttttttttttggagacaagagtctcgctctgtcacccaggctggagtgcagcggcatgatcttggttcactgcaacctctgcctcccggtttccagtgattctcctgcctcagcctcctgagtagttgagattacaggtgcccaccatcatgcctggctacttctatatttttagtagagatggggtttcaccatcttgaccaggctggttttgaactcctgacttcgtgatccaactgcctcggcctcccaaagtgctgggattacaggtgtgagccaccacccctgaccgcttaaggcatcttttctattgaatctctgaaatttttcaatttaatgtagtcagattccttctacaatattgtccgttaatgatattcaggcccggatgaggagctcatacttgctaaggtgaccagctcttctttggtcaattcttactttaggaggctgtacagtccttctctaggtcacttttatcctaatcccaggttttcaatctgcgataagaatcattctcattactttgccactggacaccttttctgttagttcgaggtgaccgtcgtgtttctcttgaatcttctcttctacaggttaatccctctcagttccgtcaacagtttctctaggacatgaaatataagcattccccatcttagcccttctcttggaggtacttaatttggcctctgcttttctgaaatgtatagttccgcttctcctttcagactaagagggtagcagcattgtcatctcttctcctctaaagatgtaaaatgcttacacccaggagtttgaggctgcagagagccatgattgagccactgcactccagcccagctgttagagtgagaccccaagtcaatcaatcaatcaatcatacagaaaacatcttgttttgctctcttacattggttcccatacttgagcctgcctcaggatccccaggaggccttgttaaagctgagattgctgggctccatcccgagtttctgatgcagtgggtctcaggtggggcccatgaatgtgcatcttaaaaatcttgcaggtggtgctggtgatgatggcccaggcactgcactttgagaatcactgatctagagcaaagaactagactgtgtcccggtgctgacctatcactaagttgttagagcgagactcttcatctccttagccctcagttccttcctcttaagagggtccatctagaataggatctccttcagtctgacagaatgaaggcttccagacagtggctgtcagtctgcctctgtctctgtcacttttacactcacctctcacacatacccacacttgtacacccacccacacatacatccacatgtacacacacacaacagaacagtgatattaaatcaatatcccaatatgattactccaaccaaatctttagtcaaccttagaaataaaccatgagagtcttggaagcagaggtattgccaaagggggccttagcccaccttcccccatttcaaactctatccacctgctcttcccagcaaatactcttaaatgaaaacatctcacttgccctacaaatgcattttgacagtcttggaaaaagactccctctgcaagacggagttggcatagcctagggaacaactgggcattgtctgatcaatgccccctagcacaccctcctctaccccacgtagatagttctactgaaagcccctctaaaatagaaattttgcaatagctgcttggaagttcaccaaccctgatgctacttccttgtaaaaatccaacataattcattggaatatcagaaaatggagaaattaaatgagtggtacattttattcagtaaatcctcataggatgaggatggtattttctcttttcttttttttttttttaaatgattcccctttgaattgcagcaaagaattttatgacatgcattcaaataaactggttttaagaagttcaaggtattagttggtcgagcgttgatttataattccagtaagaccgctttctgggattccacccttaatcctggtttgggtttattgtgtaacaaatggtttcactccatccatgagtcaggagtgttagggtccgtgaaagggcagtgtgcttcactggctgggattacacacccagttgaagctcctggtaaagagggttactcattccacaagtttatgaggtgtagggtttttcttttcctgttgcaaatgcgtttttgtttggcttctggcaaggttgcttgccctgcattctgaattgctgccttgcagagttgtctagccctgatcaatttgagtaaacggccagggacagtcttggaaaaagactccctctgcaagatggagttggcatagcctagggaacaactgggcattgtctgatcaacgactactgaggaggtgacagtgctccaggaatatgcaaaaatcaacttgtgtcgctttgatgacccccaaattttaaacattacaggacttgctagactcatttctaccagaaaatttcctgatggtggaagttataatgaatgaaacaatgttttaacatgaggaatattccttcctatgtgattcatgggagaggaacgtttctgcttgaattaatgggtgatgcattccctgcctcgaaagcttggcgtgaagccagtgtttatgaaaagtactttaaaatgagcagaacctttaaatgcatttttcatgcatttttctcactagagaaaaggccagtggcgagttttagatttggagggtgagagaaaggaaaattaattatttttcaatttaattacctttttaattgacatgacatttctttctctctctctctctctctctctctctctctctctctctgtctctgtctgtctgacttatatgggcaaaggtggatatttagtacagacggggtttcactgtgttggccaggctggtctcgaactcctgacctcatgatttgcccgcctcggcctcccaaagtgctgggattacaagcgtgagccactatgcccggcttaactctttgcacacagaggctttctgaaagttaataatcttagaggaatcaacatttctggctcttggctctgtaagacccatcaaactggagactcttaaacaccactcccattgtgacatccttcccatcagccaaggttgcacccccacttcgagcttcatctgtccccctcctcctgtcccacagcaccctgccactggcctttcctattcttgtacctttgctttcacagccctctgccttgtcctgtatacctcatggattcaactcgcccctccaggcccaggcacatcacagtgctcctgagaatccctgtgctgtgaaaaatccacttccttctctattctcctatcctggtttacatattgtagctgggaatggatgacgataataacagctttacatgctcgtgctacgaactaagtgctttccatagaaagtactcgtctagaaataaagaatttatgccaccattcctgtttttacagaagaggaaactgagaggcacagagaagttgcatcgtggcagggccagtggcgcagcaggaatgcagcaccagaacctggctcctaaccactgtgctgcctgtgtgggctccagcaggaatcatagcattgtccttttttggtgaccctagcatgttgcaataggcactgtgtgtgactggcccacagtagacatccgcaagtatgagacttaattggaaatggtggtttttgtgagagccttactgggaagacagctgttgggaacctgcgtgacatcggaatgaggatgcttctgattgtcttttcagctcagcagctcctgaaaggcccattttgctgagcgcattagccccgttatcagcacagatatccccaaatgtaccaaacagggagtgtgaggagttacctccctactgcagcacaatcctgacattccatcttcgaaagagagagaccttactttttatgtctaatttgcctcaaataccatgtttccaagtgtctggttcagccagctcgcgcagcacgcagcccaggcccaatttatcttcccagagtggatgatctgaagcaagttttcaggatctgtcggcatccagagcactgtgttttccagcaagtggtgggttttcacaaggcacatgtccgtgctccaccttagacccagcaggtgtactaaaatagcctccccaaggtgcaggcctactaaatcagcatccccaaggtgtggggcatggggcatcttctggtatgaaaatcctcatgtgtgagaatattaacctaatagttctttacatccattttttcaaaagacattgctagatttttactgttaagaaaccaggatgggccaggcgtggtggatcacctgaggccaggagttcgagaccagcctggccaacatggcgaaaccccgtctctacgaaaaaagacaaaaaattacccaggcatggtggcacatgcctgtaattccagctattcgagatgctgaggcaggagaatctcttgaacccacaaggcggagtttgcagagagccgagattttgccactgcactccagcctagatgacaaagcaagactctgtctcaagaaagaaagaaaagaaagaaagtttgccactgcactccagcctggatgacaaagtgagactctgactcaagaaagaaagaaagaaaagaaaaagaaaggaaagaaagtttgccactccactccagcctggatgacaaagcgagactctgtctcgaaagaaagaaaggaaagggaaagggaaagaaagaaagaaaagggaagggaaagtgaagggaaaggaaaggaagaaacacgccgagtacagtggctcatgcctataatcccagaactttgggaggctaaagcaggcagataattgagttcaggagtttgagaccagcctgggcaaagtggcgaaaccctgtctctccaaaaaatacaaaaattagccaggtgtggtggtgcatgcttgtagtcccaactgcgcaggagcctgaaataggaggatcacctgagcctggggaggtcaaggctgcagtgaactatcacatcactacaatgtagcctggatgacaaagtgagaccctgtatcaaaaaaaaattcttgtaagaaagaagaaatcaactaaaactataatttagatatattttagaccatttttaatgtacacacttgaaattaatagttttaaatgcccttttgtaacttgtattagaaaagcctagaagtgtagttccattaagtcataatcaatattaaaatttaagttcaataacaaaaccagcattagcatcatttaattcaaaagttaaaagttctttcctttagccttctgattaaccaatatttttgttcatactctaggtgatagatgggtctttgtgttactgttattctttgaaatagatatgtaatgccctgttatttaattgctgtatttttatttatttatttatttatatttattttatttctgagacggagtctcactctgtcatgcaggctggagtgcagtggtgcaatctcagctcactgcagcctctgcctccctggttcaagcgattttcctgcctcagcctcccgagtagctgggactacaggtgcgtgccaccatgcctggctaatttttttatttttaatagagacagggtttcaccatgttggccaggctggtcttgaactcctgacctcaggtgatctacccgcctcaccctcccaaagtgctggaattacaggtgtgagccactgcgcccagcctaattgctgtatttcaatatttaaaaattagcattatgtcatctgagaggtcagctcagtgtttgaacactataaattgtagtcttctgaatatgtttccctacagcttggaactgggggcttgggggttggctggtaagaacacgagtgaaaggattatccagtaatgtccaggccccattttctcctttgcacagggtaaagcatcaagtcgaatatttgggtctgaaagagaacattcgagtgagaagagctggctatgcctatcggcgcatcttccaaaaattcctacagaggtaatgaactagtgactctggccttttttaaaacaggtttattgagctataattcaaatctatacaattcacccacttcaagcgtacgagtcaatggcttttaacgtattcacagagttgtgcaactatcaccaccgttaattttaggacattttcttaccctgaaaagaaatcatgcttccctttgttgtcaacctccaattctccccttgcctctgggcccagtcagtcacttatctaccttctgtctatagatttgcctatgcttttcatagcaatggaatcatatatgtgtcctctgtgactgacttctttcactgaacataagattcatccatgttgttgcatttccatgcttccttcctgttaattgcagaataatattccattgtgtggatataccacagtttacttatgcattcatcagttgataaacgtcagttgtttccacttcttggctattatgaataatgctgctatgaaaatctgtgtacaagtttttatgtggtcatatttcatttctttcgggtatatgcttcaaagtgcaattgcttggtcatatggtaactctgcatttaacctttgagaggaactgcctgattgttttctgaagtggctgcaccacttcacattttgtaccaccagcagtatttgaggcttccaatttatctaaatccttgccaacataagttattttctaaccatcctagtgagtgtggagtggtatttcatgatggttttgatttgcatttcccagatggcaaattatattgaggattttttcatgtgcctgttagccatttgtatttcctctttggagaaatgtctgtgaggccctttgccattttttaattgggtgttttgtctttttatcattgcattgtaataataattcttttactgttatttattgtagaataaatcagtagccataagtattcattaggctgtctgtttagtgtaacacataagtgcaagaattcttgataattgtgccacaggaagagcggaggtttaacttgactgaataaattaacagtatgaagacaatttcaggaaaatgtttaacccacttaagacaataagcttaaaatatttaacctcaaaaattttgtacaatccatgtataaatttaaacttatttttatatatcccttaacatgtatttggcaggacctatacttaaattgttcttattttgtgttgtttgtaaaaggataaaatgtggtacccttaaaatgttacatcactctaacttctctaatgattctgtggcgttccactgtatttctacatctatttaatttccttgaaggaatagggaaacaaaaaagaagtaagccaaatgtagtgttttatttatttatttagagacaaagtcttgctctattactcaggagtgcagtggtgcaatcataactcactgcatctttgaactcctgggctcaagccattctctcccacctcagtctgcaagtagctagtactacaggcatgcatcaccatgcccagatgactttttacttttcgtagagacagggtctcgctatgttgccccagctactctcaagtgatcctcccacctcaacctcccaaagtgttgggattatcagcacgagcgaccacaccgcgtcaaactgagcattttaatcagaaacaattacatcttcctgatatattatgcaggggctggatataatgtttttttttttaaattcagattgtatataactgaagaagaagttaattactgtctttggaatctagtatttctaataagacagttcttatttagggctgttgtttcttctgctatgagattaggacagccgactcaccatttagaggttttaaaaaagagctaatgattttgtataataaagcgtcagaaactcagtcccccacatttgagtttcctaataaccgtggaggtgagttagactaggaacaaggtttaccctctttgttctctgaattaaagacgtcagtacgcctatagtgtaagcaggactatgtgaaagaaatatttaggaagttgagaaaaggtatttgtagagcttttgcatcacatagcaccacccatttgctgacacacaactgagatgttagttatgagacttccttaaacagatcagtaacactagctcagaaaaggttttctcaacctcagaccactgacattttaggctggaagattctttgctgcgaagtctgtcctgtgtattgtgggatgtttagcagccttcttggcctccacccactagatgccagtagtgtaccttcctctgagttgtgacatccaaaagcgtatccaggcattgactaatgttccccctacagggcacagtcagttgaggaactttggcttagataatcatttttaaattttatttatttatttattttagagataaggtctcccttggttgcccaggctggtcttgaactcttgggcttaagcagtcctcctgccttagcctcccaaactgctgggattacaggcatcagctaccatgcccgaccccaaaatacccttttttaattaagaggggccgggcacggtggctcacacctataatcccagcactttgggaggccgaggtgggcatatcacctgaggtcaggagtttgagaccagcctggccaacatggtgaaacctgtctctactaaaaatacaaaaattagccaggtgcagtggcatgcatctgtaatcccagctgcctgggaggctgaggcaggagaattgcttgaaccagggagatggaagttgcagtgagttggcatggcgccattgcactccagcctgggcgacagagtgagactccatctcaaaaaaaaaattccacacagcaaaggaaacaatccacaaaatgaagagacaacccacaaaatgggagaaaatctttgcaaaccatccgacaagggattaataaccagaatatagaaggagctcaaacaactttgtggggaaaaaatctaataatccaatcaaaaaaatgagcaaaagatctcaagagacatttctcaaaaaaaagacatgctgatggcagacaggcatatgaaaacgtgttcaatatcattgatcatcagagaaagccaaaataaaactacagtgcgatatctcacctcagttaaaatggcttttacccaaaagacaggcaataacaaatgctggcgagaatgtggagaaagggaaccatcgtatgctgttggtgggaatgtaaattagtataactactatggggaatagtttggaagttcctccaaaaactaaaaatagagctaccatatgatccagcaagcccactcctaggtatggagccaaaagaaaggaaatcaggatatcaaagagatatgttcacgcctgtgtttatggcagcactattcacaatagccaagatttggaagtaagctgcatccatcaacagacaaatggataaagaaaatgtgatacaggctgggtgcagtggctcacacctgtaatcctagcactttgggaggtcaaggtaggcagatcacttgagatcacaagttcgagatcagcctggccaacgtggtgaaaccctgtctctactaaaaatacaaaacttagccaagtgtggtgtcccatgcctgtaatgccagctacttgggaggctgaggcgggaaaattgcttgaactcgggaggcagaggctgcaatgagtgaagattttgccactgtactacatacaacctaggcaatggagcaagactgtgtctcaaaaaaaagaaaatgtgttacacatacacagtggagtactattcaggcataaaaaataatgagatccaggccaggcgcagtggctcccacctgttatcccagcactttgggaggccaaggtgtgtggatcacttgaggtcgggagtttgagaccagcctggccaacatggtgaaacctcatctctactaaaaatacaaaaattagccaggtgtggtggcgcacacctgtaattccagatactcgggaggctgaggtggaaggattgctggaacccaaggcagaggttgcagtgagccgagattacgccactgccctcaagcctgggtgacagaacgagattccgtctcagaaaaagaatgagatcctgtcatttgcaacaacacgatggaattggagatcattatgttaagtgaaacaaaccaggcacagaaagacaaacatcacatgttctcacttatttgtgggagctaaaaattaaaataatggagctcatcaagatagagaataaaatgatggttaccagaggctgggaagggtagtgggggaaggggaagggaggtgcagatggttaatgcatacaaaaaaatagaaagaatgagtaagacctagtgtttcctagcacaactgggtgactatagtcaaatataatttaactgtacattttaaaacaactaaaagagtatagttggatttcatataacacaaagaataaatgtttgaggagatggacaccccattttccatgatgtggttattccacattgcatgcctgtatcaaaacatctcatgcaaaaagtaaaaaagaaaaaaaatctcatgcaacccataaatatgtatacctactatgtatccaccccccaaaaaaaacttatcagtccaggtgcagtggctcatgcctgtaatcccagaacactgggaggctgaggcaggaggattactcgagcccaggaggtcaaggccacagtgagttagcctgggtgacagagcaagactgtgtctcaagaaaacaagaaaaaaaaaaaaacctgatcaaaccttttttaatctattctgggtttttttgtttgttttttgagaaaccagttctgaaagacctccttccttctaccttgttttaaaaaccaaccaaccaaccaaactgacttccataaacaatgctgagagtgctgccatctcaggagagcaggaagtctatgcactctttttcccgtctaaggcaggggtccccaactcgcagcaggggaccagtactggtctgtggcctgttaggaactgggccttacagtaggaggtgagcagcgggccagcgagcattaccgcctgagccccacctcctgtcagatcagcggtggcattagattctcataggagcacaaaccctattgtgaactgcacgtgcgagggatctagcttgtgcgctccttttgagaatctaatgcctgatgacctgaggtggaacagtttcatcccaaaaccatccccacaaccccgtccatagaaaaattatcttccatgaatcctggtgccaaaaagattggctggtgtaagggaccctgtgatacgtgcatgaggtgtgaactgactctgttgattatccggatctgtctcgagtgccatgccagcttcatgattccatgctgtactttacgctgtgccgcactctgagtaggcattttgtgaaatttgttattccttttatgttgaggaacttccactgaaatgcttgtatccttggatgcctcccttagctctcctgctgtaagcttttcctttcagaacagacaaatagccttgtctctattgtcaaaaagtaggctcttttattgttgtcatacttttcttggtttgagaatactggggctgggcaagatggctcaatgcctataatcgcagcactttgggaggccgcagtgggcagatcacctcagatcaggagttcaggaccagcctgaccaaaatggtgaaaccccgcctctactaaaaatacaaaaattagccaggcatggtgccgggtgcctgtagtcccagctactcagaaggctgaggcaggagaatcgcttgaacccgggaggcgcaggttgcagtgaaccaagactgcgccactgcactccagcctgggcgacaagagtggaactccatctcaaaaataaaaataaaaaaaaagaatactgggaggagaatcaaagtttggaaagaaattatttttctataaaaaggacattttcaatcccccacactatatttcaaaactgttattgaagcagtccactcaaaagtggcttgaagtcccactatatcagtgggcgggggtatttctctggagagaacacaattttccataagacgcatgagtctgggatcttggtcatgcagaattcatccagagtccaccgccaactgtctcatcctatgatgctctacaagtaattgaaccatctcataactttattttctctaaaggtgagaggaaaggctttgttcataaaattgctctctaggtgtccacagaaaggctgccaaatgagaaacacaaagtaaaagcctgaagggaaaggatatattaatacccagcacaactatccacatctgcatgtattatacaccctccctatataggaagttcacaggcctaaacagagccatggctcacagactacccagagcatagtgtttgcttaggaaatattctgtgtgtttagtgtgtgttcgtttcctctctggaaaatcctttatatttatcaaaaccatccctcttgactgaatattggagagcaaaaatcaaaagatgccttaattcccccatgggtgggccccatgctcttgaagtaagtgctgtgctacttgaagcagtagtaggaagaacccatttacaccatctccccactacaacttttatgccttcagaaagtgttaaaaaactgttacaaatagccatgttgtgtcttggaaaataagttctccagaaaacacctctctgagctaggcaatgtgtgtttctttctgtggttggcagaaataagcccaaatacagattctgatgcttaggaggaagaatgtggtagaaacataacagatttgcaaagtctatcttgtagcatgatttacacttcctcacaagcatgcttcctctgaccttagcctctcagaatgtggggatgataaagggatgcctcatcagcaaaggcgttccacttcacgggcaagagagaaggaggaataggaagcccaggaaagcacggagtggtggagagcgtcctcctggctgccaggatgtttgtgtcctccgaggtcagaaacatccttaatctcaagtgccagcagctgggagtccctggggtcccagctgcatttcctctgagaaggaaacatgggatcagtgatccaagagataacaagagcagggaacagatttccaggcagaaagaggagctggcacaaaggccttgagaggaaatattagcatatttgagtcttaaactgaaaatatgtgatgaaaggaatgtaagctattattgccatctgtccaaaattatcacaggcaccagttaggcaggggcaccattgccctgtgcaacctgttcccatgagtatatcctagagaaagagagtggcctgggtacacttggtaggagaacatgtgttgttggtttatgccctggtctccagtgcgataccaaaggatggggtgaggatgtatcaggcttcatggaagcaaaggaagccccaggcaattcccatgtattgccaagaccctcaacactggaggccttgtcaggataagggagagaaagtctctgcaaggttcgttaccattaaaaaaaaaaaaagagaaacgcagcattaattttgtaggaaaaaatgtgaattgccataaagacccatttccagttgcacgataaatatactttagtttataattttaggttagatcaagccaagcaaaactgtactctcagaagcttgtcaccttgaaagtctatagtcttttccttctcacttctaccctccatgaactttctgcctcacccaattagattcctagcacctactcattttcactaactcccccaatcacatctagacaggttctgctattagtcatttatgtgtagcttaatttgttttaattaacatccttataacatatatgaatgttattcatgctaatgtgtgacttccactaggcattttcatttttaagctttttatctctaattagggaataggaggatttacctctctaggaagtttatgatattatcaggcaagatgcagacatttgagaggagcagagaaggctcctaaaatcacctgagtcgcaaccagctggcagggccactcaaggttcccttctcccttggctgtcataaatcagtctaatcgtgacagtagtttctgggaacaaaggagggccctggcttcgctcaaggcctgggggcctattgcctgggccctggatgtgctctcacgtgggccacgccctccaacttcacacccacacatacccatgatgattctatccatatttgacaaactgtaatgtgtttgtctctccttgattatatcagcctctgacataatagtaatgtttctaacataggcatgtatagtagactggataatctttaaaagaaatatttaaatgtgaaccagtccatggcttttttacagtgccatcatgaaagagacagagagggattcaaatcccatctctgacgcttaatggctaagtagccttgggcaagtcataatttgcctctgtctcctactctgcaaaatggaaaaccaacctgatcaggttgctgtaggagtaagaggagatcgtacatcaaaagcttcaatcacagcacctcatgcagagagagcacccatccgcattagccaggaatgttcattatgactgctgtgtgccaggcacggtttaaggctctggatgtacagcaggagccacacagatgtggcatccggtctcctggagctctcaccttcatctgggaggcataaattaaccaaataaacaccaccgtgaatataactaccaattagagtacatgctctgaaggaaaaatagtacttgctatgagagaaactaacaagagagcagtttttgatttttggtccaagaaggcctgtctgggagtgtcactgaaggtgagacacccaagcgggagccagccgagtgatgagtttggggagcagcacaccagtagaggggagagcaggggcagaggcgccgaggaaggaaagggcatggtgggcatgaagaagaggccattctcgaagaaatgcagcaagccaaagtgagaatgaagaggcgaggctggagaacagccaacgaccagatcccaagggcctcgtgacccagatgcacagaatttcaaaggtgaaagttgatacacagttgtcataatagctgtttagcaggagctttataaaactctttgcattaagtgttaaatgccctgaagaagtcaggggagatgattattgagacaagaccgtttgatttttgcctaaagaccacccctggtggccttccacaatgctattttcagacagtggtagaaagagtacgcaggttttcaccagggtgttgacgtgggaatgctgggaaagggaaagaagcaggaggcagctcgggaacgagcatcccagactcgggatttttgcagtcatcgcagtccacgcctgagccttcgaacgctggtaaacagatgatcagtaactttgcagcactgggcaccttcagagcagagctcttgctgccttgcccgggtagaaaaccagtgcggtcccgcccaagtgtgattctcttctccccaatgtccccacaggtatgccattctgaccaaagccacctggccttcttggcagggagaggagaagcaaggcgtcctgcacctgctgcagtcggtcaacatggacagcgaccagttccagctggggaggagtaaagtgttcatcaaagcccccgagtctgtgagtgcttggctggctctccactctcttccctcccgcggggcccccgccagccctgctccacccctcagctggcttctttttctcattcttcgcttcatgccatcaatgttgtctcctcaaagaagccttccctcccttcctggtctaagtgggtccttccctaaacacctgctctccatagcccatcactgcccggttcatttcctgcagagcactaagcagatagaaaaaggggcatcagagagtggctccttcctcactgactgtctcgctcctctctagctgctacactcctggagggcagggactctttgttccatatgtgtttatatacccaaagcctcacacagaaaatgctcaatagttacttaatctctaagagtgtctaagctaaagagggacttcagtgtcccacccatggttagttgacaccaagtcagttacgcatagtctcaggattcctcctggaaggtgcagcagagtgccgggtgggaattcccaggattgtacctagaaggctgtgggggagcctagaaaggactgtgagggggaaaataggtgggaggagaaatctctggtttatagaacacagtacttaccagtaaggcattcataatacacatttacaattcacaaacagtctgctacagcttcatttagagacacttctttctttcctgatgagagtgtggtcagtgagccccatgaatgtccacaggaagttctgttcagttcttctgcccagtttgctccagggctgcggaataaagacattcattcctttttaagctggagaaactgctggaaccgaggctcagcatcatcgtttctcaaggctcccttaaccatcacaagacctatttcaagagtcagtgatgaacttggcagaaatcagtcatcagaccaaggggaaatcatatgggaactcacagtaaaaagggaagcatttgacttcaggcagatcccagtcttgccattagttttcttctcctctaaggtgggccccatagccactgtttctgcctgcctcgtaggatcagcctgagactcaggaatgataatggctataactgaatggctttgtgagacatcaagattattaaataaataagcggcacacagagatggaacccatttatgacacgtttgtggtagcatttttctactttgagttatttgtagcttcacaagaattttcatttccaaatataaagtgaaaatgttgtgtcattcgccattaagcaacccacagaacagttcctgttctttctaaaatgggatggagtgatttatcggtacaatgcagaactccttgtttcatacccgctgttacttttcaacttgtgaggttttcatatataattaaaacagcctcaatatttgtaatacttttttttctgcttcagttgcgttggagggggttatattcaaaatcaagatttatttttggctgtccttttccttgccttacattcaattgtgttattaccattatttgactctcctttcccccatctttgacacatgcactcacacacgcacaccatcacctccgctctctcccctgccccaaacgcatacatccccatctagccctgacatgcaaatactttcacaaaagttgactcttaaaatctggctgggcacagtggctcatgcctctaatctcaatactttgggaggctgagttgggaagatgacttgaggccaggagttcaagactgggcaagtcagttagacctcttctctacaaaaaaatttaaaattagctgggtgtggtggtacacgcctgctgtcctagctactcaggaggctgaggttggaggatcacttgagcccaggagttcaaggttacagtgagctatgattgtaccactgcagtccagcctgggcaacagatcaagaaagaccctttctctaaaaaaaagaaaaaaaaaaaaaaaggaaaaagaaaacctaccatgtggtttcaccttaatagtaaatgttctgaatatacaaaattacctatttgctttaagaacccacatcataaccgcgcgcagtggctcacgcctgtaatcccagcactttggggggctgaggccggcagatcacgaggtcaggagatcaagaccatcctggctaacacggcgaaaccccatctctactaaaaatacaaaaaaaattagccgggcatggtggcgggcgcctgtagtcccagctactcaggtggctgaggcaggagaatggcgtgaacccaggaggcagagcttgcagtgggccgagatcgcgccactgcactccagcctgggtgacagagcaagactctgcctcggaaaacaacaacaacaacaacaaaacccacatcagacaccatagggtttgtttttgttttgttaaatgtatccatgtcttttggcttttctcatttaaggttgttttgtgtgttttcctgttgttgttgtttggtttggtttggtttttattctctccttatctgtgttatcaaggttttttcttgaacctccctaatttctaaccccctgggcttttaaaaagaaatctaaaatccagcgaatctttgagatagtctctaggaagttgggaatcgtttgcctgttcatcctttctctgagtcacaagtgtattttctgtgatacgcccaaaatagttctgggaaagaagaaggaaacaagacttactcagaaacccaatacacaagataagaaatatcaatggatattcttacaacaggcaactgcagggctcagattttaaacattctgtccagttgctaatctgtgcattccacttggggtttagaaatctgtccttatgcctattgtttacagcactgaagccaggggaattacgtggcccctcccctggtgtttggagtttgagttgttgtttctgcacagatggatctgtgaggagagaagttgagtggcaggagaggataggtctgtctcccaagcatgcacccggataaacagagacaacaaatcaagcccagctgccttcaaaccacattggcttgtttacttctggaacatttttgcaatgactgttcatcatctttactttggatttttattggttgattttatttttttcctagagagtcatgtaagccactctcaaggtaaatgagaaggtttcctactattttacaagtggatcaagtgcagatttacagagaaagctttgcgtgtctaaatgaggaggagcctggcagagcctgaaagacctaggttcactttctagccccacccagtcttagttccaatgttctcatctgtaaaatagagatgacagagtatgcggctcatgtagctgtggaggcgttgaatgaaactgtgtggaaatcatctagggtgacttctgccccatagtgggcactcggctcactacagctgtttgctgtcacctttatcattccaaggcctggttgaggcgcagctgtcagcattcattggtaaaatggccggactctcaagacctgctagaggctgatgtggtccctaaacagccccagcctttctgggcaaatgcaagtcctcattaacacacctcacgtccagctccagtcactgtggttattatcctctgctccgctgctccttggtgaatcctgagattggtgaatcctgagacaggaagtctatattttcttggaactgaaagtagggcagccctccttccacagcagcacaagcccagctcctgcagaaactggaaaattctgtttagaggctgcatgcagaagtgccgcgccaaacaacagcaacagcctccacccactcacttgatctgacttcctaataatatactctttggatcaaggtggggaataagtggagaagcattgaatcgctcattcgattctcacagagactgtagcaaggcaggacaaggtctaactgaatacactcagattctcctatttcccattgttttccattaaaagaaaaaaaggtataggtcattttatagtgagaataaacaacatgccacagtaagcgtttcacatattcgttcatgaatcagagaagctgcttcccgtgtgtgtcattgtctaaactgagggtccctggaataacaagaaaagtgttgttcagggattggggcttggggcttggctcacatttgtcttctctccattcacagctatttcttttagaagagatgagagagagaaagtatgatgggtatgctcgagtgatacagaaatcatggaggaaattcgtggcccggaagaaatacgttcaaatgagagaagaaggtattttagcaattttgtttcattgattttaataaatctgaagagtaaattggagcttaagtgaagttttaagttccattttattttgcatataatgtcacgctaaaaatattgcatcatttagagtttctttgtatatttccacagtattttcctcccttttctgactgacttatccttcttccatcttgaccctcttgggaattgtagcctcagacctcttattgaacaagaaggagagaaggagaaacagtattaacaggaactttataggggattatattgggatggaagagcacccagaactccagcagttcgtgggcaagagggagaagattgatttcgcagacacagtcaccaagtatgacaggaggttcaaggtacgtgctaactgcctgcctctgagatcaccaaacagattccttatttttttaataacttgttattttgcttttgttgttaccaaatcagaatgtgttcgttgtagaaaaatttagagaaaatacagtaaaccaaaagataaacaggcacctatgcccagaaacattcactgttaacattctgtgtatatccatatctttcagaatgtttttatgaaaacatacatttgcgtatttagttttacaaaaaatgagatatacattacatgctgttttatgtcctgaagtggttttttgtttgtttgtcttttaaataatgcgagaattttcgatagtaatacagttagcaatataagttattttacatggctgcatagtattccatttgacagatgctttattatttttaaccagtttctcatgaatcaatttttagtgagtttttcttttttactatcgtaacttcagtgagcatcttttcacacatctttgtgtatctatctgtctcctaatatttttagaagaaattgataggagtgaaatcgttgaatcaaaggattcagagtatcaagtaatattgcagagtatcctcatccattttcccagagtggctgataagtaaggcttttccagccacaggaggaacagttgatttttcacctcctcctttagataccttttgataaagtcttggtcctaatagaaaaatctgaagcttcagaagctcatggacccgttaagagcttttggctttttgccaggggcggggaggtcaagaaaaaaatttaacgaaataaacaacggaagcatgttttgctaaaaccaaaccattccttgcaacctgtgcatggcaccagctgctgtgacggcagccctggatgcacacaggggtgcttagctctcgcagcggtactcattataaagtggttacccacaaattcccaagtagatttctattagattattgagaattatcattcaaatgacaatatatcagtattttagaatgaaaattttatgaactcccaagaaaatatatgcagacactgccctctgtttagaaacatgctgtagtgcatccttgctaagttcaccacaggtgttggtgactttccctttacacctgctgtcctgatatgtgaagtgactccatatgagtttgccagtttttaagtcaaaaagagtcaaatgtcatcattttttacatgtcatcctaataatcatgaacaatgccctctttcactgtcatggggcccggtcatgtgatgaatggaatggcctctcaacagtagtgaagattgactgtccaaggcagcttccccctgtcctggtaacagcagtccactgtgtgaattgttgtcatcacattgaccatgtctgtccacctttttttgagacggagtcttgctctgtcacccaggctggagtgcaatggcgcaatctcggctcactgcaacctccacctcccaggttaaagcgattctcctgcctcagcctcccaagtagctgggattgcaggcgcccaccaccacacccagctaatttttgtattttcagtagagacggggtttcaccatgttggtcaggctggtctcgaactcctgacctcaggtgattcacccgcctcggcctccgaaagtactgggattacaggtgtgagccaccatgcctggcctgtccagcttcttaaagctcctctccttacagggtgtaaagcgagacctgctccttaccccaaagtgcttgtacttaatcggacgagaaaaagtcaaacagggcccagacaagggcctggtgaaagaagtcctgaagcggaaaatcgagatagaacggatcttgtctgtgtccctcaggtgagtagtggaggtgcagaggcaggactgccccttctcgcctcagcatcacggtccgctgttccaaacagccaggaggaaggccgggctgggcttcccagctgtcaaaatcatgatcaagagaatggaatttccctttgtcccaaagggaagactccctagtctcagcaagtcttgatatgtcaggaagaaggtaccaagaaaaggttgcctccggacagctcctctaatcaagggggacccagatctcttgtaaccgaaacatgttagaaatgaacccggtatatggaacacctcagagaataatttctcttgttgcagtagagccaaggattcagagccctgtcccccagtccacctcacccaggttggaggcctcacccatttccctgagcagagggtcctgaaagggaagtttctttgggacttccttagggagtgcaagttggtctccattctctgtagccctggagtcatcgtgagatgctctcttcgctccagttctcaggcagtggggagtggtgtttgcttccacaaggcctcaggaagggcccttgctcctcccggcagcaccttggcttcctctcggcagaagggctcctctgccggccgtcagcatctcctccgtcagtgggacctaggctaggggttcttagcataggaggtcttcccatgctaagaagtcctcccatgccaagaactcccagactaggagtcctcccatgctaagtcctcccgaagtcctcccatggtaagaactcctagactaagttccgctgacacaggaaatcctcgcaatccatgaagactaagaatggaagaaaggcctccttgagccccatagcttcctccaagaatcgtgtccctgggcctctgaggctaacactactttaatcaggaaaagctttgggcctttgcattaaagatgttctgctctcacatgaacatggaattgggacgcctgtcaaactcttactccacacagaaggcaaaactggtgcgctcaggaaaaagcaggggttttatgtgctcaggcgtctgatgtaccaagctggaaatcctagttccagtctgataatccaaaacagatttctagttgcatccattcttgcctgtgtctctgtggtttctgattctatctgttcctaatttccctggataaagggccaggcagtgcagtgcagtgaagtatttaaaacgtgccaactcaggatgtggtaaagttgctaagcagatgagtccgcagtgtccattttgcagccccacctcaggtaggtttcaaggctattgttttttttgttttttttttaaagctctaggcgctgactgattttctgaaggccttcctaaacattcagctcactggctgggtcccaacctgagcggggcagtgcctgctggccacactcttcctggctagctgggccctgaggctgccgtggaaacccaacaggaagctcctgctttgtttgtcattgcatggggccctgccatgcctggactaagccaggttggccacagcgtgcttggcaggcacagcaggtgaaagtcagggaaccacagctctagggtgtgtgtagtcgctgtgccgagagtgacttgttctttctgttattgcccaggtatgtcttcagtccctcagacccctggtggagtgctcatgactgggaccataaattatcctaattgagctacatttgtgtggttgttttgttttgttttgttttgttttgttttagacagagtctcgctctgtcacccaggctggagtgcagtggcgtgatctcagctcactgcaacttctgcctccctggtccaagtggttctcctgcctcaggctcccgagtagctgggattacaggcctgagccaccacccctggctaatgtttgtatttttagtgagagacaaggtttcaccacgttggccaggctcgtcttgaactcccgacttcaagtgatccactcatctcagcctcccaaagtgctgggattagaggcgtgagccaccgtgcctggccttgagctacacttgtatcaagcactttgacacttactatcttattgataagtccttgagggggttgtcaagcagggactgtagggactgttcacactcaaatttcttccttttattgttttttgtttgtttattgtcttcttttacagcctctggggatataatctgtcatgggagcaccagcttctttttcttcttcctgttcagtattcattatctggaaggttcctttcttgcggtctttcctttttaaaggctgtagtaaaatgaggtacttagcctaaaagtttttctgactctaaggaaaaaaaaagaaagtgtgagtcatttgaacttgtgatgtctgtgtattgcagtcactgaacctcacacttgccaagatgaataatagtgtcccctcatttctttatacttgagttaggccagtaatcagaaccaagttaggaaagcaaccagagggtgatgtgtgtgcagaatcgaacccagagtggaaattaattctggtaccagactactgaacatgcgtgtgtgttctcaaaatacttcagtactggcatagagaaagattttaacagttggcttgtacttcaggaaaaaagctgcaacatctgtatgtgtttttaagaatttctgagattgaccagttgactattggctggaatgatatcaacatatggcctcctagttacgatttatcaaagtatcccataagcttgatcttagcccatctctagctcttacaattaatgtcagtgcacagtgggcctacagctccctattcaaaccaaccaaccattcagtaacagttacaagacaacatgtgagcatgactaaatatttggtatgaagaatttattgtttatttctgtaggtatgataatgttttgtggttaattttaatataaagagactttatcttttaatgatatgtactgaaacatttgagcatgaaataaaggctgagcgcagtgacccacgcctgtaatcccagcactttgggagaccaaggcaggaggctcgcttgaccccaggaggtttgggacccacctgggcaacatagtaagaacccatctctacaaaaaatgtgaaaattagccaggagtggtggtacgtgcccgtggtcccagctactcaggaagctgaggtgggaggattgcttgagcccaataggtcaaggctgcaatgagtcatgatcataccactgcactccagcctggtagttattttaaagtggaagcagggagagtgaggttgtagataattgtgattatccgtgaattggtgcttgaaatctgacatgtggtggttcattctatactactttttatttttttgagacggggtctcactttgccacccaggctggagtgcagtggcgcaatctcggctcactgcagcctcgccctccaggttcaagcaatcctcccacctcagccccctaagtatctgagactacaggcatgtacccccacttctggctaatttttgtattttttgtagagacacggtttccccatgttacccaggctggtctccaattcctgggctcatgggatctacccacctcgcctcccaaagtgctaggattacaggcatgagccactgcacctggccctactatcctacttgtttacaatttagaattttccataataaaatgtttttctaatcctccagtagatgttaaatttttagaagtctttatcttttctaaacatacagatatatgtctagttgagttacggttaaaaatttttttgaagttttcatttacaagaaaaaataggatcccaacaggtagaaatagggccaatagctcagagagatattaagacaatagtttgtcaaagggactccaggataatttgatcaggaaaaatccttatttaaataaaaattaggctgggtgtggtggctcacacctgtaatcccagcactttgggaggccgaggcgagccgattgcttgaggtcaggcgttcaagaccagcctggccaacatgatgaaaccccctctctactaaaaatacaaaaaaattagttgagcatggtggtgtgtgcctgtaatcccagctacttaggaggctgcggcaggagaatcgcttgagcccaggaggcggagggtgcagtgagccaagatcacaccactgcactccagcctgggcaacagagcgagactccgtctcaaaataaataaataaataaaaattaaagtgaaacactgacgcttgcatttctggcttcattggagactcgggaagagtgtcaggaggtgacacaccaatacagagttgagacacgggatttctgagtgtatggtggctgctggcagaaggccatgcctgggtttttgaaggatcctcccagagttgcttcttgttcaagtactggcctggccccactcttatttgaaaaactcaattgcaggaagggtgaccacaggtgtaatgacccatgttcttggctttgctattgtaggtgttgagttcggtgccatggaagctcttatttgggggtctctgatgaggcttctcatttttcttctcattctggtggctgatcaccagaaggatgagaccaaaagttgtgtggctgtctgtctgggttaatagattttccagtacttatctccaattggaaaaacaacccgtaagacggtgcttttagacagaggctccagctccctggtcacaacattcttgcccagaatgtctccttgcctgaatcccctaaactttctggcaataaaaacagcccacttcactgcctgtcctgctgacctgaagcattactggcatcttgacttgctatggtctgtaagcattgggaacctggaagttgtcaacatcatgggattgagcacctacctggtgctgagccctggtattcgaaggtggatgaggcacagtcactgcctcaggaagctcctctcattctggaagggggaacagacagctgagtaaacatgtgccttactataagtgttcccagcgtgatttaaaggatattcctgggacacaagagaggagagtgggtctttgcatctgcgggtcaggtgaagcttctttgagctggacacgtcactgctgaggcctgcatctgcgtccgggctttctcagagaagttaagaaggttctgaaactggtgccactggtttctctgagtggtagaattctgggcaaggtttattttcttcttgattcgcctccgtatcttccagtttcctaaaagcagcatatatttcataatcaggaaagacttttataaaagcttaaataaaggcagggctatccttggaaattgccttttcagctttaaaaaaaaaaaacaaaactccttcaggactttccttggtgttttgtaactaacatttctgtgaaaagatatattggtgaagagagtaaaacagattttctagtgttttcagcaatacaacagtaagccgcaaagacagaggaataaaaaaacaagggcagatccaaaccagagactaggaagaggtctttcaacacagcttacagcgtcaaacatctgtaaggaattgcagcataggaataagtcaggggtgaagtccaaagataagtctgactttttagaataaataaacacgaaagctttgttttcaggttcaggagcatgggctaaggagagcagaatgagctgagaccctggcctgggtgaaggtggtctgcctagctccaatgcctggatcattgaagggaggggattttggagttgttggttaaagtcaaagtgtccaaacacatctcttctcatttctagattcatgctgataattgaccttgaagttttggcccgcttgcttttttcgttataatagtaatgaaactcctaataaatctaagcacattaaaccactcaaggtgacttgtgttgggctcatttagccctgttgaataatcaccatcctgccacagttcagccaggccaccaggcatgaccagacatgccaaagaaagctttgagcaaacaaccaaaacaggaaggcgtttcattcctcaccccaaaggccaaaaagtggagcttcttgttttactctggtcttttgcatgcactctacctaatgcagccgggttcttacacctgggctagggtgccaggaggcttagactttattaattcaaaatgacttggaagagctcttttgagcagcttttcataagtgctttttggggttttagattgctggctgtacctttaaaggtaagtaggaggtgtttgttcccaggcactatggaactggcacgttggccctgaattgcctttgcatgagctgttgagtgacggagatgaaaaccgtctattgtttaaaccactgcttgtcagggtttatccttgatcccaactatcacaggagtgggcaagaagcatggctatgatgtgtggatgtctgaaaacaaacatctgaggtaatgataatgaccaagtgttccacccaaatggctattatttgtccaaaaaacactgtaaaaggttctgactttacgtccaagggaaactctttggctgctcttcagtaagctggccatgaaaggaccaagctcctttcccctgacactggcctcttgcttccagtgaactccattcaccgccccgccccacccccatggtttgcgcgtactgccattctacgccttcctatccaattgtgctgtggttccttcgacctctttttctcctgtggattaccaagcccctttcctgtaggaggactgaaagtgggtaatatgtaaacagtaagaatttaatttttacagttctagagaccgggaagtccaaggtcaaggtgcaggcagatgtggtgtctggtgaaggcccagtcttttctttatagatggcgcctcttgttgtgtcctcacatgggagaatgacagaaagggcaaaccactctgtcatacctcttctgtaaggtcactaatccaattcatgaggacctcttccttgtaacttaatcacctccttaaggccacacttcttaatactagcacattggtgaatgagtttcaacatcagaccaaggtagaggctgtggctacagctactggctccatcagctctgggtcactagctccctgtctcagtctggagagaaggttcctgacaagcctgagatagtcccccaagattctctgcccaagggagccctgtcattccaagaagggcccaacccctaccttgacctgtgaatggggctgaacagggataccacaggagtttccttctaaatggatcagattttacatggaagaaggatccagggtctcaaagattctccacagctcagtcctcttgtgatccccttgcctcatcatctggctttgtcacagccacagtaatcccactggtgcagtgacaccaggtgctctgagagcagagcagagctcctgagtgatgctgcagggctctggatatacaaagaaccgtgtctgtggcacttggagagaataaaatgttaccatggtcaattcactgaagcaggtttgcctaatttgtttctaatgcctgggaaaatgcttacaatccctaacgaaatctcattcttcaaagggttgtctttgatatttggcagtggtacttggagatactcgtaaacttatatattatagtctttggggtggtggccccattcacctgagtgataaatctaacagggaatgcaaattctcaattacatacatgttgttgctttctaccaagcctagccaggcttgaagatggaactttgtctcatcaacctcccctgaccagcaagcgtttcctcggagctgggtctgcctcagcgtctctctgccatcaccctatagcttgtaacacctgctcccctccaggcataaatttctccacaatcccaccctgtccaaacatgcagttcccgcaaaggtgtgttctttccttgtctgacaaaattcattagcttgaaggtgatgatttttgcttgtttgctgtttgtccattctggccttcgcatctctgaacttggatgtgtctgtacgttctagtagctcctggcctacagtgtccacagagcactgtttgccagaaggttcctaataagtaccttgaagtccaggatattggtttccctcttgagaaccgagcttatgattcttcaagttcaaatttactacaatagctataaccatatcataaattatactaacttggaacttaaatgtagagtcatcccttttcaactgcattctattcataactttctggatttttatgatcttaaaaacacaagttggacttgaaaatggatttttttttaatatgggctaaattgtccttaagttcctgattgtaaaaatcatgtggaaaaagtactttgatcatgcttttgttggactataaaccttctttgaaagcagatttcagcaatttcattatgtaattcattgttgttggttttgtttgaaagattattacttatagaaagaaagactgtaaaatcttagcactatcttgcaggatttttaaaatggaagaaaaaaaaaacaatagagtaaacagaagcacagctttcaccaagtgtgtttgtccaatctctttacagtactatgcaggatgacatttttattctccatgagcaagagtatgacagtttgcttgaatctgtcttcaaaactgaattcctaagcctcttagcaaagcgttacgaggagaagacccagaagcaactacctctgaaattcagcaatacgtaagtccggatctgggacccagacttctgcgtgtagctaaaaaggggtcttgatcgcacccctgcgattcaggatggggctggaggaggcctgcgaggagaagagtggggtctggctggccccagtggaaccttagagcctgcagaagacagtctggatagtagtcacagactttgaaaaggttacttttgcatttctgtgaaataatgacttcatagactagtgtattttatcatttagacaaaaatcacctgaatgaggcagacaaaggcagatttttatgtatcacccaaaaaagggtttttttaatttaggagagcagacaggagtagaatcacactggaagcagataaaagtgacagaggtgggggtttaaattccccaaaccaatgcataataaaacctgtttattggtagagcctccgggggcttgaggactataggtggccaacgtattgtgtaggtggttcacctttctttctttttttttttttttcttttttttttcttgagatggcgtctcgttctgttgcccaggctggcgtacagtggtgcgaccttggctcactgcaacctctgcctcccaggttcaagcaattctcctgcctcagcctcctgagtagctaggattacaagtgctcaccaccacacccagctaatgttttcttatttttagtagatacggggtttcaccatgttggccaggctggtcttgaactcctaacctcaagtgatccacccgcctcggcgtcccaaagtgctgggatcacaggcttgagccaccatgcccagcctcaccttcatttcttttggcaacatgatctaatggaccaggtactggctggcatactgttgaccctctaatctcatatttgctgagtaagagttatttagctagtctgggcaatatagtaagaccacatctctacaaaaagtaaaaaataaaaaaaaaattagccgagtatggtggtgcatgcctgtagtcccagctactcgggaggctgaggtgggaggatacttgagcccaggaggcagaggttgcagtgagctgagaccgcaccactgcacgccagcctgggcaacagagcaagaccctgtctaaaacacagaaagaaagttatttagcttttctttttaaatttccccatctataaaatgggaatatcctccatcttttcctagctacaaaaataaggccaagacaaagcctttatatcatgatgagggaaacttataataggcagctacttaaaattatgatttttccttcttatgatatcagaaaatataacttaaaaacagaataaggattgcataatacaggcatatatgcaatatagaagcattaaaactggatggggagtttgggaattgcaggtaaatcctgccttctatttggattttggttgctagtgtgtgtctttttccatccctgggtgggctgtgatggtgcaagaatagtacaggactaaacaaagccaggttctatgctagagtcctcaagctggcctgtgtctggcatctctcagtcctccacaagcacagaatcagggacaacagctggaagcacaatgacagcacagcggtatgacctggaaattgtctctttcctctgtcccctcagcaggcgcctctgagaccacctgacagagtggcactggcacattagccaggtgtacctccctcaccacctggtgtctcacggtaccgggccccagatgctcctttttctggctcattgtcatgcagcgacagtgccaccccatggatgcggtgcgcatcctcagggccctgctcctggtgtagattgtccgttctcgcctcatgtttatgcttttccagcagcagaactccgtggcgggatctctgagcaccgttttctcactgcgtccttcgacctgttaaccccactgtgctttttgcaggcttgaactgaagttgaaaaaggaaaactggggcccctggagtgcagggggctcccggcaagtgcagttccaccaagggtttggggacctggctgtcctcaagcccagtaacaaagtgctgcaggtcagcatcggacctggactgcccaagaactcccgtaagtgctccacgggccctgcaggcagaactgccgccgctcccccgagtctcccgagcaaatgctgcaaacatgtgcacagatgtgggggctgagaatcagtacaccttctgcttgctggggctcacgctttcttcagaatggaacatttcaaactaaagcaacagcaaggaaaatgagcaggttaaaagtttctgagggacttagtacttatgtatcagtacacctggcattacaatattgtggttaaaacaaatcaaagtttgttagcttcaaatttcccctccctttccagtcagatcttgtccacaataccaacatcatcctctatgccacctttaaagaaattgactgggcccggcgtggtggctcacacctataatcccagcaccttgggaggccaaggccggacgatcgcttgaacccaagagttccagaccagcctgagtaacatggcaaaaccctgtctccacacacaaaaataaaaatgtaaaaattagccaggcatggtggtgcatgcctgtagtcccagccactccggaggctgaggtgggaggatggcttgagcctgggaggtcaaggctgcagtaaatcatgatctttactggggtgccactgcaccccagcctaggtgacagagcaagaccctgcctcattaaaaaaaagaagatgaaaaagaaataaaacaccatacacacacacacacacacacacacacacacacacacacacacacgcactacctcaaaccccagtctaactccttccctggcctttatttttgtatttataattgatatttataaacttatatctatagcacacagcatagaataatcatacatgctatgtatgcatatactgtgatattgttctaagatttagcctgtgtgtgatcacacacatgaagatgccttatataaaataactgtttctaggccaggcacggtggctcatgcctataatccctgcactttgggaggccgaggcaggcggactacctgaggtcaggagtttgagaccagcctgaccaacacccagtctctactaaatacaaaaaactagccaggtgttgtggcgtatgcctgtagtcccagctacttgggaggctgaggcaggagaattgcttgaacccaggaggtggaggttgcagtgagctgagatcgcgccattgcacaccagcctgggcaacaagagcgaaactccatctcaaaaattaattaattaattagccatttctcaaatctgtctgcaaaggtacaccttaacatgttctctaacatattaatacaataccagcaaatgccatcatatctttatatatgtagagccactcagaaaatgttgatgtatgtctgtgtatccgttagtacttgcagaaaacagacagcaacttttggagggatttctgaagcgatttttcagtgaaaagatgtggacggggtttagggaacaaagtagggacccagggaaagggagtggcaggaaatcattattatccgcaaacctgaagcagcagagggaggaacgaggtgaactgaaggctacagtcaggaaggaggcacatgaagtcccccacctccctcctgacactccagtctccttccagtgcctcctgttggcctggcctataggcctcaccccactggaaggcagaggcctggctgtccacaggactcagaccccagggcacagagccgggcaaagaaaggctgcaaataaccagcaggctatgtttgtgcggcgggcccccgaggggaaattgcccaataggtgttggattctatcttatttggggtggcgagagtggcctaggtactgggagggaagcgtccagcaggccacactgggtttgccccgatcccacgtggtcggttctcccaggccctagagctgcagctcctttgctgtgtttgcactgtgcaccttgtcacctcctacccttctctattcttcagctcttctctttataagaaattccctctgcacccctcttccagctggtttaatcctaccttccttcctgttccattcaagaccctattgtttttcttccccacatagatgtctctgcagagatctcctctggctcctctggccctgctgtccagccctgactgtgacccacagtgtgttcctttggccccagcttgttcctcattccttcatgtctgtgtcaagggtacaagtctgcttctcctccttgtggtctgtgtttagttcaaggaccgtagaacacacactcttgcgtgcaaggcgcttgacgtaggcaggtgtgcagtcagtgccagaacgggcttcatgccaaccccgttgatccgcagcattagtgaacctgctcagccacttagcatttagaacatgaatgcaaatgtttaaatgttccatctgtctcttttaaaagtctgtaaaaatagaaacacctttgtaagatgaccaatccttctttaagaaccactgtctctaacatttcaaaactgtacctctataaccctgtcctccagcccctcccacccaatagctaccattacatacttccctcaacggctccttctccactgcaactgttctcctgcagatccacctgagagctggaatccaagcttctcaaaaattttccatatgcaaagaaccatgaggatccataaaaccaaccagtagcactggttttaactttgtcttgtttatttcaggtcctaccagaaggaacactacccaaaatacaggttattccagtgggactcaaaatgccaactacccagtgagagctgcccctcctcccccaggtaagccagctacgtaccgtagtctgggaccactaaatctggacccataacttataaaatatgtttgggaagaaacccattagcaaatcaatgcacacatattaaccaggcatggaccatttcagtgccacatgtacaacacagcagccctacttgagacctcaaaattcagaaaaataggagtcagtgagactgaactgcggctgagtttgcaatctggatttcattacctcgaaatattactcccttaggaaaggcttctgacagagagaaaggagttccttgtccgtaacaaccagactgttgtcagcttttaagacacaggatgctgctttatggaaataggagtttacaggtctaaccccaccaccactacccagctccggccaaataccactacagcagcacccccttatcctcgggggatgcattccaagacgcccagtgggggcttgaaaatgcagatattaccaaaacctatctatacttttccagtttgagttttccacaaaaccagcagaaatttttttctgtcttcacagtgttacagatagaagatatattgttactgaatttacttaaaggaagcgctttcacttaaaggaagcgcttaatggcttctctttggcatacccaaattgccagcttcctggggccattatgaataacaagatggctgcttagtgactgatgatggggtagcacacacagcatggataggctgggcaaagggacgattcgtgtcctggcgggacagggtgagatggcacacaacctaagccttaggaattgttcattcctggaactttaatttaatatttccaggccacagttgaccatgggtaactgaaacagtggaaagcaaaatcatggataaggaggggagggggctactattttgtaagttatagcagcttaatgactgaatagaagaaatctgttttctatttattttctgagattaggattcaggaggcctgttcaaaaaaacaaagtaatatctgagagtattacaaaattgttataaaatttatgctcatatttcatatttatctcttctttttttgggatggggtctcagttgcccaactggagtgcagtggtgccatcatagctcactgcagcctcagcctccctggatcaagtgatcctcccacctcagccccttgagtagctgggactacaggcacgcaccaccacacctggctctttttttttttactctttgtagacacggagtctcactgtgttgcccaggctggtcttgaactcctaggttcaagcagtcatcccaccttggcctcccaaagtgttgggattgaaagtgtgagccactgcacctggcctctcatttttaatagtaaaaatataactgacatatccagacactctaaacctgaatctaagattttctgtctctaaaaatctgtgtagtgtttgcagaatgcttgcaaaaatacataaaatcttttaatgtttttccatcactcacaaaattcagttcataaaaaattactcccagagtgtttggtattaagcagtttagaattctaagtctgatagggtcattttgagactgtatttgattccagtcttcccagccaagagaattctatttgtaccaatgtccaagataaggagtaaaaagcatttcttgaggctggtcatggtggcttacgcctgtaatcccaacactttgggagaccaaggcaggagacttgcttgagaccggaagttagagcccagcctgggcaacacagcaaaaccccatctctacaaaaatgttcttaaaaattagctgcagccaggcgcagtggctcatgcctataatcccagcactttgggagaccaagacgagcagatcacttgaggccaggagtttgagaccagcctagccaacatgacaaaaccctgtctctactaaaaatacaaaaattagccaggcatggtggtgcacacctgtaatcccagctactggggaggatgaggcacgagaattgcttgaacccgggaggtggagattgcagtgagctgagatcacaccactgcactctagcctgggtgacagagcaacactctggctcaaaaataaataaataataaaataaattaaaaaataaaaattagctggacatggtggcacatgcctggaatcccagctactcaggaggctgaagtgggaggctgaggtggctatgatcatgccactgcactccagcctgagtaacagagtgagaccctgtctcaagattagctgggcgtggtggcatgcaccagtgattccagctactcacaaggctgagacatgaagattatttgagccggggaggcagaggttgctgtgatctgagattgcactactgtactccagcctgggtaactgagtgagagtctgtctcccctccccatccacccccaccttccccccagaaaagggcatttctttagtctctggaatctcaccattgcatgctaaagtatggacactggggcccagcagtgagaaactaattctcatctcttttggagtccccatcctgccttgacccggctctgtctcctcctttcttctttgaagaaaatccaagcacaaaggaacttaagagaagcactgtagtatcatattactgcgtgtgcgctggttccagtggagaattctggccaagtccacctggaaagctcactggcctcagctaggttggccaaagtagcctcagatcaaatcaggccacaaagtttccgaccttgagcagggctccccaactctctaaatgacagttccttcatcaaaaaaatgagacaatgggaccagatccatttgaccagcacttctcaaactgtctgtggtgaaagaccaggagttttcagggggttttaaaaaatttccagtccgtcacaaaccatgtatttgtatgttacaataaaaatgaattagtagaagaatggaattttcaaaacatataaaatataagccaaaatgtcttattataagatgcaacaggcatgaaatagatctgtcaaactgccatgaacgtttctaaatgcttactcttcatttctgaccttatcgtggacaaggggatctcgagcagcatgtggagcagcccctgtggggaccccacttttatcactggccatgtgacatcccgagggcatgtcacactcctaagatgcccctctccttttgttgggaccctaggcagcaagcagggtccttctaccctccccatccccagaccctgtgggagcccattcagctctcactcactgagggaatgaggtaagatgaagagcagctgtttgccccaaatgtctagttctgatctggtctgacggcctgtgggaggaaattgctagagacatggctggatgaggagccaccctcttgaaagctccaccctgataaaaccgtggttcaaagtaagaattccacctattattactgggcatgaaatatttctgcaataataaggatatagagaaaatgcttgtcggagctggaagccaccaagcagattctggacctatctcgtggttctttcatgaagaactgagactatgaaagatcaactctcttgctcatgatcagtatagctctcagaggcagagccagaactgaacccctaatcctttcctaagggtcatcccactggtaccaaagagttctcttaatttggttggaagaggtctttaggtagggttcaccaaagtgggccttgaagagtcttgttctctttctccactcagcccagatctgtcagtgggagaatgaataagggcctcttcatacgtagcatggaatgctaatgcccgagtctgccaagacgcatggtttggagcctgccactgtaacccattacttattggctaatgcgattttaactagacatcgctgtttggctgagagagcttgctccatccggactgatccaactgggtggccacttttcccttgcctgtgtagagcaccccctctgcctcacacagcaggctcctgccgtggatgcccaagattgacccctcgaaaatggatgtccagctgtttaagcagctgcctgtcagccctcttgagtcataatctcataatttttcttaggcccaagaaggtgtctcccagccggctgtaagcttaccttactgtgggctttgaaccccaggaaatctggggattctattgccaccaagcatgtgctgagtgtccgctgtgttccgggcacatcccgggaagttgaccatgcattgttgtacatgttaaatacatacaattttatttgtcagttatacctcagtaaagcccggtgatggggaaaacagggaatcagctctaattctcacaatgtgttagcagtgatgccttccatttttttcaaatgcggaaattgagactcagaagttaagtaagctgcccttgtagtacatggaagaaatgtggagagacttttggcaaaggatccaaaaatctgagccttatttccttctctgttcctctctctaggataccatcagaacggagtcatcagaaaccagtatgtgccatatccccatgctcctggaagccagaggtccaatcagaaaagcctgtacacctccatggcccgcccgcccttgcctcggcagcagtctaccagttcagaccgagtgtcacagacgccagagagcctggatttcctcaaggtcccggaccagggagctgcagggtaagattctcacatcctctggatgaagccggcaagctccatctccatcattcaaaacaagggttcagagattcctgtgggctgtcaatacacaggattctaaggtttagttttccacctcagtgctatatgccaggacccaaggctgtggggctgtggctggttatttgtaaaggtacagtcacattaatagcacacaattcatttcattctccagagagggcttatcttggaaacatcagaagacgggttccccttggccccagatatggttactctgtgacctctttgtgctttcttgcatggttgaggaataatggatcttttgatttgtgtctgtgcctgcagttgcataaatacaacagctttaagagtcttcagcaacattaagcataacatcccagcattctatatgatatttgttgaagaatatgggtctttgtggctttatagtgagagcctctctgcctttctagaatataaataaagagtggtgaagagaacccagcctttttagccggaggaagtgaagattcctgaaactctgtgtagatattaaaagagctatcagttttaaaagggggttaagacatgtcctgtggagtcgtagggatggaactagcgccaactgaaagccagttggtgaactctgccaggaggtagattttggctccagtaaaaggaagaacgtagcaacccaaatatgagttgccctcgtatgtaaacagcattttgttcctgggagcatccaggcaccaggtggatggggatcaccaggcaggagtgttcagagtagtgttgtcaaatggtagataaggggaaagagaggcctctctaacactggacctgctgtttgctctctctgagcttcagtttccttgtctaagcactaatgtaatgccatcaaacttgcagcaaacttgttgggaggactagaaattatatacataaaatctctagcatggtacttggcatgcaggcgtctgctcacttaactctagcttgagggtggtaatgacggtgacagggtgatgatcataaggacccccgtcacttcatggaggttgaactagagacttgtaaggaatcttccagctctgcacgactctccatggtggagtggctctgtctgctaaagctagtaatggcctgctcccacccactctctcttctcttcccctctctcaagcccacttccattttccactgtctcctgtctccagcaccatggagaagtttcaaatgaggatcaggaggtatgaatgcaaaatagacctgtgcaggaagagaaacaacagctccttcctctgagggggcagccatccatctacctttttgtttgttggttggttgctttgttttttgagacagggtctcgctctgttgcccaggctgcaatgcagtggtgcagtctcggctcactgcagcctcctcccaggttcaagtgattctcctgcctcagcctcctgagtagctgggattacaggcacgcaccaccacacccagctaattttttttttttttagacggagtctcactcggttgccaggctggagtgcagtgccacaatctcggctcactgcaatctctgcctcccgggttcaagcgattcccctgcctcagcctcccgagtagccaggactacaggcgcctgccaccatgcccggctaatttgtgtgtgtgtgtgtgtgtgtgtgtgtatttttgtagagacaagagtttcactgtgttggccaggatggtcttgatctcctgacctcgtgatccacccgccttggcctcccaaagtgctggaattaagatgtgagccaccgcacccagcctaatttttttacttttagtagagacagggtttcgccatgttggccaggctggtctcaaactcctgacctcaagtaatccacccgccttggcctcccaaagtgctgggattacaggcgtgagccactgtgcctggcctcattcatctttatgccctattatttgatgtttttcctgccttggcagcttccttctaaagaccacagagctcttaagagctttaccatgttctctcctagcagcattccttttgccctggcaagtcttatctcacttcatttgggctacaaatatgaaagcaccttagttggtttttttggggggggttttttgtttgtttgagatggagtcttgttctgttgccaggctggagtgcagtggtgcaatctcagctcactgcaacctccatgtcctgggttcaagtgactgtcctgcgtcaacctcctgagtagctgggactacaggtgcgtgccaccacacccagctaatttttttggtttttttttgtagagatggggtttcaccatgttggccaggatggtctcgatctcttgacctcgtcatctgcctgccttgtcctcccatagtagctgggattacaggcgtgagccaccgcgcccagctgaaagcaccttagttttatcacacagacagccatcagtagagtggatgccgcccttatgtagacctctctctaagtgcacgtgcgcgcgcgcgtgtgtgtgtgtgtgtgtgtgtgtgtgtgtgtgtgtccctctcctcttcccttccactaccccccagtcttgggtaagtagctatatcccaccagctctcatgaccgtggttcacgtgattggcttggtctaaaccagtagttctcaaactctagtgtgcagtagaatccgctggaaagcttgctggcccactttccgcgtttctgattctgtaggtctggggtagggcctaagaatttgcatttgtaccacgttcccaggtgatgctctgatccagggaccacattttgaaaaccactggtctgaaggcacctgtagtctgattgataaagccagggaagcctccatgtgaaggtgaattgcaagggtgctgttaggtttatgggatttttgctctctaacccagacctacacctttcaggtgggtgagcatcactaagtcacaatcccacctaggcccagtttgatgcctcaaagtaggcagggtattaaaagcagtcaacagaatgcaccaaatctcttagctctgtgtgctagctgcctacttactttggttttggcaagcaaaaccatctttccagcctactttgcaagttgcaaacttgcacatcagccagctgggagcatctgtcagccaaaagtaggcaatttaggaacactgtgtcttaaccaaggctgctcccttccagccctctgccatgtggttccctatttaagtcttatggcaccctttgccaccctccagcctaaagactgggtacacgtggtgctgtcttggaggcaggccatgaggccggaaggagaggacaccttcacacctgtctgctaggcattaagatttccttgtatgtaaaacacaattagtaggcacactgtgtcttagccagcctcctctttgtaaccttaaatctgctgtgcaaacattccttacaaaatagtaccttgggcaaaaggctcagccttttcttagtatttattttctaaaacatgtaaaggtgaaaattaaaagtatctaatgtggccagagactttggatgtggcattttatggatccccatggttacctaaatttaacagcttctcctatttgccaagaaaacatgaattgcatttattccacaggaggctgttgaagcatgcagggaattttaggatcccaagtttgtactttttccataaacatgaaaattcctatacatcaaagttctaaacagtcaccttgactttaccaatctataaaagtaggattactatggtctttctttcctggctttcacattctgagtttatctttccttcctctctctcatccctcagtgcactttttctgtaatttattttggatcatgtaatatggataaaatcaaatgatgtaattagcacctcaagttaattcaggcaagtctttatcagtttattttaggttcaatcagttgttctgaagagagcatgaagatttcactaaattaattaccatcccaactggattctttaccctttcattgcagtattggtgcacatggtagctatcattatcattctccaggaaacactgagagatctgcgtgggaatcaggatcttgccatcgattagcatagcttttgagaagtcttaattcaggtcaaagatctttcctgtttctcaaggaaagggaagaggttaggcaagaatcctattaacagttcatccaggccgggcgcggtggctcacgcctgtaatcccagcactttgggaggccgaggtgggtggatcacgaggtcaggagatcaagaccatcctgattaacacggtgaaaccccgtctccactaaaaacacaaacaattagctgggtatggtggtgggtgcctgtagtcccagctaatcaggaggctgaggcgggagaatggcgtgaacccaggaggcagagcttgcagtgagctgagattgggccactgcactccagcctgggcgacagagcaagactctgtctcaaaaaaaaaaaaaaaaaaaaaacaaaaaaaaaaaaacagttcatccacccacctttgctctgatctcactatccagtgtgctttgtaattttccctcctataactgaaatgtacctaatctacctgcagttcattcttggaagcattaaaacccagactggaaatgtctgttgacctttttaatcctgtggtccattttgtgggaggataacttcaggaaatttcaagatactccagagattaatccaactagaagttggaaaaacagaaaagtcttggaagtgctcagtggtagggcttctgggcatgccacaaaggaggggtcaatagaaatatttaaatgctgcctgtgtgtctcttgtcaagatcctcccaatggagtcatatttttatggggcttaaaatttccatcaagtgtccaatagcaatatttctcaacccataatctatgggagcagcagccatatcctggcccaggcagacatggtgctgaggaattcctggcatccatttccacatttccagtaatgtttatagattcaaccttttggaacacagcatatttttaagagccagtgaaataaaatgccattattttccttcttggaatttcaagacataaatttcccatctgcagaacaaagaggtgatattcgaaagcttaatcctagctcccccgacatagactaggcacacccacccaggaggtgtgggagctacagagaaattcacaaaaggtggcatttagagtgcagagagcacaggatttgcatctgtaagagtagggtgagtcctggttcattcattctttcctttttcttttattcatcaatatttactgagccatgtgccttctatgtgctaccccaggcttgtcacttaatctttctactcttggtgtcttcacctgtataatagggatactaatataataattttgaaaacccactcctcagggttttcttgaaggttaaataagggctttgtgtgctataaagcacaatgctatttgaaagttattttgtatttgattcattaccattattcattggctggtcttgcaaggaaattttaatgctctaccagggttgaaaggtgatgtttcctggcccagtggctttattctcaagaactcaaatctctggcctgcctagagctgtggactccatgaaggtctacgcttcaggcattgttggctgtaatgcggggaatgggcagcctagggaagccaagacaaggagaccagacagggagacgcccgcccccaacacacacacacccttggcagctgtgcctgttctccgtgggcacagagcatcagtggcacacagagttctgcagtaatggtaataatcactagacatgagagcctcatttggacaatttgaagatgaaaagtcacaaactccttctggctctgcaccgttccacagtctcttcctttcttttttttgtattgtttttttttttttttttttgagacagagtctcactctgtcacccaggctggagtgcaatggcgcgatcctggctcactgcagctcaacctctgcctcccacgttcaagcgattctcatgcctcaacctcgcaagcagctgagattacacgcatgagccaccacacctggctaatttttagtagggacggggtttcgccatgttggccaggctggtctcgaactcctggcctcaagtgatccgcccacctcagcctcccaaactgctgggattacaggcatgagtcactgcacctggcctccacggtctctttctaactaaacatctgagctgcagtcatcataacaatgaacagcccatggaaaggatggacattgctagggcagagggaattagccctcagtttagagagttttcatgtcatttggggttttgttttcttgtgggcttttggcaccttgtgagattcggcagccatccatgaggactcaaatgtcagctgacatccaaatgtctcggggcaagtatatcacttggtcttctctggtcactaatataggacttctcttgcagagcaagttttcacaaagcaaactggatgtagtgtacttaattcatcaggaaatgttatttgtttctgggttataatgtgattgccctactcagaaaaaagaacctggtgcaaaaagaagttgctgtgggtcagctttttcgtgcatttatgttaattggtaatagacacataaagtgatgtgtacaaattaccctaaaataagaaaactaaattggattgtacagaaattacatataatgaaacactggatttgctcagtgatgtatagttttataaccatatattaacatatgtatattacatatataaataatatatacaatataagtaatatatattatatatataatgagcctttattattgaaatgtcaaaagaaaaaataagttattgtgagtctgaaatcttgctgcaactccccatcatctagccaagcacagtggctcatgccgttaatcccagcagttctggaggccgaggcaggaggatcacttgagatcaggagttcgagaccaggctgaccaacatgtgaaaccctgtctctactaaaaatacaaaaattagtcgggcgtggtggcaggtgcctataatcccagctacttgggagactcaggcatgagaatcacttgaatctgggaggcggaggctgcagcgagccaagatcattccactgcactccggccaagtgacagagcaaggatctgtctcaaacaaaacaaaacaaaacaaaaaacaaccattatctcaatgaaataattatttttataacacgattttcaattctgtgatgtttattagaaatacaaatactgtatcacagagtaccagacctaccaaaattatctaagttgtacaattataaaacaaatggtggcacatggctgtagtcccagcactcagatagctaaagcaggaggatggcccaagtccaggggttcaagactgcagtgaggtatgatcatatcattgtaccccagcctgggcatcatagcaagaccttgtctctaaaaataataacaataaggaaataatgaaacaaaagttggcaaggcatttttagacatgagtgagcctgtgctgtcgtgagggcagcttgaggatggtaggatggtaggatggtagtgtgctggtaaacagtgggcactccagggaggaaaaggcctgaactgtaacatttaccagtttccatggtaaaattctctcttcatggccaatttcaagctaccagtgtgactactactgagtgcggagttgggaaaacatgggcagtctcaccattgtatagtatttctaccatacatcagcaatagactttaataacttcaaatgcatagatagaggaaaataagtaggctgggcacagtggctcacgactgtaatcccagcactttgggaggccaaggcgggtggatcacttgaggccaggagttcgagaccagcctgggcaacagggtgaaaccccatctctactaaaaatacaaaagaaaaattagccgggcttgttggcacatgcttgtaatcccagctactcgggaggctgaggcaggagaaacgcttgaacccgggaggcggaggttgcagtgagaagtaggaagagataaatgatgagcatttattgcttttgttttaatgtaatttctttgttgtcaatgatttggtttttaataatggccatgtttgacaactggctcacaaaattcctgaaagttctatcagctctcgcaagctggactaagcctgttctggcacagtgggcatgcgggtctcatgtgccctgtaagggggtgtgtaatcccttcctcctggactagccaattgcctcggctgggagtagggggctccacctgcctagaagacctcattaatcaaatttctggcagtttctttgaaagtcattcctggccggatgcggtggctcacgcctgtaatcccagcactttgggaagctgaggcaggtggatcagttgaggtcaggagttcaagaccagcctgaccaacatggagaaaccccatctctactaaaaatacaagattagccgggcatggtggtgcatgcctgtagtcccaactacttaggaggctgaggcaggagaatcgcttgaacccaggaggtggaggttgcggtgagccgagatcgtaccattgcactccagcctgggcaacaagagtgaaactccgtctcaaaacaaaacaaaaagtcattctttcttctcattaatgacacaggattgccacctagtgacgcagaggagattgcctgggttttcgaggctgttggagtctgggaaaatggctgttcccaccaactgtgttccaaggtggcttccaggtctccagtctggtgaatcgtagagattgtgacggcttcgttgacacagatttcctgtgttcctcagtgctgttgagagctctctgtaaaactttcctagaatcagaaaaaagacctggaacccggtgcggtggcttacacctgtaatcccagcactttgggaggccaaggtgggaggatcgcttaagcccaggagttcaagaccagcctgggcaacatggcaaaacttcatctctaaaaataaagaggccgggcgcattggctcacaactgtaatcccagcactttgggaggctgaggcgggcggatcacttgaggtcaggagttcaacaccagcctagccaacatagtgaaaccccgtgtctactaaaaatacaaaaattagctgggtgtggtggtgggcgcctgtaatcccagctacttgggaggctgaggcacgagaattgcttgaacctgggaggtggaggttgcagtgagccgagatcatgccactgcactccagcctgcgtcatagagtgagactcagtctcaaaaaaataaaaataaattaataaataaataaaaggaaaaagaaaaaggacctaggccattgcctgaatctgctcaggttttacagatgcagagcttggccccaaacccagcacacagactcaagcccacgtccccctcctgctacacactgtcaacatagagcttgaggccccatctcagggggagttagccaaatagccacacaagtcactgtcatgctacaattgacccatgttctggagaagccgtgggctaggagagggtatggccgggggtttgccagagtatgaggaagcagtgatggaaatgagatccgaaggccgagcaggagttagcagtgctgcctgggaagtgggcagaggccaggggagcatagccagaccaaggatccagaaagattccatgtggctgcagtgccaggagccttaggcgtgtgccaccatgttggccagggatgaaaccagcaggaaatcccaggagcctgcatcagtcatctcacaggagtgtcgtgagggtgaaatgaagcagcatctgtgaaaatgcctaggacaaggcctggctgagttgaggggagtttatccagacttcacacagctaccggcagtttcccagaagacatcctgtctgctagccctcacaagaagggtgtagacatgtgcaggctggccagggagaatggctctcactgtggctcgctttgggaatatgccgccccagcaaagcagctgtgcctctttgtggtcacaagacagagccaatggtggcagcatcagtgttgcccttcctaatgcaaagtgcaaactgcagaggtcctccctcctccacccacctgcccactcctcccggctgccatcagacagtccccactatccacacccatctcaaagctgccctggcctcccccacctctcacctgtggagttactaggaaccccattcagcctagtgataaagggccaaatggcttacactgccagcatggtagcagttgtccacaacctggacaattatggaccccaaattccccgggtaatttcggaggttttactttggccaggagtcacttatcctgaggaagtagcctctgatgccttgatatcaaagaccacgcagtggccacatacacacagctttttgcgtcctgcatccccttaggtcttatttataatttggtatcttatcaccagaaagaatccgttccatgagacttacgatctctagtttaaaacaatctagacgccttttttttttttttttttttttgcacctaattaccctggctagagtttccaggataatattggacagaagtggtgagtgctgacatccctgttttgttcctgatcttatggggaaatcattgtgagtttcaccagtaaatatgatgtaagcttgaagtatgtggacaagggtcctctccccaaccagggctcatgaagaaaggtaggaaggcaccaatgtggcctgcagcagggagtaaggctggggtgtgagcaggggccgcccctggcagagtctgtaggcgccatgaagggttttggtcctttttccaagagcagagagaagctgttagaaagattttcaggttgaggatggggcgaactaataacagctgagctagcatgagggccaagtgtcctagaaaggaaacaactggcaaggaagacacgaaggacagaaacaggtcttagtcaaagctggaggcaggtggggcagaacaagtgggtgatgcccagggcagggagggtcttacctctcaggagccatccgtcttgtcttcccactaagaggtcttaccccgaccctggcgaggggagtccttcagcaggaggaccctgtatctaagcccccatacttgggctccagagaccttgtcagtctacactaaggacactagggtttttccctgaacaagacaggacaaattagcatctgtgggttcaactggcccgctgtgcccatgggttccacatctgtggattcaaccaaacttggaatgaaaatattcagaaaaaatatggatagatgcctctgtagtgaacatgtacagacttaaaaaaaaaatttttttttttttgggatggagtctcactccgtttcccaggctggagtgcagtggcacgctctcggctcactgcaagctccgcctccctggttcacgccattctcctgcctcagcctcccgaatagctgggactacaagcgcccgccaccacgcccggctaattttttgtatttttagtagagacggggtttcaccgtgttagccaggatggtctctatctcctgacctcatgatccacccacctcggcctccccaagtgctgggattacagattacaggcgtgagccactgcacccagcctttttttttttttttttttttgagacaaagtcttactctgtggcccaggctggagtgcagtggctcaatctcgactcactgtaacctccatctcccgggttcaagcgattctcctgcctcagcctcccaagtagctgggactataggcatgcaccgtcacgcccagctaccgtctgtattttcagtagagacgggtttcgccatgttggccaggctggtctcgaactcctgacttcaggtgatccacccgccttggcctcccaaggtgctgggattataggcgtgagccaccatgcctagccagtcctatattttttaaaaagcctttttcttgtcattattccctaaacaatatagtataacaactatttacatagcatttacattatattaagtattataagtaatctagaggtgatttaacgtatacaggaggatgtgcataggttatatgcaattgttacactttcatatgagggacgtgtctgtggagtttagtatctgtgaggagtcctggaaccagtcccccagggagatagggatgagtttttggtgtgtgtgcgtgcacatgtgtgcatctgtgtccttccatgtgcacttgtagcccagttctgtggactgccaggctggaggcttcctccctcccagggtgttgtaatgcccgccgccatcccctttcattccttgttgctgagaagtcacatgacgtctggtatccaggctaatggctcttattaaccaaatgctgacacatcccaatatatagggtgcttaattaaaaacctgctcgcctggccaactttcagagaagcaagcacttcttgaacagggaatggggatttccagtaggcactaggtagaaaacgaatgatgtcacactaagaacctacaaaatgcctttcctctgcactaagagaaaagtgcaggggggtggtggtggtgggaggagtggagcctgagtagccttgaggattgctccctcccacgtggggtggtgtaaaagccgagtctcaggggcgcccagcccctcctggggacagtccaccaccctgctggcagtcagtgttccccccagccacccctttgtgatccaggttgttcatcagcaccccatgaacatctgtcatcacaggacctgggcaaggccagcaggctgtggctcctgagagcacagctcaaaactgggtgtggttgttctttccagaactcaggccccaggaaggccctcccttttcctccttgctcctgtaggtgtgaatgatgtgcacagacctaacagccagccccaccctgttgaggtccagcccaacttcttgagggagaaatcttaagtttgttttgtagggaaatgaatgtagcctttactttggtttgtccttaagcgaagtggaaaaaaagaaatgttctccatgtttccgttttcctttttgtttttgctaaatgctttttatgaacatatttaataaatgtttcaggtataagtgtaaagatctcactaaataggaacaagttgaacttacacacctttgaaagaatgtatgaatggtgacttaaggcagcatagtatataggaagaataactttaaagctagaagatctggattagggttagagcactggagttatttttaataattatgacagtggggtgaagggagtgtcactggtatccagtgggtagaggccagggatcctacagggcataggacagcctcccgcacccacccccatacacacacacacacacacacaacagagaattcccagccgcaaatgtcagtagtgcagatgttgagaaactgctctggataaactcttgtataagaatatttacagcaacatttttggaggggcaaaggggagctctgaggggtaataatgaaagaatgggaaggagacctgaggagtaatactgattgataaaatgagagggaagtctgtggattaataatgagggggtgggagggaagattgtggagtaatgatgagggtatgagggaagtctgcagagtaataatgagcaggtcggagggaagtgtgaggagtaataatgagggacgggagggaagtctgaggagtaataatgaggaggtaggagggaagtctgcagagtaataatgaggggtaggagggacatctgtggagtaataatgagagggcagaaaagcctgtagagtaataaggaaggggtaggagggccgtctgcagagtaataatgagggatgggagggaagtttgacaagaaataatgagaaggtgagacggaagtctgaggagtaataatgagggggtaggagggatgtctgcagagtaataagggggtgggaaagaagtctgcagagtaatgagcgggtgaaaggaaagtgaggagtaataatgaaggggtgggagggaagtgtgaggagtaataatgagggatgggagggaagtgtgatgagtaacaatgagcggtgggaggtaagtgtgaggagtaataatgaggggttgggagggaagtctgaggaggaatgaggggggtgggagggaagcctgaggagtaataatgagggggtgggagggaagtgtgaggagtaataatgagggatgggagggaagtctaaggagtaataatgaactggtgggagggaagtctctggagtaatgagggtgggtggatagatgggatgggagtagacaggagtgaggtctgaggcataataaggttgtgaatggggagcaaatctcatggcagcattttttataatagtgaaaactggaaccatcccaagtgaccatccacagtgccctggagaagtaaactgtgacacactcactcgcgcagtggtgtagtatcaggcagcaagggtgaaggaacgatagctgcaggcatcagcagggcacgtcatccagttgttgagcatgtgaccgtggaatatgattcctttcatacagttgacagtcggaccacaaatattggctaggggtatttacatgtgtggcaaactgtagagatgagccagagaatggttaatacaaactgtaaggtggtggtaatctggggggaatgcagtgaaggagaaatgcctacaggcttctgtggcacctgcaaaagttccatttcgaaacttgaggaaggagggacagatacctgaatgttcctgatttaaatgtatgggtatacttttgacacttttttatggatatgtgtctcccacatttccttctatgctggggacacagtgacaacagcagctaaggtttttaagagctatgtgcatttgcaacaaccttgtcagaaaagttacttttattcctcaagtttaaagactgcaccctgggccacatgtcttctaaggatggagctggatttgaacttgaacaggccagtgccggccgccatgctccaaaccaccgttcggtgctgctgccccctgttggggcccagtctcatctgctccactctctccacagggtcaggagacaaacaaccagtcggcctcccccagcagggggcagacccaagccccagcccaagcccaagcctcaggtgccacagtgcaaggctttgtatgcctatgacgctcaggacacagacgaactcagctttaatgccaatgacattattgatattatcaaagaaggtaagtgtgtggctggttggctgggacagcctcccaaagagcatgcagtcacattgctgtaagatctagtgtgaaaatgaaaagaatttatgggctcctcaaactgcaatttgtagaggcaggtcaggcctcaggctcagtctgatcaagacaccagcttttttaatgcttctttcagctctgcccccttatttatattccctcccttgtcaagctgtttttcttcatggtagcaaaacggcagcagcaattccaggccaacatatcaaaccatgtctgaaatgtgcatcatctctgaaacttctgttcttagtcattggacaaaagtcctgacttttattctgatcagaccaaattagccatgtgtccatccctgaaccaacttcagtagcaagacaaaggctgtaccctgagaggatgagacctggtaggggctgtccccagaaacggggaggtctgtcccacccacacttcctggcttcttcataatgaaagtggatggagtggaagccaggaagacaaccttgaatatccattattaaagcagtccatgggcttggctgagtgctttattaatttggtagatatcttacttttttcaacaaactttttgatttaaagaacaaagggaaaacaacatggatggagccaaatcacttgagcccatgggagcggagtgtgtgtggctggggcagaacagactttctcatcttcacttccaccacctctctctccctgcagatccttctggctggtggacgggtcgactacgaggcaagcagggcctgttccccaacaactatgtgaccaagatctgaggtgcccgtgactctgacacatggggcagaggagctccaggcacagaccaggggaggggatatttaggggctccccttacaatccacaatgagcaattgcttctccaaggcctggagctattctggtaccttccccatggaggacactgaaaaggctgggttggggacagggagtatcactccataagtgatcctaaaaggtagcctcttcataggaacccaggaggacaaaaccaccatgcattaagatttatttattgtatttaaacctggtgagaggacaagtgaggtctgctcagaccttgtaggcttctatcaaaacagcaccctgcttgctcaccaggcctagagaatggctgtaggtggccgctgacaagtgcctttagttgaagagcacatttctttcatctctcttgtccatacctgatagacacattcctctctgccaccttccttcagggaggacccgccctctgcagactgggcttagcgtgagcaggcacttcccatgtacgtgccaagggtaagctggcctgctgagcccagggcgacagaggggcactggtttacactttgccgggaccatcagggccgccaagcaggtcaggggctgggggctgggggctgggctgctggctttgctttctctgggtcttcaattagaatgtggctggcccatattggtttgtgtttaaatgctgtacttactacaagaaggatcttttttcaagctgtacatttataaaaacagatcatatactgtatatataaaaatcttgagatggtagaaacatgtatgaatgtactaagtagtattccactgtactcattcataaggtaggttttcttacaaaactcacaccaggtacttaaagatgtgctctgcttttttccaactacggagtgtcactgctttctaggtcagtccctgcagactcttctcaactctttccctataggaaacttactccgcgtcctgcccccacctcctaaataaataaaggaatcggcgaacaccttcttcttttatgacatttgttatgggttgaattgtgtgcctccaaagaagatgttggagtcccagccaccagtacctcacaatatgaccttatttggaaatagagtctttatggagcaaacaaacaaaactaattaaaatgaagtcattagagtgggtcttaatccaatataatggtgtcctgatgaaaaggggaaatttggacacagagaccaacatgccagaggaaagaccatgtgaaaaggcagggagaagacagccattcacaagccctggacagaggcctggaacagattctccctcacaccctcacaaggaaccagccctgcccaccttggtcttggacttccaacctccagaactgtgaggcaatacatttcgctgtttaagccactcggtttgtggtagtttgttacggcagccctaacaaactaaaacaatgttttcttgccataatagtgaaaagctggaatcagtgtaatgcccatcaataatggaatggttgtaagtagagactgccatttctctacctttcctcctctgggtgccatagccattcttaagctactggtaacttagagtttgagcagcatacacctttgaggctttcaggatcctcaagtccatgggaaaaaattatcagggcttacgtataagggaaaaaaattgatctagatttgaaacgaagatacatttaattctgctgtgttttacttcaagaacagggagcaaactccattctgtaacagtaacgaataatgttaaaaggctacttcagttccatgttgcgaccagagaggaaagtagagccatgatgcggtgagttgaggaaaggtaatcctgttgacactagtggtctctaaagtactttcacattcatggactccccgcagtgggaggaagataccaccagaactgggacagaggagcatgctggagtccccacagccaccagcactcaggctgcgttctcagggcaggaacaccaggaccatcttcccttgttatcataagcccctggctggctgggacaagcctttgtttttcctcctgattgattgattggcattttacacttgtgtgtaactgggaaccatcgggctctaggtcacaaaacagggactgagttaaacccccacgagtaacaccctcatccatggaaatcacagaccaagcccttagcacctgcatcgtgtgcccagccagtgccaggctcaaggagatgcccaacaaatggtgctgaaataggtaagtgacccacaggggaaggagacttagatctgcgtagagatgctgaaatgctgacactattaagaaaagtttggagaaatagtggtttatcttaaacttatttgtatatatttagaaattcaacatggggactaccagaaaaatctgggataaataacatttccctttttttcctaattaaaaagtcttcagaaaaatgtcttttttccctttaagacactaacctgggtttcctctagtctgtggatctagcctggcctgccattttgttcactgtgcagttaagcaaatatgaccactttaggagtcacttaccaggaaagaacatacagaagatcaaggggccacccccaccttctggaacttgccatcctgtttgaaataaggggtgttcatgtgcacacacagcaacgtgtatagcagtatcaaacacagtataaaaatgtgacatcccttcaaccaaaggttttaagtaaccaggaactaaatgagaaggcctgactgtgtaccctagggtagaggtgttcaagctttagttgtagaagagagagagacagaggtctgtataagggtggtatccactctactgatggccgtctgtgagacagagagaggctgatctgaaactcctgggatcaaacgatcctcctgcctcagcctctcaaagtgctgggattatgggcaagagccaccgtacctggccaactggcttaaagacatgcaaaagggccgtctcttccacagtgttttgtgaaacaatacagagacatgtggagaggacaaagggtgaagccttcttgaataagcttgctccccaaccatgaaggatgccaacccactgacctcccaacgtgtggtcccagcccatcgtaatcaaacctgactccccactactaccaagtccagcccaatgaaggtagaaaagcatcgtgcagtttcctccttaaaggacctgccctgtgtgcacaccatgtccaccaatattctgctggccagagcttagtcatgtggcctcaactcaagggggctggaggtctctgcacagagctgtctcagcagcttacccagagcaccagagtgacagcgggctcctgccaggtggaagtgttcacaaaaatgagtaagagaaaatatggatgtgcctttatgaattacaaactccatgggcttccatagagcatggcttttacataatctaaattccttctctttgcgactccctcctgaactcatccccagaccctccctgagtggagctggtcacaccaagtcagcctgtgcctctagttgctaccatttcttttataggtgttgtcccagttaagatttcactggcagtagggctggattctggtttccagggcaatcaagagcagagcatgaacggtgcgtctttggtagacaatttaactctgtgtttctggcacccctcacttttgtgatcaaaagaaagaccagaggagcctttctgcaattctgccctctttccctgttttgcttttctcccaaggcctagctgattgattgcagttctttctggatttagtaacttggttttattcctacccactaatcttgatgtctttttccctactagatcatacctttccactctgagcaccctttctaacaagaagactggctcagtatggttcactaggtcgcccaaggtcacacagttcttccctgggggagccatcacaggaactctgagtcaaaggcctgtgcgtttttattttcagacagcacctcactttgtcacccagactagagaacagtggtgcgatcatgccttactgcagtctcaaactccagggctcaggtgatcctcccacctcagcctcccaagtagctgggaccacaagcatgtgccaccacattcggctaattatttgtacagatggggtctccctgtgttgcccagctggtctcaaagctctgggctcaagcagtcttcccgccttggcctcccaaaattctgggattacaagcatgagccactgtgcccaaaaggcctgtgcttttaatcattttctccaattcaacagatatttagtaatgtgatggtctactgtgtcagcctttcaacttccaatatcttcctctcagaacataaaagtctatttaaaaagagagagagaagaaaactcacgcataaaactcaacagctagaaacttgtaagctcctttaatgggcaggagctccatctaacaaatctgaatcctctgattcatctctttccaagaccattaaccttctctttaaaataattaacagctatgttcaagtatcttcttcacactagaagctatactaagtgcttggcatactttacttagcaccaccctatgagggagacactcttatccccacttcacaggtacagaaactaaagtatagagatcaccactacttaaaatcaaacccaaagcacccacgttcagagttagtgctcttctatactatggatacatcatctcatttttaatttccgtgtttttatgatatggtttctacttctgccactcatttcccatttatgacattttagtttggggtgcctgctgtgccatctaagaaagtatcttaaaggtctttttttatgacatcctggaagaatttcctaagtcaggacatttaatatttaactaagtaaaatatgtaataaggaagctataaaatgtctttggaatatgcttacaaaactcaggcgttcttggagagaagttgagctcaagcatctctgggaagtaactgcttgtcagagccaggaaagctccctttcatggtctcacttcgttaccattcacacttgtgatcagagttgtccaaggctgccatgggaacaagcttcactaacccaataagggatattcataaaactctatactaggatttcagcatataaagatacccaaaacttacagttaaagacatactagtcaggcagtcctgcctgcccaggaagagagtaaaaagccagccctaactggagccagtttctcctccccaggggcagttgtcctcaagctgcacctgaatcaaaagagcagacgctgaatttctctgtcagcaagaggcaaccacactctaggttggggaaaataactgagataaatgagtttactgcaaagcacagaacctttatgaatcttccaatcatttgcaatgtttcacaagtgtatttgactaactaactcctttctcttacaacaccaattaacatcttgttaaaccaacgtcttgggaagttgtttttatacgagactcactatgtttatggtttttgtttttaagtcaatggttggaggctgaggatgcactccccccgtagaaaacaatgttcgagcgtcccagatcgacctcagactgctgagctagcagtgagaatttcaagccaatgggtgttagcttgctgggctccgtgggggttggacctgacgagccaggcgccacagggaatctgctggtctgccgccggttgtgaagactgggaaaagtgcagtgtctgggccggagtgtacctttcctccaggtacagtctctcacggcttcccttggctaggaaagggaaatcctccgaccccttgcgcttcccgggaaaggcaacactccaccctacttctgctcgccctccatgggctgcacccactgtccaaccagtcccaatgagatgaaccaggtacctcagttggaaacgcagaaattacctgcttggttgggggaggggtgcctgccattgctgaggcttgagtaggtggttttaccctcacagtgtaaacaaagctgcccggaagttcaaactgggcagagcccactgcagctcagccaggctgctgcagccatactgcctctgtagatttcctctttcctgggcagggcatctctgaagatacggcagcagccccagtcagggacatatacataaaacccccatctccctgggacagagcacctgggggaaggggcggctgtgggcacagcttcagcagacttaaaagtccctacctgagagctctgaagagtgcagcagatttcccagcacagcattcgagctctgataagggacaggctgcctcctcaagtgggtccctgacccccgtgtatcctgtctgggtgacacctcccagtaggggccgacagacacctcatagaggagagctctggctggcatctgacgggtgcccctctgggaggaagcttccagaggaaggaacaggcagcaatctttgctgttctgcagcctccgctggtgatacccaggcaaacagggtctagagtggacctccagcaaactccagcagacctgcagaaaaggggcctgttgcaaggaaaattaacaaacagaaaggaatagtagcaacatcaacaaaaaggacgtctactcagagaccccatccgaaggtcaccaacatcaaataccaaaggtagataaatccacgaagatggggagaaaccagcacaaaaaggctggaaactccaaaaaccaaaaaatgcctcttctcctccaaaggatcacaactcctcaccagcacgggaacaaacctggacagagaacaagtttgacaaactgacagaagcaggtttaagaaggtgggtgataaactcctccgagctaaaggaacctgtgctaacccaatgcaaggaagctaaaaaccttgaaaaaagattagacgaatcgccaactagaataaccagttcagagaagaacataaatgatctaatggagctgaaaaacacagcacaagaacttcatgaagaacacacaagtatcaatagccaaatcaagcagaataaaggatatcagagattgaagatcaactcaatgaaataaagcgagaagacaagattagagaaaaaagagtaaaaagaaactaacaaagcctctaaaaaatatgggactatgtgaaaaaaccaaatatacatttgagtggtgtacctgaaagtgacaaggagaatagaaccaagttggaaaacactcttcaggttatttatccaggagaacttctccaacctagcaaggcaggacaacattcaaattcaggaaatacagagaacaccacaaagatattcctcgagaagagcaacctcaagacacataatcatcagattcaccaaggttgaaatgaaggaaaaaatgttaagggcagccagagaaaaaggttgggttacccacaaagggaagcacatcagactaacagcagatctctcagcagaaaccctacaagccaaaagaaagtgggggccaatattcaacattcaaagaattttcaacccagaatttcatatccagccaaactaaccttcataagcgaaggataaataaaatcctttacaggcaagcaaatgctgaaagattttgtcaccaccaggcctgccttacaagagctactgaaggaagcactaaacatggaaacgaacaactggtaccagtcactgcaaaaacataccaaattataaagaccatggacactatgaagaaactgcatctactaacgggcaaaatagctagcatcataatgacaaaatcaaattcacacataacaatattaaccttaaatgtaaacgggctaaatgccccaattaaaagacacagactggcaaattggataaagactcaagacccatcattgcgctgtatgcaggagacccatctcacacacaaaaacacacatagcctcaaaataaagggatggaggaatatttaccaagcaaatggaaaccaaaaaaaaaaaaaaaaaagcaggggttgcaatcctagtctctgataaaacagacttcaaatgaacaaagatcaaaagagacaaggcattacataatagtaaggggatcaatgcaacaagaagagctaactatcctaaatatatacacacccaatacaggagtacccagattcataaggcaagttcttagagacctacaaggagacttagactcactcccacacaataatagtgggagactttagcaccccactgtcaacactagacagatcaatgagacagaaaattaacaaggacatccaggactagaactcggctctggatcaggcagacctaaccatcatctacagaactctccaccacaaatcaacagagtatacattcttctcagcaccacatcacacttattctaaaattcaccacataattggaagtaaaacactcctcagcaagtgcaaaagaatggaaatcataacagtctctcagaccacagtgcaatcaaattagaactcaggattaagaaactcactcaaaaccgcacaactaaatggaaactgaacaacctgctcctgaatatctactgggtaaataacgaaatgaaggcagaaataaagatgttctttgaaaccaatgagaacaaagacacaaggcaccagaatctctgggacacatttaaagcagtgtgtagagggaaatttatagcactaaatgcccacaagtgaaagcaggaatgatccaaaatcgacactctaacatcacaattaaaagaaccagagaagcaacagcaagcatattcaaaagctagcagaaggcaagaaataactaagatcggagcagaactgaaggagacagagacacaaaaaaacccttcaaaaaaaatcagtgaatccaggagctggttttttgaaaagatcaacaaaatttcaaagaccgctagccagactaataaagaagaaaagagagaagaatcaaatagacacaataaaaaatgataaaggggatatcaccaccaatcccacagtaatgtaaactaccatcagagaatactatgaacacctctacgcaaataaactagaaaatctagaagaaatggataaattcctggacacacacacgctcccaagactaaaccaggaagaagtcgaatccctgaatagaccaataacaagttctgaaattgaggcagtaattaatagcctaccaaccataaaagtccaggacccgactgattagcagccaaattctaccagaggtaaaaagaggagctggtaccattccttctgaaactattccaaacaatagaaaaagagggaatcctccctcactcattttatgaggccagcatcatcctaatgccaaaacctggcagagacacaacaaaaaaagaaaattttaggccaaaatccctgatgaacatcgacacaaaaatcgtcaatacaatactggcaaactgaatccagcagcacatcaaaaagcttatccactgtgatcaagtcggcttcatccctgggatacgaggctggttcaacatacgcaaatcaataaacgtaatccatcacataagcagaaccagtgacaaaaaccacgattatctcaattgatgcagaaaaggcctttgacaaaattcaacactgcttcatgctaaaaactctcaataaactaggtattgatggaacgtatctcaaaataataagagctatttatgacaaacccacagccaatatcatactgaatgagcagaaactggaagcattccctttgaaaactggcacaagacaaggatgccttctctcaccattcttattcaacacagtattggaacttctggccaggccaatcagacatgagaaggaaataaagggtattcaattaggaaaagaggaagtcaaattgtctctgtttgcagatgacgtgattctatatttagaaaaccccagtatctcagcccaaaatctccctaagctgataagcaacttcagcaaagtctcaggatacaaactcaatgtgcaaaaatcactagcattcctatacaccaacaacagacacagccaaatcatgagtgaactcacattcacaatgcctacaaagagaacaaaatacctagcaatccaacttaaaagggatgtgaaggacctcttcaaagagaactacaaaccactgctcaaggaaataacagaggacaaaaacaaatggaaaaacattccatgctcatggataggaagaatcgatagcatgaaaatggccatactacccaaagtaatttatagattcaatgctatctgcatcaagctaccactgactttcttcacacaattggaaaaaactactttaaatttcatatggaaccaaaaaagaggccgcatagccaagacaatcctaagcaaaaagaacaaagctggaggcaacatgctacctgacttcaaactatactacaaggctacagtaaccaaaacggcatggtactggtaccaaaacagatatatagtccaatggaacagaacagaggcctcagaaatatcagcacacatctacaaccatctgaactttgacaaacctgacaacaacaagcaatggggaaaggaatccctatttaataaatggtgttgggaaaactggctagccatatttagaaagctgaaacgggatcccttatactggtataccttttacaaaaattaactcaagatggattaaagacttaaatgtaagacctaaaaccattaaaaccctagaagaaaacctaggcaataccattcaggacatagacatgggcaaagacttcatagctaaatcaccaaaagcaatggcaacaaagccacaattgacaaatgggattgaattaaactaaagggtttctgcacagcaaaagaaactaccatcagagtgaacaggcagcctacagaatgggagaaaatttttgccatctatccatctgacacagggctactatccagaggccacaaagaacttaaacaa

SEQ ID NO: 777 - DNA, 4668 bp, Homo sapiens
cgagactcagccagaggagtacggattaagtggccgaagaaagaggagtgaggcaggggagcgaggcggacgctccgagcgcatcggactcacctgggccggcggcgagcggcgagtacgagtggactcttgccctccgcagcatgcgccccgcctgctaagtcgccgccgtctcgccctcacctagcaccgccaatcccgcctggatggagtcccctctgggttcccattggctcctgtgagtgcttgggtgtcgggagcctgtttttggcgaggggaaccaacttttgaagttcgcccagaagactgcgttccagccccagttccccggcagcgggacccggcgaagacgcgaccgcggcgcgagtcaccatgggaagcaaaggtgtctaccagtaccactggcaaagccacaatgtcaagcacagtggtgtggacgacatggtgctactgtccaagatcacagagaactccatcgtggagaatctgaagaagagatacatggatgactacatttttacatatataggatctgtattaatctcagtcaaccctttcaagcagatgccatattttggggaaaaggaaattgaaatgtaccaaggagcggcacagtatgaaaacccaccacatatctatgcccttgcagataatatgtacagaaacatgatcattgacagagagaaccagtgcgtcattatcagtggtgaaagtggtgctggaaaaacagtggctgccaaatatatcatgagctacatctccagagtgtctggaggagggaccaaagtccagcacgtgaaggacattatcctgcagtccaacccgctgctggaggccttcgggaacgccaagaccgtccggaacaacaactccagccgatttggaaaatactttgaaatccagttcagtccaggtggggaaccagatggtggaaagatctccaacttccttctggaaaaatctagggtggtgatgaggaacccaggagagcggagttttcacatattttaccagctcatcgagggcgcctctgcagagcagaaacacagccttggcatcaccagcatggactattattactacctgagcctctcgggctcatacaaggttgatgacattgacgacaggcgggagtttcaggaaactctgcacgccatgaatgtgattgggatctttgcagaagagcaaacgctggtgttgcagatagtggcgggtattctccacctgggaaacatcagcttcaaagaagttggcaactacgcggctgtggagagtgaagagtttttagcttttcctgcatatctgctagggataaaccaggaccggttgaaagaaaagctaacaagccggcagatggatagcaagtggggaggcaaatccgaatccatccacgtgaccctcaacgtagagcaggcctgttacacccgggatgcgctcgccaaggccctgcacgcccgggtctttgatttcttggtagattccatcaataaagccatggagaaagaccatgaagaatacaacattggcgtcctagacatctatggctttgaaatattccagaaaaatggctttgaacagttttgtatcaattttgttaatgaaaaactgcagcagatttttattgaactgacattaaaggcagaacaggaagaatatgttcaagagggaataagatggacacccattgagtactttaataataaaatcgtatgtgacctcatagagaacaaagtgaaccctcctggcatcatgagcatcctggatgacgtgtgcgccacgatgcatgcggtgggtgagggggcagatcagacgctgctccagaaacttcagatgcagattgggagtcatgagcacttcaacagttggaaccaaggcttcatcattcatcattatgctgggaaggtatcctatgacatggatggcttttgtgaaaggaaccgggatgtgctttttatggatctcatcgagcttatgcagagcagcgagctgcctttcataaagtctttatttccggaaaatctgcaggctgacaagaaagggcgcccaactactgccggaagcaaaataaagaaacaagccaatgaccttgtgagcaccctgatgaaatgtacgccccactacattcgctgcatcaagccaaacgaaaccaagaagcccagagactgggaggaaagcagggtaaagcatcaagtcgaatatttgggtctgaaagagaacattcgagtgagaagagctggctatgcctatcggcgcatcttccaaaaattcctacagaggtatgccattctgaccaaagccacctggccttcttggcagggagaggagaagcaaggcgtcctgcacctgctgcagtcggtcaacatggacagcgaccagttccagctggggaggagtaaagtgttcatcaaagcccccgagtctctatttcttttagaagagatgagagagagaaagtatgatgggtatgctcgagtgatacagaaatcatggaggaaattcgtggcccggaagaaatacgttcaaatgagagaagaagcctcagacctcttattgaacaagaaggagagaaggagaaacagtattaacaggaactttataggggattatattgggatggaagagcacccagaactccagcagttcgtgggcaagagggagaagattgatttcgcagacacagtcaccaagtatgacaggaggttcaagggtgtaaagcgagacctgctccttaccccaaagtgcttgtacttaatcggacgagaaaaagtcaaacagggcccagacaagggcctggtgaaagaagtcctgaagcggaaaatcgagatagaacggatcttgtctgtgtccctcagtactatgcaggatgacatttttattctccatgagcaagagtatgacagtttgcttgaatctgtcttcaaaactgaattcctaagcctcttagcaaagcgttacgaggagaagacccagaagcaactacctctgaaattcagcaatacgcttgaactgaagttgaaaaaggaaaactggggcccctggagtgcagggggctcccggcaagtgcagttccaccaagggtttggggacctggctgtcctcaagcccagtaacaaagtgctgcaggtcagcatcggacctggactgcccaagaactcccgtcctaccagaaggaacactacccaaaatacaggttattccagtgggactcaaaatgccaactacccagtgagagctgcccctcctcccccaggataccatcagaacggagtcatcagaaaccagtatgtgccatatccccatgctcctggaagccagaggtccaatcagaaaagcctgtacacctccatggcccgcccgcccttgcctcggcagcagtctaccagttcagaccgagtgtcacagacgccagagagcctggatttcctcaaggtcccggaccagggagctgcaggggtcaggagacaaacaaccagtcggcctcccccagcagggggcagacccaagccccagcccaagcccaagcctcaggtgccacagtgcaaggctttgtatgcctatgacgctcaggacacagacgaactcagctttaatgccaatgacattattgatattatcaaagaagatccttctggctggtggacgggtcgactacgaggcaagcagggcctgttccccaacaactatgtgaccaagatctgaggtgcccgtgactctgacacatggggcagaggagctccaggcacagaccaggggaggggatatttaggggctccccttacaatccacaatgagcaattgcttctccaaggcctggagctattctggtaccttccccatggaggacactgaaaaggctgggttggggacagggagtatcactccataagtgatcctaaaaggtagcctcttcataggaacccaggaggacaaaaccaccatgcattaagatttatttattgtatttaaacctggtgagaggacaagtgaggtctgctcagaccttgtaggcttctatcaaaacagcaccctgcttgctcaccaggcctagagaatggctgtaggtggccgctgacaagtgcctttagttgaagagcacatttctttcatctctcttgtccatacctgatagacacattcctctctgccaccttccttcagggaggacccgccctctgcagactgggcttagcgtgagcaggcacttcccatgtacgtgccaagggtaagctggcctgctgagcccagggcgacagaggggcactggtttacactttgccgggaccatcagggccgccaagcaggtcaggggctgggggctgggggctgggctgctggctttgctttctctgggtcttcaattagaatgtggctggcccatattggtttgtgtttaaatgctgtacttactacaagaaggatcttttttcaagctgtacatttataaaaacagatcatatactgtatatataaaaatcttgagatggtagaaacatgtatgaatgtactaagtagtattccactgtactcattcataaggtaggttttcttacaaaactcacaccaggtacttaaagatgtgctctgcttttttccaactacggagtgtcactgctttctaggtcagtccctgcagactcttctcaactctttccctataggaaacttact

SEQ ID NO: 778 - protein, 1104 aa, Homo sapiens
MGSKGVYQYHWQSHNVKHSGVDDMVLLSKITENSIVENLKKRYMDDYIFTYIGSVLISVNPFKQMPYFGEKEIEMYQGAAQYENPPHIYADNMYRNMIIDRENQCVIISGESGAGKTVAAKYIMSYISRVSGGGTKVQHVKDIILQSNPLLEAFGNAKTVRNNNSSRFGKYFEIQFSPGGEPDGGKISNFLLEKSRVVMRNPGERSFHIFYQLIEGASAEQKHSLGITSMDYYYYLSLSGSYKVDDIDDRREFQETLHAMNVIGIFAEEQTLVLQIVAGILHLGNISFKEVGNYAAVESEEFLAFPAYLLGINQDRLKEKLTSRQMDSKWGGKSESIHVTLNVEQACYTRDAKALHARVFDFLVDSINKAMEKDHEEYNIGVLDIYGFEIFQKNGFEQFCINFVNEKLQQIFIELTLKAEQEEYVQEGIRWTPIEYFNNKIVCDLIENKVNPPGIMSILDDVCATMHAVGEGADQTLLQKLQMQIGSHEHFNSWNQGFIIHHYAGKVSYDMDGFCERNRDVLFMDLIELMQSSELPFIKSLFPENLQADKKGRPTTAGSKIKKQANDLVSTLMKCTPHYIRCIKPNETKKPRDWEESRVKHQVEYLGLKENIRVRRAGYAYRRIFQKFLQRYAILTKATWPSWQGEEKQGVLHLLQSVNMDSDQFQLGRSKVFIKAPESLFLLEEMRERKYDGYARVIQKSWRKFVARKKYVQMREEASDLLLNKKERRRNSINRNFIGDYIGMEEHPELQQFVGKREKIDFADTVTKYDRRFKGVKRDLLLTPKCLYLIGREKVKQGPDKGLVKEVLKRKIEIERILSVSLSTMQDDIFILHEQEYDSLLESVFKTEFLSLLAKRYEEKTQKQLPLKFSNTLELKLKKENWGPWSAGGSRQVQFHQGFGDLAVLKPSNKVLQVSIGPGLPKNSRPTRRNTTQNTGYSSGTQNANYPVRAAPPPPGYHQNGVIRNQYVPYPHAPGSQRSNQKSLYTSMARPPLPRQQSTSSDRVSQTPESLDFLKVPDQGAAGVRRQTTSRPPPAGGRPKPQPKPKPQVPQCKALYAYDAQDTDELSFNANDIIDIIKEDPSGWWTGRLRGKQGLFPNNYVTKI

SEQ ID NO: 779 - DNA, 37992 bp, Mus musculus
agcaccttgaggctcactgaagtgaaagtgctgataacagatgactgaataccttcagcacacagctctggttgcatttggtagttctgtaattggtgatgtaactcggcctgtccctgaatttgaaaggcacctatttcatatagcatagataaaaaggatactttgcacactgcacactgagcactgtgcctgacaaggccaccttacagttgctgtcactgttttatcttaagacctatcagtgctggaaaggactccttttaaattctcaaatagcaatttcagatatatgcacatttcaaaagttggcattacttacaaattagcttctttactaacggaacagttcttccattagcaaaatgcatgaaagtttaagaacttatgattgtgcagtgaaaggtaatcaaaacctgtgtgtcctccagctccccccatgccccactctaagcatttaatgcagtgaaggtcttcgtatttatggaatatatgagaaaaacaaatgaaattgagtttgagtggaagagaattaggttagctataaaaagaactttctgactactggctgccaaacagataagaggagctactctttcagtggtaggagacagcacctgctggaatgttccttttgggcccaagactgttgggctcataggagtacatctaaaggcagctcagtcctgaattttacccccagctcatgggcagtggcatctttgccgagattctatctgcccttcagtgatgactactctccctgctcagacagtgagcattcagtgtcctttcccttatttgatgaacagatgaggcagcagagcacaggcagattctattttaaaactcagaaatagttgcagggatcctgacatgagagtcctttaaaaatggcccttgaatgtgctaagaaagcctgcagcccccagatgataacagtgagaagggggatgcttgggtgatggtcagcatagcacaatccaaactggggtgtggccattactttaataaaaactgcctgaagagacagcacagtgggtgaagcgtcatgcaactatgagggcctgaggtcagatcctaagcacccatataaagctagacatggtaggttgaacacctgtaatcctagctctcctacagtgaggtgggatctagagacaggagaattctcagaaggttgcaaccagctagcctggcatattcagtagtgtatctacaagtagtagtatctacaaggagatcctgcctcagacaaagtggaagggaaggactgactttcacatctacccacacccacacagacaaatacatacatgtgtatacacacataagttacatatgctggctcaaataagtgaataataaactttaaatatctgggtacacatatcttagtttgcaactatttttacttaaatttctaattctttgaattgttgaagtagttttgatgtgagcctgtgtgggtttgtaggaaagtcccattcttttaacataagttcctctgtgagctcagacattgtgagccttttcccattttcagaactttggagttacttaactgttagcattatgatgtgatatcagctactaaaatagaatgtgattgttacagcgtccagatgtgctccagtctcttagatgagtgagcttttccatagataagtagaacaaagactaaaatcaggtgggtaggcatggtggtgcacacctttaatcccaacactctggatacaaagacaggcagattttttcctgtgagttagaggtaagcctggtctgcatggagagttccagggtccctagatcatagtaagaccctatcttgaagaagaagaagaagaaggaggatgaggaggagaagagaggaggttagtagtaggaggagaaggggcaggggaaggaaacgtaaataaaaccaagattcttctgtaggtagtatcttcaccttggctttcaagaagcctgtggttatttttttttctttgaccatctggacaaagtaggtagaacccagatcataaggcaagatgggaaacagtggctgggttattggggtctatgttagagtagactgagacgacagagtctatgggctagtcctcagtcagtgctggcactgagctgctctgcagggtggtgcagtgtcctgggattgccattgccctgtgaacttaccagccgcagtgggaacttcgctataggctactacatagcctgttgcaccacctcttgtctgtggaccacttagcttgttctccccatgtctgtgcttcacttccatacagtgaggggaatgggggaatgaccccgtcacttaacaacagataagaaaatcgtcacgtcacttaagtatcagctttctgtaagcaaaattgcctttggaaggtcttaccctgtgttcagctgtattttccatagtgttacctgtagttgactttagaaaattgtgcatggctttaaatgccaatgttgctttaatggagagtttcctgagttcttatgttgtatggaaggtttccttgatgacagccaggacacagtttttaaaatttcatcctacatttttttttcttattgtgtgtgtatgtgatttttttttccctaaaaaatctaggttatattctgaagaccatgaatcactaaattgctgcaatgttcagggttcagtaataaagtggtcagaagtcagttgaagagctccttagcatttttttaagtcttaaaattttttgtgttctgatgtgttgggacaggtaccttctggatcatgtcagagtagctggaattgagtggtccgtatgctcaggacagtgccagtcagaagtcacatgtgtctgtttttagctgggagcagtttctttggtcacttgtgatgaccaaaaaagtctcttgggagagttaaaatgactcaaaattagtaaaaatcactcatggctatttaggttttaagttatactcttgactatactgtggtttaattttggtgctaatttcttgcttccataaagtattacttgtagttcagaattgttcaggtagttttatcacttttgagtttagttgaaaaggacttctccacaacatacacacatatacatgcacgaatgtgtgcacacacaaattcatgcccactctctgaatatgaatgactagtgtgtgtgtgtgtgtgtgtgtgtgtgtgtgtgtgtatgtgtgtgtgtgtgagagagagagagagagagagagagagagaaagagaaagagaaagagaaagagaaatgcatgtgtagtctattcctattagaagttcacttttaggaaagtaaacagcaagtatccccagacatgcaagctttaccacttgtccagactgcttccccagctggctcctccccttaccaggatgtcacaccacctctcaccactcagccctttccctgccagttcactcattggtggttctcacatcacaccaagccctcactgttggcacagtacctgcatctggtctgtctacgcttccttggaatatagaggacacaaagggagcaggctcctcctcaaatctagaacattcttttgtttctcttctcttcatgtttcccttaccataaatactgtttgaaggtagttgagctcgggcttgtgctgccctggtttgtgactttaagcctttgagtcatgggcaggaaaggcacttaaaaagacagtgataatttgagccccttaaataatgcagttttgcagctacctgtaaaatcctgcttccctgaaaggaagtctaagctatgctgaagaactcactggggttttcctcagtagtcatcctcctcatctttagttttgttccatgacacactcttgtcataattttttggttcataggacaaaatccaggtccactgtggtacagggcactggctctgtggcatggtacaggttgactccctgtctctgcctcactgccaacatctgaaggagcactctcctccactgcaaagagcatcctgtatcctgtggtatctctgtgctttgattggcgagtaacattgaacatttctatccttttttgtttattgtccttattaaggtccttgtttacagatttagtgttaaaaagtttcatacgacatctacatacatattatattttgagtttttaaatatatagtgttgaacttgagcctactggctttctggcttcctcatatatgcctatgaaaagaggcagtgactggcactcttcattagggacccagcatctggggctgcagtctgaggacctgcagcctcaggcatcggtaccacaagtcaggatggattaagagacttcacactgctgggcattacaagtagcatcaaagatactgagatgaaattgaaaagctttctgcctttgaagtttgctggtaatggggacacatttctatttatagatatgcatgcatgtgtgtgagtgtgtgtgtgtctgtatctgtgtgtgaatcccaccagctcagctaacaagtgctgtacttcactgttggtaatatttctctgatgaattggggatcacttgtttaaatgaataggaaattaaagaacactagcattatgtttctcaatcggggaattctaggcttacagatcgtatcctttcttttttctggctagaaaaagagctttaataaaagacaaaagccagtgttgagtcagttaaagatgtgggctaacagtgtaaaacaactgattatccagctcattctttgaactttgaacacttgttagtttttatataattaaaaatatataaagacagtctgtatctggttagaacaaaaagttcttcgttgttaaagctaacctctgagacctggggacccagctttactgtgcatgcatcttaggaggaagttttccttttgaaggcaaacattgcaccaggtgttttgtagctttgaacctatgaaatgattatatatggggcataggcacagactgaacttcattatatccgagtagattgtttgcatggcatgcaggatccctatctagtgctgcatgcattggttacagaggtgatgatggatagcatttgctttgacctggttttcaatcaagccatatgaactttcaggtgtgtctaacaagaatgtaacgaatatgctaatgacagttataaagtacctaagaatagattttcatcaacatctgtttttggttttggagtaaagtttattacatcatcttctgggggaggaaagagaccttgtctgcttattctatatatagatccagatttacaatgtgtatctcaggaccgtgtttgtctatattttcaatgcagtcatgctccagggcttgagaattgttttacattcccacacatgtttgtgtaacacaaaacatcttcaaagatttttaccagccatttttctttctcctctggcccacagacctgctcccagaaggaattttattcagctttggaagttagtgtgtcctctcctccagcacttggcagtgtctggggccccagggagacaggcattcatcaatctttggccatgcccctccatcctaaagtcactgaatgtttccattgttctctccacatcaacctggtttcctgacagcagtctgtcccttgcaggaatggagtgagttgtgacaaatgcaggtcctgttcctcctttgttcacctcttgctgtgtaagtcagcacactgctgttctttctgtataccagtctcctgtaagcttgggtaggatagagtagttcagaaatggattggagactagatttcacacgtcatcaaactgagcaggagtatattctgcacctcccggttgcagctcgcctgctccctccaaggctgtgtctcctccaccttcctctttcctttcccttctccatctttctttctgattcatgcaggcattacttacaagtcatgtaactctatgatctgtgtcactttgtgttttttaaagaggctttatgaaaagcttgtttcttccttagctttgtgaaaggtttgtgttgcctggagtagtacagttttctcttgcctggttttccctttgggtgttatcttctcagccacctatcttctggacattttcctgtttgtttgcttgttgccaaaagaagaggcacagaaagtgtcctgaatccttaggaattgcacttggttggagcttttaaagacccttgcccccagagtagtgtttattgagaaaagtagctgacacttgcttccttaagctttgacggtctgtgaacctggacatcatgtgtcttgaggaagctctctaggatactcatgcagatggtgtgcctgttgctattgagggtgagcacatgctgacataaggaagctggcaagttctgccctgagcaactttcttacctgtaatctagatttcttaaatttactggaaagctttgattctggtctattctttctccttcaaatcctgacagcagacatgatttgggagatgctggctatgtgatagctgtttctctttccctacttttgccatttccatatatgatctcaaaacagaatttgaactctgggattgtggggttttatttgatgtctgtggtctgagctgtcatcagagactatgctaaggtttacatatgctgataacaaaggccatatggatgtccatgttctgtgctgccacctgaagccatgttgatctccatgggtacactgctaccatagtgatgtccatggccagtgccccagaggccatgttgatttccatgggctttgctgccaccaagggccacgatagtttctgtggttcatggcccctgctatcaccaaggaccatgatagtttctgtggttcatgctgtgacagagggcagtgttgatagctatggtctgcactgccaccagaaaccatgatgagacctgtggtctgtgctgatgccagaggccatgtggatgtctgtggtccatgctatcaccagaaactgtaagccatgttctcactaactgtaaagagcgagaaagctgcttttgcagtggtatctatgactgtagattcacagttgagaaagagaaccatagaaggcttctgtgacagtgcctacccctccttcctaaaaagggaaaaaaaagttgccgactccttgctggcaggtccaggtaagaggtcctggtcctgccaggatctctccggggctcagtgggatggcaagtgtcaatggcccaaaagaaacacacccagggccgtgagtctgtcaaagcaggaactcaactttatggcatcagctcttgcttatagaagttcggaacatagggagggggatttttggtggggtaagatgctgtaagaggcggggaagggtgatggagtgactgatagggccaatggcaaagctctacatcagcaacagcggggcagaggcagagccaaatagttcttgctgagtcaccccaatacaaaagtgactgagacagtctcaaaactcaagtcaggcttgggcttgtcctcaaggcccaaaccagggccaaaatggggtccaacaaaaaataacagtccagacatgaaactgttgaagagaactcttaaaagttgtgataggaatactgaagtgtagcttttcataattgatggcttctgatgggtgtgagtggggaaggactcaattttctttaaggtgttggacactgaaagtttgaccatgttccagtgactatatggacaacacaaattagacttgtggttttttgttgggggatcataagggtgagggtggatctgggaggactgggaagtaagacgagtgctttatgtgaaattatctaataaccaataaaaatattatgttggaaaaaatagttttgtatagtgtttagttaaagtagtgaagtttttacaggtctgtggccatgacagttcttgaggcactcctccttcttctcctcctctttttcctcttcctcttcttcttcctcctcattattatcttttaaaggaatactgttagtcgatcatgcagcagattatttttaaataaaggtatgtactacagtgcttccagaggtaccttaacttggtatgagcaaccctgactttccatggatttcccatgcattaacctcacatggcctcagaaaggcttgggaaatcagcagagaacacattgtagtcgcctctggggagaaggtggctggggtcagatgtcatgatctcaagggtcagagaaccttcttcttttccaactttatctcttactgatgttctcacttataaaatggtctccatcgttcattactgtctgctctgtgtcaggttatgttatggtagtgaatgttcaaaggggagttggggagacagtgtctagagaagttctaatttagagcagtgtgaaatgtttggcagtgatacacaccagtgtgtgagatgtgcagattcataggccacccaccaagaatgagcaatgtcttgtcatagagaaggttaggggcaggctagagccacagaagatcagaagattcctgcacatcgatgtggtttaagggaagtcatgtgagggattgtcagcatgagggaagccgtgggtaatgctcaaaagcaagttggagttcagtcctgtctcccattgctgtatgagctgccccaagctctagttccctgttctaaggatgaggtgagagctgctgttgtaagtcctccatcagtgaataaaacagttatcctgagatgcccatctctggagtcgaccagctacactttataagctaatttgatgtggtatgtgcaggggaagtcatgaaaggatttaaacaagggctagggtcaagcctctcattatggagagttaaccagtcacagaatagctttgtactgggtttgaggctaatgtagtacactgtctccttaagttcatgagacaagggaaacaaaagttcaccacagttaaattacacatttccaatctgtgcttgttgaacaggagttctttgtttcttcgctgtcctggcctccagctatgctcaggtctgcaggcagagccccatgtcttcctgtgtttgaagtggtgggtggtggaaggtttgctggcagtgggaacgtgggatgttcacctagcaagctctttctgttgtccagaatggtctgttaggacccccttctaggtattaaaactcctttaatgtatatgctactctcgtctttttggcttatcaaagcctatagtaggcaggtgtttcagaaacagtaccatggtggcctgtagagctgtccttgtgaaatggctatttcaccaattccttgttttcctaaggtctctaataagtaattcctcaaagttggcatttgcttgcctctgagtggatatatactatccaggcatttaaacttcatttgaaaatgaaatgtgcctcagagtctggaaatttatgctacatctgtgctgtctcagtaacaattcagaatgtaaagagcattcatgactctatccctaaaacttagacctgcatgcacatatgcctgcatgaatgtctgacagggcatggcaagtttcacaggatttatgcagcagagactgcttaccatcaaaactacattctagcttaagagacatatttattgggaatgtaactattggcaaaatcttataaagtttgaaaagtgatcaataaatcaacaaaatggattaatacttccttgttttgagcactgccacatatggccttttgtgagcagtgtgcctgttaatatatagactaccaccaatacatctttctataattaattcctggtttttccaggacagagttaatttctttgactttgggaccagtgcatcttttgggagttcttagtgctggtgtaagccaccatacctggcatgcacctgtttcgtattagttttgaattatttataataagaaacctgggtggttaactagtagtagaattattcttaatagaagttaaacattttaaaagtttgataaaactagaagttttgtttttaaaaaactgctaaagaactcggttttaatgtcatttcagttccagttactatggcaatgacggcaggggcaacaactacctttcctatgagcaaccatacccgggaaagagtaactgtggccaagctcacactggagaatttttacagcaacctaattttacagcatgaagagagagaaaccaggtacagtaaaggctaaaactttagttttctgtgactagatgggagtcctgctcttcgtcttaagtttcccacaccgacaggacacctggctgcttgtttcatttcctgggtttccagagtcttgtgcatatgtgcacacatgtcacttgtatttcaaacagatctttccagctgtggcattatggcatgtctttgtgctgtcttttaccaagatgctttagaaattgctaatgcataacattggaggtgctgcgctgtgttagtgaaaaaaataggaagaaagaactgcatgccatttgcctcagtgaaacttgaagtgtggtgagggagtggtgtacacagaagctccacgaggaagtggcgaagcagtgagggaccaaagagcactgactagggcagtgggagaacttcccagatgacagtgacattgaaacagggctctaaaggaagaacacagttcacacatataagaaggaggagataaagagaaggacatagcaagtgctgaatatcttgagctgtagctgctctgccatgtggcaatgtcacaggccaagctggcctcagactttttgtgatcctcctgcctctgcctctgcttctcaagtgctgggataggtggataaatggcaagggtggtccatatcactctggtagttgaagtcttccatctttgacatgttggttttctggcataatgcaaagataattcagatgagttgtctagacacatagtagggaaaccaagactatagacatgaaatagtactcacttaagagtgagtggcaaaatgtgttccacagtcctcatttccatctgcagccccatcagaaatgcttagcctaactaactcaatgttaaggaaaaaagaccaaggagccgaacttggctcttgctagaaaagcaaatgttatgattgatggttatttctacatgtatatgacttttcagtttccaaagaattttaataagtacatacacttgccaccagggtccttactgagttgggaggttgagcttaagacttaagcaaagtcatcttgtgctgggagagaaagcagtgaagttggtcagcaaagaatgctaaattctagtgtctctgagaaggaatactgatcatagtaaagagtcgaatcttggtccagtttgaaagatttccttagcatagcatgcccagtagttgcctttgataacttatatcttaaatggaaatagaaatgtattttaaaagtctaattattttttctttggaaaggcagaagaagttagaagtggctatggaagaagaaggattggcagatgaggaggtaacgtaaccaacgatactaaacggaagtgtcccagtgagttcccttatcagtgttagctgatgtgtgggttggctatggttagcttctccatctgagtatggcttcttactgtattgctgtcataggcaccttaagaaatggccttggccctcaagaacatacagttgctgaacaccatccacagcattatgggagatgggaaagggtccagtgctggacaccatccatccatccacactactctggatgagcaagacagggtcaggtggtgggcactatccattgattccttcttctcacatttatttctgaatattttaaaactgtttactctctaattaaggttcccttgtacctcactgatgaatgactgtcttgaaatggtttcttccttatgctgcccagtttttctgcactctgaaaacaagtctggtgtatctcctgcatgtattgtttttggtgagatgtaccctgctccctgaagtctagggtgtttgaatgcttgcttcccagttggtggcgctgtttgggaaggctctggagatgtggtcttgagaaagtttgttactagagatgggctgtgagagtttaaagacttcagcatttcacgtttgctctttgcttcctgcttatggctcaaactgtcctctgcttgctgcttctcttgccacacctttcccatcatcgtggactgacctctggaactgaaagccctagtgcactctttcacaagttgccttggctatggtgcttatcacagtagaaaagtagctaaggactgcaatgcaggcttccttcccagtggctgtttctctctagccttagctcctggcaccccatccaaccatggccagtactgagttgctgtgatttttccctgcttattgatggcccctttcacatgctatttctgccatttgaaactttctcctctgaactccagtgattcttcaaggagcttaggtcttacttcactgggaaatcctaattgcttagctactcgtcctacattctatactaacagtgtttctgtccttgtgatagcctttaaataaagggcatcttcccagagactagaagctgtgtgtgctactcagtttcacatcctggagcagacgaagggcttttgcagggggcacacacatgcacgaaaacttgtatacgttacaggggctgctagtatagttcaggatagagttcttgcatagccctggtttgagttccagcagccaccacccagtaagtcaaaaatgtgtaaacattacagaatatagcaaactttgaaaatacatagactctttcccaatacaggggctcagaaaagacttatgggagttgtagcaattgatttgaatcgttcttgatgggaagaagttacttcataaacagcactgtagtcagcaatagtggccatgcatgcttaagtggcaagggaagctgaaggcatggaaagctagcgtcaggtcagttactaaaaagagctttattttccagatgagaatgagttataacctaggcttactgactgttcagtggtcagaaaggagcttgaagacactgaccaagtgagttaatctgccctgcagctagctgccttagctgtgtgccatccgtctagctgggctcttaggaaggcaaacacacacttaaagttactgtttatatataaatttaatgcatatcttaaagccccatcttgttaaattttattgtgaggcagtaatttaagggcttcatcctagctcatagagaaaggtgagcagatctttccttatttgtctcactaatattaaaactttttttctagctagtaataatggtgctgatgcagaagtcttttttgttttgtgttgtttgtgttgtcctggaactcactgttagaaatgttaaacacaggatcttgaagtctagggaaaggtaccaaaacagatgtccatgccgagcacagtggagactccattgaaagatagcatgcactgtataaaggaccaggtctcaggggaaaaaaggaaaggaaagaaaaaggaggatgaagaaacaggttttttaatgtttgttcctcactttatgttaatgaagacctgcctatttgttagctatcaagagctcaggattacccatgtcaggtgacaggttagcccagtgtggctaggttcctgttgtgcaagaagatctggaagcctggacttttatataaattggcttacttttaaaattattgccaagtgatgagaaggtttcttgggagtcaggaactgtctgggaaggcctggctttgtagtgccccctggtgggcattagtgatttttttttcttttttttctttttttttttttttttttttttttctcgagacagggtttctctgtgtagccctggctgtcctggaactcactctgtagaccaggctggccttgaactcagaaatccgcctgcctctgcctcccaagtgctggaattaatggcgtgcgccaccaccacccggcttttttcttaattcttgtaaatagcttgtagaaaatgttaactcattttgcttctaaaaatcaacggctcataatgtctgtttttaaacattccttttttttttctgtagaggtactttaaagtgcctgtgtttattgttaggccctgtgctagggccttgaagatgtggagaagagaacaaattctctcaaccttgatgttgaaactatcagtataagggattggaatttcttaaaaacaaaacaaaaaaactttaagatttcttaaacaatgtgaatgtggagtgcatgtggcacccataggacagcctggggtgtcagtccttaacagtactgtctgctgtctactgtgtactgtgaaatagttcatgagtgagctgtgaaaccattaaattgtgaccatttacaacaaaacagtggccaagacgaagttgttagtgttaatatctcagaactttgaaataccctttctgttttaaaaacaccttggcatcttgcagattgagactcttacccatttgaaaaggaatggagtctgtaatcttggcactagggagtgagagataaaagattttcagtttcagaatgagactgattcaaaacatgggggagaatatatattaattaacaagaatcatcaaaaatggatgtttattaatggaaaactgaaatgagtgatttaagctgcagaagagagccatgaagcagcaggagggaaggggggaacacagagaccttggcttttagtacacactgagcagatgcagcaagggctcttcatgggctttaaaacgccgatgttgcttcatttacccccagactgcaatactgactgaagggctaaagtcactgagtagattttcctggggccagtgctctatagggaatggtttaatgcacactgtggtttcccttttgttgttgaggggctatgctctggtagacaggagcacctatcagatactcagtgactaatttttgttgttgttttggtttttggtagactcttgtctagactgtaagcacattttatgaaactggacagccaggtctcttctgtttagatgagacaggtttctgtagctaaacagaactgtgctcttctgtaaccatgaaaaaggaaaaattttaaaccatgtttcacattcttatgttcatctatcacatgtaattaaattaaaacaagctcttgtattaccatgagagacacagtgctagagtaccaccaagtagcttctaaagagaactccagttcaggaacttaaagccagctctttgtcagaactgccacccccaagcacagaacagctggtggtgggttcctgtaagagaagaatacacggaccacattgtgctgtgaggcccacctttgcctttataatgatatagatgtgatttcagctgtattaaactatttaaaggtaaagttttcccaactccaagataagtgcagtttacttttttttttttttttttaaagatttatttatttattatatgtaagtacattgtagctgtcttcagacactccagaagagggcgccagatctcgttacggatggttgtgagccaccatgtggttgctgggatttgaactctggaccttcggaagagcagtcgggtgctcttacccactgagccatctcaccagcccgcagtttactttttaaactagcatgtaactgctagataagggtagttttgataaagcattgtttgctgtattcttcatttcctttattgtgttgttgctacccagacacatgcatgcacatgcgtgcgtgcgtgcgtgcgtgcgtgccagccacataaatgaaattgtgggctagagagatagttcagcagttaagcacactggctgctcttggagagggctcaagttaattcataacacttatatggcagcttaaaaccattgtaacttgacattataacagacattgatgtagacaaaatacccagatgcataaaatatatttaaaataaaatgttttaatgtactttcagtgagctgtgtgaattcctgacataatttcttgcttgccgcttcctctgttacatgtgttagaattctgttttaatgatacccagacttctaattagacacctaactagacatctaaagttagacagatgagcaggacagggagtggctcagctgtgagctgtattgggagccgtgtgtctgaggtgacagcggtgctgtaatttgtcacctgagctagtctgtgagaggctgatggggccactgtacttgagttggagttgaataccttcagtgacttccttattccactgtgtgctgcctctctcgggaactatctctgtatcatgaacttgaattttatgagatgagaggtcagtgaggttaggacaagaaaattaatgatttgcaaatgcagccttaagatatttaaaagtgttgctaattaatagttcttattttgttatctttgttgactcattattgctgtgggggttctgacttggagggtttagggagttgatttgtttgtttgttttgttggttttggtttgtttttgacctggaaatcatagagatctatctgcctcccttcctgagtgctaggattgaagatgtgtgccaccaggcccaattattttgcaattttatgtctttagaaagttgtatgatattttaagctgtttgctgaagtttatccaagaatcagttttactctaaataaatctccaatggaagtgctgctatttccatgtgacttttgattcatgggtttcagtagctgtgagggcacctggaaagtaaagagttggagattttctgacaaattaacagtgaatgacagaagaatcagagccctggtgctgtaatctcagcactcaatggctgagacaggaggcaagcctgagctactcagtgagatttgtctcaaaaatcaatcaatcaatcaataagcccatgtcagagtaaatacacacatgtcagagtgctcctcatttgtgctttctaggacttatttctgtgagttcagtcacactcagaaggcagtgatttacatgtatagtaaactgctgaagacattgttcataaagtctacttctaagggtacatatttgacagttgtttaaagaacattttcttggaggctggtgagatggctcagagattaagagcactgactgctcttccgaaggtcctgagttcaaatcccagccaccacatggtggctcccaaccatctgtaatgagatctgactccctcttctggagtgtctgaagatagctacagtgtacttacatataatgaatgaatgaatgaatgaatgaatgaatgaatgaatctttttaaaaaaaaaaagaatttttttaagactttcaaattcttcccttgcttaataaatacttgctttaggaaaatagattattgacaaacatataagatatgcctctgtttatttgtttacagttatatgtgtgtgggtgtggatttgtgcatgagagtgcaatgcctgagggggccagagtgcactggaggcgaatgtgtgtgctggaagctgagcttttgtgctctgcaagaacaccacatatcttagcctccaagccatctccagccaccagcattacacatgcctttgaaacagcctgtttaaaaatcatcttttcaattcttgtttaatagaaaaagttacgtcgatcgcagcatgctcgtaaagaaacagagttcttacgccttaagaggaccagacttggcctggatgactttgagtctctgaaggttataggaagaggagctttcggagaggtaagctgctttgttcaggtcaccactgtgaaagtagatgttgtgagttgtttaaatgtagttactaggctctgaggtcataagtcagttggtaagaatgcttgcctagtatccacaaagccctgcatctgactcagcaccataggagccaggtgtaatggcttcctctgtattcccagcacttgggagatggaggcaagaggatcagaggttcaggctcatcctcaactacataacaataagctcaagaccagctgggaatacacgagacccccacctcccataagtgtgtgtgtgtgtgtgtgtgtgtgtgtgtgtgtgtgtgtgtgtgtgtgtgtgtaggtgtaggtgtaatttctttgatattgtaaattccagggttcagcaaaggaagctccttccgctgttccagcgtttatgtttgtgctctaggtgcggctggtccagaagaaagacacggggcacatctatgccatgaagatcctgaggaaagctgacatgcttgagaaagagcaggtgtgtctcaccacgtatgcagcaccaagggcctcgggtgacaagggctcagagtagtgttaatgttgagaatgataaaaagaagtccagtgtgctaggtaatttctaaatttgatagtctattttaatgttttcaattcttagatttaaatctcagtatcttcagttttataatctctgtgttagtttgctcagttgctattagagaacaacacagggtaaaggctataagcatagaagcctttgcctagttgtggttctattcaggatcagaaagttcccataggttttagcttctgatgattgctttcttctttggtgactgcaggaagggcaggcacaggaacactcctgatgcctcttctagaagaacactagtcctgttacatagcaaataagaatctgctgcctttacagagttacccttgaggcttaaagagataagctaaaacaaactgctccttggctttgcatatttaatgagaacatgaacatctgtatgtttcagtactttctaaaactacagatttcctgcatgactcttagacatggataattggaagaggtctattatcttttcaaaatatattcacctaggtggctcatatccgagcagaaagggacattttggtggaagcagatggagcctgggtggtgaagatgttctacagttttcaggacaaacggaatctctatctcatcatggaatttcttcctggaggtaaataggaacagacagacatgagttcatctgcatatgtagcaataatgtcagctagtctgactaccgaattttatacctaaccattgtttttcagtatttactttcagaataatggcaggtgatttggccccaaatcatgtgagtttgaaggactattaactgacatgttaaatactgtgtcattctgtgttcatggtagcccactgtaaagttaagtacagtaagcctgaatatagaacagaaagacaagatgctggtctctaggcgtgcttgttccctcttcgagtttctgaactgcagctctgctcctgatagctctgcatgctcctcactgtaccatggcatgcatttttcagggtgtttgcaggtactgggcaagtcataaaactgaaaatctgacatagtttgtacatacaaagaaagtgtagaagaacattccctttaagctgggtgtgtgctactgcatgcccattatagcagtaccagggttccatgcacagttattaaaatcataaaagatggatctgagactgaggcttcagggttcactgttgcgctccagtgaaggttaaagctgcaggcagcatcctgtgagcaacacatcctgtgagctttgttaaggaggacgttgggaaagtgagtcagtggggtgggttcaggaggatgagatggccaaggtcattcttagctgctttgtgagttctaagccagcctaggctacccaagaccctagctcaaaaacaaacaacaggagtagtctgttttcataagttggtactttgtctttctcaggtgacatgatgacattgctgatgaagaaggacaccttaacagaagaagagacacagttctacatctcagagactgtcttggcgatagatgcaattcaccagctgggcttcatccaccgggacgtcaaaccagacaaccttttactggatgccaaggcacgtgaggaggagagagtcctgggctttggctgtgccgtgaagtgcagcgtgtcctggctgcagatagcagctgtggcttaggttcttgtgggttaatgaagttttctcttagacagtacagaaagtgacctctggagtaagatcatggagaaatggctttaaaaactccctgttttccctttgtttaaaaaaaaaacctcaaacatacataatctcacatatcatctatatatggtgttctaagtttgagtttttgtaataactgcattaaaagtttataagaattttttgttgttttgagagttaacataatttgacttactagaatttgttgttgttttagggacatgtaaaattatctgattttggtttgtgcacggggttaaagaaagctcacaggactgaattctacagaaacctcacacataacccgccaagcgacttctgtaagtttgcatttttctttggttgaaactttgtacttttgaaactttggttatatgtggaagggaggttccctcctccccctcctgagattcggagttttagatgtagctgtggtcagtttccccctccagttacacttatgtcttgttgaaattagcatttcagaacatgaattcaaagcggaaagcagagacatggaagaagaacaggagacagctggtgagtcggttgctttctgaagagtgttgtaccctgacccagaggacacagcatgtctccgtttcagttcactgactggtgcaggcggagtggcgtggccctgcttgacttaaggacctagatccctgaaggtccatgggacagtgactccagattgcactttctcccactcagacatctgggggacttagcagagcggcatgttttgttaagtgagaaactgagggaaagtgagagaaacttggtaggagttgggaggaggtgctggtggtggtagaggaggaaaaggaggaggtggttctggtagtggtggtgtcgtccttagaaaaagctgttgaaattcctcatttaaggatcttttatggctttggcagaaactgaaaaaaggctgaagtagttgctgagaaggcccggttctctagctgtcatgggctgagccactgaggacgcacactacgtatttcccctcaacaccaggcagatgatcatgagctcttcacatgctgtccaccacttagttgtggttgaaaccttctcactgtgtctgactccagctttcttagttactgcccatggttgtctgtcagctgttaggcacttgcccacctgctctcctctaccttgcagagctgtcctcacaaccacaggaaagaaactgtagctacatgtgattaactgtcagtggaatggtctgggtctcttctgagataggaggggattttcttggaagcagtctctgtgagttagcaaccttagaagcagacatagaagagcagtcgagcctaacagacatctcccaaggagaatgtcttatggagctgcagctaccccagcactggccttttcattcagatcctaagtctctgttaccaggtcctcttggtatcttagccagctgcaagctgtgattcagctggtttaactcaaaccttcctttgactcctatttctactgtggcccttccccttacttcctacagaggcccacagaggaacgtctctgcttctgtagccagtgttttccttgccctgctggcgcacttactcctcttcctacagccaccagtcttacagctaaccaagggaacaggaagcttggggtgtggaacagtgtgttaataggcaagccagtccttcagtgttgagtttcagggctttttctcgccctatactatttccctctgggttttaatgaatataagaactgcttccttcctcttgcatttctatcgttagccgggatgtaaacatttatgattaggaaagtggctatgacttgtttttctagtttcttatacagtgtccaacataagcagacacctttgtcagtgtttgttcagttcaagtaaacaatgcagaagccattgacttcccatcccctgggacatgctagactgagaggtagcagcagtctggcgcctccagcacaattaaatgaccttttgcatttttgagctcatttgccaagtagtgacaaccttcatattctagtaaactttcaaagatttggaaatgtgctcagctgtgcattaaggagaaaaacattctatttttaagtcagattttacatttgagaaaaatattacagactatttttaaaggggaagaagtgaatactgtttaaaaacgtggtactcacctgcaatcccacgagactgagtcagggacatcccgagttttgagaccccgttttaaaagtaaattaaatcatagcagaggatttctccaactctgagtgttcccatgcatcagcttctacctgtgcacagggactcttctgttggccgagagccgtgagctcccaagggagaagcacaggtgaggtcattgatgtttggagcaggcaattccttcagcccatcaactgccagtctggggttcctcgggttcttgaaatgacagtctgcagtcacaggtgtccactggttcctagagtggtgcccctcctttaagaagtcatttttgtaggatttgatgtggatcaaggagcattcagacagctcctgctgggatgcctggaactaagttacaaggaaggtgcctctagcttacagagcccgttccttttcttactttatcctcagatcaagctgttgcaggttctcttacctggatctttggtaagcagagctggagttcagagatcccaaaagcacgagtagtgagcaggaaagtcaggcctactagactcagccttttatttccttttgaagtggactcaagcctctcctggagccaaagtcctgtgttgtatgcatagtgcctgactcagcctctgtcagtcagctttacatgggacacacagagtcacctataactgaaaacttgtctcctctgtctagtgtgtcctcctgtaataagccatactcagatgttttataagtggttcagaatgccagtttgatactctgcttctttgtaggcttactccacagttggaacaccagactacattgctccagaagtattcatgcagactggctacaacaaattgtgtgactggtggtccttgggagtgattatgtacgagatgctaataggtaggttctgtttgtgtgatgatacacatcttttggtgccattgtttgaacatactacagctattaaagacaaatagagcacagtcattttgaacctatttctcaggtgtatcagagttaaatacatattgataaatacccaataaactgccctgggatcttgtggtaggaggtagttaattatcttggcttcctttatcaagttggagatgcagggctcagataaaatgaagtggggttttaaatccatgtggactttattagtaattttatagtaagttgatgcatgagatattgctgtagagcactcagggctgtttcatttcttgtggcacatatgttaggtctgcttgaattgatcacaaaaactgataaattattgattctctgatgcccaggctttccacctttctgctctgaaacaccacaagaaacatacagaaaagttatgagctggaaggagacgctggcatttcctccggaagtgcccgtctctgagaaagccaaggacttgattctcaggtcagtgtctctgaggcagggaaggtcttgggaggaaaaataccactgatttcattagtcaaggaggtcagtataaagaaaagttttacaaaattcaaactttaaaaaagattttatttatttttatgtgtaagtgtgtggttaccacttgcccatggaggctagaagatcccttggagctggagttacagatagttgtgagccacccagcatggatgctaggaattgaacccaggccttccacaagagcatcaagtgctcttgacttcctatttccccagaccctcaaaatgcaaacactttaaaagaattttgtgggaagatggtgttcagaagagagaagagatcttgttggacatcctggtgacattattagcaaagtgtcactcctgtcagactgcaagagctcagtgcacagagaggaaggagaaaaaatggatcaggagctcttgcctcagaagggcacagggcctcaagcagaagactgccgtgccagtgcctgacggagcgacgacccttgtgaatggccagctggcagtatgttgtatgaaattgttaagctggacgtgacctttgacccagcagtctcattttaaggaatttaattgggcctataaccatgtaggtgtaaagggttaagtgtgtttcttatgttattttagttgtgaaaaattgaagcataatatataagtcttcagcagtggcagtgaatagaacagtctgatatctctgtatgcagatctcaaaaagttacctcacaggaaaatactgatcaacattaaaaaatgttcttagtatagtcagtgaaggaaaggtcttaaaataattattattgtgttaacacaatatcattacattttattactgtattattaattgtactattacgttaatattattataagttgaaaagtagctttggaatgtttgccggttatctctaaaggataggtttatgggtaatttgtactttctctgtatttcccacagtagcttcaatatctaaattaaaatgctttctaaaaaacattcaatgtaataacaattagagtgtttgaggtgaaaatgtggctgatgattggttttcctttctagattttgtactgattctgaaaacagaattgggaatggtggtgtggaagaaatcaaaggtcatccgttctttgagggtgtagactgggggcacataaggtatgttctgcacccggagctgacaaacaccaatttctgcatttggtggttagtgcacttctgtttcttctagacttgtggttctcaatctgatggttgtgaccctttcacagctgtcacctatgaccatcgtaaacacagatgtttccattatgattcctgacagtagcaaaattacagttatgaagtagcaacgaaaatgatgttatggttgaggggtcagcagccatgaggaactgtatgcaagggtcgcagcattgggaaggtgagaaccacacttagactaagcacaagaggtagggctgccgcctctgagaagtcactgcctctgcagcttctcagggtcttctctggaggtcacgctgtgtgcagctgtgatcatcgtcttgaactcgtaactgtccaacaaaccactctagacaagtcttgcccactgtactgtagcacaggacaggaaacccaagggtgtctgtctgctgtggctctgaacacagctaagtggatgtcaatgttttcatttacttggaagttttacatgaagactttctcatgcttttcccctccagcactggggactgaacagagctaggcaagcactctaccgctgagctccagtcccagcccttcttcatgcctgttttgttttgtttaggtgaaaagaaagttaaaagagaaggtattttactgaaaagtgggagacagggagatcagatctatctaagtgaattagagctagaattctagtgaagattagtaaatacaaagacatctgcgaaaaaagaggggcacacgtatttgtgataaaatctgaacgcaaagcttgtcagtcatatacacttaagaggaccagagaggttaggttaaaaaaaaaaatctattcacaaaaatgccttcttatgctaaaaacatttaactatagaaatagttaaaatgtcatttaaaacttttaaattggccgggctgtggtggtatacctttagtcccagcactcagggacagaggcaggaggatctctcagtttgaggccagcctggtctacagagtgagtttctaagatagcctgggctacacggtgaaacccaaacaacaatagaaacaaaaacaaaaacaaaagccaacaactccttcaaaacatgacaaaaccctttttatatttatgtatttacttattaagtgtgcacccacaccccataccatatcacaagtgtagaggtcagaggaccacattcaggagttggttctcttcttctaccttgaaggacccaggaattgaactcagattatctgtcttttcctgctgagccactccaacagcccctttatcagcctttttaaatttttcaatatttcttttaagaaaagatttatttagtatgtatagagtgttctgcctacgtgtatgtctacacaccagaaaagagcaaccagatctcattataagccaccaagcagttgctgggaattgaactcaggacctcaagaaaagcagccagttttcttaacctctaagtcatctctccagccttgaggtttttattttttcaacaaaaaaccctgtactgtccatgcctgtacaagaagactcagttgaatggagagaatgggaggccctgggcttctgtgacccaactttttggtccttactagcagtgtgagtttaggcagccacactctgctctgtgactgcttccataatcagtatgctctgtctagaaactccagctcagaccccatgagccagacactaacagtgcctcagggtaagatgagagatgtacaggacaggctcatgccagtactgggcacacagtgggaagtactaggcacacagcgtgacctccagagaagacactgagaagctgcagaggcagtgacttctcagaggcggcagcactacctcttgtgcttagtctaagtgtggttctcaaccttcccaatgctgcgacccttgcatacagttcctcatggctgctgaattgccttttgcagggaaagaccagcagctattcctatagaaatccggagtatagatgacacctcaaactttgatgacttccctgagtctgatatcttacagccaggtaagaagttcacaagcatacccacactgcagtcacccgtgaggtgatgggcgcgtcaccagtgaaaccttttgcccttagttgccttttttctctttctagtgccgaataccacagagcccgactacaaatccaaagactgggtttttctcaattacacctacaaaaggtttgaagggctgacccagagaggctccattcctacatacatgaaagctgggaagttatgatgatcacagtcgcccatagccaggagaactcaggtagctgcatccgcaggctggctcggcatcagcaccaggagctctgggacagtgctgctctccagccagaggaacgactacagcttgggaatctgaggctgctatggctatgggaattgctcagctttttttttttctttttcttttttttttttgtattaactttattatacaaaggtactggaacaaaagaaacagacattccctcctaactgcactgcctacgtgcatgttgagaggtccatcctgcccatgtgctgcgcttccgattgcaacactaatccagccagaactgcattgcactgacggcaccatgacagcctgaggttgctctcagtgtccctgcttcactgcagagcccgtgggtctagaatcagtgaaaagccatcttctgtagctgctgttagtagaacatttgccctgttggtttggacattgtgggctctacatgaagacagtttctgtaccggctccaaggaacttaaggacgctgacttcaacgacattagaatttcctgtcaggctctcacgcagaccctgtgatagggaagatgagcttctgttagggtgagggcatttctcaccttcgctccggcatctccaaggctgacggtgctgagagattgtgacttgacgactgatgtgcacacatggagatggacctgaatgattgtcagctactcacttttaacaatgctgtagcattgttttagtttgaggatggtgagctgagtttcagaaatgaccatgaaagctgcttgtagaacctagtatgtttttattaaactatttttttaaatgtcaaacttctgatcagtcaatggacactgtggagagcagagtgtggctcactgtggctttctgcagaggtggtacttgtccagctggtgaccctttgttcccttgattgcactagtgccattgttttccaatgaaccaaagatcctgaacagtggctgtcagcagggagtggagctccggctttacaggggagctgcgctcccttgacagaggccagccctgttcactgttagctcatcactgtggttaaagcccgttatgaaataaaggaagtgggtgctggctgggagggtgtgactggagactgggcagaaaagtcagcatcagattcttggggtgtttccctaaggattacatcatcttttcttgcttagcattttgattctgaaacaactttctgaggagatgtagttttgtgagttgtagttgtagtaacttctcagggaatggctaatgtttatcatctatgattgatatagtgagactttatgggaggaatgcttctcctgagggcactgagcaatgccttgtgacccctctttcatcaaggccatcagctcctgatttattttggtgagtcttttaaagccccccccccattttgctgttgagtctggtaatcaacaccacttgttatctactggctcagctatagcctgatcaatcctatgccaagtatttggagaaagcactgaaaatggtagataagcctccctgactttagctgccttaatatctgcagggtatatgagcttctccaagtagtctgtctcaagggtacttaagcagcagagacccctgaatatagggattctaccttttcttttagaatgggacttttctagtgtgagtgtctaggttggataggagaccttgccaaattctctagctcaggtgtgataactacctaactatcgtagggtgggtgttgtcaatccaggtaactggggtagtttgagattagtgtacaggagaattaccaaacttatgtttccatgatgtagggacagagcactttgtctgatctctctgttgtggttgtaaaagctgtgagaggcaggtttcctggtggtggagaggcattttgggaagtttgctttgcagcattaacatggctgcccacttttcaggaatttcttgtggaagcgttccctaagctagtgtaaggcccctaaagactgtctgcctgttgaagcaaaaatacgaggcatggtgcaaattgtgcaaataatttgcagagatcctctgatactgactttttcccattatacacttcccatattttaggtaaataatgtaatttaagtgataaaaccctatcttaatcaactgggcatagtgacattttctcttaatctctattttgagtctaggaagttttattttaaacggtggtttgggtttttctaaagatacagaaaatgtgtataatccagatgtattggtttcctgattgagtagagacttgtactttttcattaaaacctttgtgttgaagcagttgttcacagctaagtctggagatgtatgaaacctgggctgtccaaaataagttgtgaccacttaaccaccgatcagctgtgtggtgaaagtgccagctatggaatattaaatgcgttctttggctgctaaggcttaagatagggctcctttacttccatatcagcatagctcttaaacacatgcatagctctgtacaagctgtacattttaaaatatcttgaagcacagtttgttttggtgttgagaatctagtccaccagtcagtctctgacagcaggagagatagctagccacctatcttttggcagtctacaagtaagttacttgagggtcagaaaagggtcctggcacatcctctctttgaattgttaaaatttggaaaattcaaaagcaactgttttgctatgatcatgattatttctcattttatttcaaaattattttctctgtagaagtgcacttatttctgaaaaatcttaagccaacacttaataaatatgagacacttgagactactagaaatattttagatttttattacaaaatgtgaggagatgaaggaataaagtaatagaagtgtattgtagtttttgggggggttttgtttgtttgtttttttaagcaatataatccagcagttgtccagaaccatcaggcttctgagcccatccagcgtttcgaagactgttgggcaggggcattgagggcctcttcattcacggcacaatgagaataaagccacgtttacaaagctctgttggtggggtgtttgttttgtttgttgttgggtttcaggttggtgttatccaaaacttaaatgctatattgttagtaaaattaccaaatagctattacacctgaagatcacatcacaaaaagattaaagtatttgaagttttgaattaagatagttgaaccaagtttaggtttaaaattatttggatccataactggaaacatacacccttgtaagttgtcattttaggtaattgctggtcttaggtcttatgcagcccctccagtgagtcagaacatgaaagcatctgtaaactaaaggaactcataagggttcagagataggattgactcagctaccacccactgtgtcccttcctgtggaggccacaaccaggactaggcagagagagccaggcaaaatcccctggacctcaacagcaccccccagcctagttatactctggtgtccccagcatgtatcaatgatgctgtgataagaacagtgggaacacaaggttggaatttgaagagagcaaacttggaagctcttaaatccaactctcagaaatgtctagtgaagcaacttacattcacaagcatatttttacttacacgatgtagtgtcttaaaactgttctgtaaagaaatggagtctccagaacacagcttgttgccctggcgctccacaccagtacctctccccaaagcatggagcatcatactccatcagatcatctccttatgcttccagaacctcatagggatacaagagtgagatgacagaattgtcatgtgggataataatgagtgcaggtgacacaggaaggtaaaagtggtttcacacggtctctttcagggtagtcagtttagccgcacaaaaacatgaagtatgggaatccttccattgtattaacttctgtcattcatgttgctttgtccttggtcagagagggagagagcatgagctagcaagctagatggctatagagactgaagttgtttagagaaccttgctcagctgaagagaactgagcagttaagagtgactactgctcctatagaggacttgaatttgggtcttagtacccatgccaggtggctcacaatcacctggaaactctagctccagggggatcaggtgactccgataggcacatgtacaaatatagatacaataaaaataaaattgagagtaaagaaaataatgagccgggcatggtggcgcaggcctttaatcccagcactcgggaggcagaggcaggcagatttctgagttcaaggccagcctggtttacaaagtgagttccaggacagccagggctacacagagaaaccccgtctcaaaaaaccaaaataaatttaaaaaaataataaaataatgagtcagaaagtacgccctcccctcaccctgttactggctgtgattgtatcaacttctaattaaatggtacctagccagtggttgacttaaatcaggatttaggtctgtagtaccagggtcgatctcattgtacgtctgtggatacctaaaaccaaataagtgttcttccaagaatcgtcagttaatcaaaaggccctagaaacaagtgtgctctagacacctgcaagcggggtctgggctatacagtgagacccccatctcgaagacggagaaaaaaaccctgcctttaagtctgtcttgatcggtgagctgcaggctatttctcatccttcctgacccacctttaagatgaacattgagacccactgtgcagggtgctagacctcaggttccttgtgctctgagaagttcccagagctaatcatatctgttgcgcttctggctgccagctgctgctctttagggctcatgtcctctaaaacggttataaggaactagagtcccccacttcattcttcaacccagccaagggtgggtggtccaactactgtggactcaggtcctctgtctaaagggagggtactcctaacctttgaaaaaaatttactgtgtcttaatcaggagctgtggttagatttggagacttttgagaggccactggtagactcaccaaaagtatgtgacatgtttctttctttttttttttttttttttttttttgggttttcgagaacagggtttctctgtatagctctggctgtcctggaactcactttgtagaccaggctggcctcgaactcagaaatccgcctgcctctacctcccaagtgctgggattaaaggcgtgtgccacctatgtgacatgtttcttattggttattgcgggaacaactcgaataacgtaatgggccacgtgcaataggagcagaacagagcttcactgagcagagtgcacaggaagtgctgggtggccttactctgtaaccaagaccactttcaaaacatgtttggcttttagtaaaaacaattccaaaaacattgaagatagaatgaagctttgctgaagttgtttaggttagcaagcaatgcagggctcgcactaaccagaacaccctaaatacccattttaaaaggaccctactccagttcctctacgtccctcagagtctctccctctcccatgaacatactttgctcccagtgtcttttctgcctcacctccctgtcttaggcaaactcaaacccatctttttattccagaagcccatagtgggtctgtctatctagatcctctgaggatttgtgctttttttctccacacaactctatccttcacaaacccactgcacaagtccaggagtcttccccagaatttgtttcctgaactttttctggaggcaaaaggcaaaggtcatttgaagcatcattagtataatcatttgtattcaacctcttgtgttgggaattggttctaatgctttgtttaaatttggctcccaaaatcacacttccagacccgagggtccccgcccgcagctggcttcaactgagaataaagaattgccctatagctagtggctggacagaaagacaggagggacttttagatttttggggcaagggacagagaaggaggggaggaagactattgccatgactcgagggagagggatcagatttaagagctgcaggagagaagtcatccagtgatgtaggtggaaagggaaagtgggccactggggtggggggtgggggggcttcccagaaggtaacagggcagcaaagataaaacaggtttatacgatattaagccagtaatacaggatgctagctgtagggagatttagaaatgtccagccattgaactagtcaaggcatatcaaaattagctggcatatgtgtgtctttcattcgcaaatccagagagctcttgggcaggtgcagtgcttgttagtggtaggcaagagctcactttttaaaattaattggagactcccaaatgaaatacatacacaccgtgatataagattaggatttggagagaattggctttttagcaggctacatattttgcccaagcctcatggggatttctccccacagaatgatacaaagagtttgggctcagaagctctgggattccttgctatgcaaagaaagaggctggctgctcagaggcaaagagagtcagatggtagacactgcctgctaatcaaaggctagagacaaatcaaacttgatttgtttttaaggataaaagggaatatagcttcttcttcgggaaaacaccaaaaggcggatgacgccggtgcagcgggagggcccggaggacccgggggcccaggattaggaggccgcagcggcttccgcggaggattcggcagcggtcttaggagccgtgatcgtggctgtggccgtggccgtggtcgaggtcgtggggctcgtggaggtaaagctgaagacaaggagtggatccccgtcaccaagctgggccgcctggttaaggacatgaagatcaagtccttggaggagatctacctgttctccctgcccattaaggagtctgagatcattgacttcttcctgggagcatccctaaaggatgaggttctgaaaatcatgccagtgcagaagcagactcgggctggccagcggaccaggttcaaggctttcgtcgctattggggactacaatggtgacgttggtcttggtgttaagtactccaaggaggttgccactgccatccgagggggccatcatcttggccaagctttccatcgtccatgtgcggagaggctactgggggaacaagattggcaagccccacactgttccatgcaaggtgacaggccgctgtggctctgtgctggtgcgtctcatccctgaccccagaggcactggcattgtctctgctcctgtgcccaagaagctcctgatgatggccggtatagatgactgctacacttcagccagaggctgtactgccaccctgggcaactttgctaaggccatctttgatgccatctccaagacttacagctacctgacccccgacctctggaaagagactgtcttcaccaagtctccttatcaggaattcacggatcatcttgtgaaaacccacaccagagtctctgttcagaggacccaggctccagctgtggctaccacataagggtttttatacaagaaaaagaaaaataaacaaattaagtctgctaaaaaaaaaaaggaatataatggtaattgcttaaatgttcttaaatatacatggcataaagaatactttgaggcttttgatcttaaattgtaagtcagaagtcgaaggtaagtagaatacagttagacaagtaatagaaacttatgttaattcaagtttgtagcctcccccagccttgaagcaggctgattcagaccttgctgccactgagaatgagaccacctggggtggagccttcgacctagatggcacctgccgctgctcttctccaagacagttgctaccgctgagaggctgaacctgtcttcctgggatattcctgagatagctgacaacctgtggacttggcgacctaatgctaacagctctgacagactagtgctaacaacttagcaacaaagcatcaagaggcctggcgtggcaggggatgggcctccccctttataagcacagactcttagtatacattgggccttgatcagaaatctgtcttggtctcttctctcatggttctctcccatacagctctggcctcccactcaggaacccagttagtgtagccgcaggcagctacacaagttacataaagagaacggggcacttgtacctatagagatagtaatctctagtaattactagagatagtaatggtggcacatgcctttaatcccagcacttgggaggcagaggcaggcggatttctgagtttgaggccagcctggtctacagaatgagttccaggacaaccagggctacacagagaaaccctgtctcgaaaaaaaaaaaaaaaaaaaagagagatattaatctctgtagaagggatttaagtatacttacataaataaatgtttgagacttttgatcttaaattagacgttgaaaagcaggtgatagggaacctaacctatctcagacagtagaaatgtaggccttgatctcactattaaaaattaattgtgtaagaacaaaacaggagatagtggaagaacgttatcccaacagataataataatatttgtttagattgttttaattgctttgttttaactatcaaaatgaagatcattataagctcaatagtatttatgatattaaaaaccctctgggagagaggttgagctactaaattctatacctttaatgatttctggctactggaccaaggtcatgctattttgggagagagactgtgttgacaggaaaggagaaaaagctttggaccccttccaaagtaatattatcagatatgataggggaagaccccctgaagatcttagccacagacagaaaagaaaaatttgagaaaatcaaacagcacaggtaacttgatctgctgattcctggacaaggaaacagcccagtaactagcttagacataaaaatatctctagccaaaacttcagctaaatttagacaataaatcttgttgattatggaacccttaagattctttgtgccctccttcatatggcatgaatgaagatttattgtaattagttactgatcagatcaactcatgaaaagtcagttgtctttcacctgctcaaacaaggagcaaaaattcatccttaactcatctgtgcatcttgcacaatccatatgaatatttaatagtactaatattttggctgtaaaattcatatgttacagaatgtacagctttgacaagactcatcctcagagatgctgaactgacctgcagttccaaccccctacctcctgaagctttttccaaagacatgcttccaaaacagcttcaggaataactgacgattccagatggcctcgtttcatctaacttttcagatggatccagtcagaacttcagtcaaaccctgagccttctaagcatacagagactggttaacagatgctaaagctggctttcttaagtctaagccaattttctaattttcctatccctccccacccctttaaagaatttctcatcccccctatttagcagggagaagttgtggagggcagtcatccggatcccttaggtgtgggtatctggttatggttatttttacaaattatagatagattgtcattttaagggataatttgggaatggtcataattttgaacagagagaaaatagatgggatggattactaaatttattcttgagcaaagcactatatagccataatcttacattggtagaaatctttataattgatgaaaaattataaatttataatttcttacattggtacagaatttatatattgatatagaattaataaattaatttcttatattaatacaaaatttgaaattaatattgttactcttagatagacattgtacctatgcaactcatttaagaatacaaggcttagacccagtccttctaataactgctattacaaactgtttaggatgattaagtaaggcaaattaaggaccaaatagtaaactcatggttacattagattctgatctaattatattaaggtgctttctacaatattcaaatagaaacagctaagaatagtcaacagttcagatatatgttatataggcagacagtctcaaaaaacatcaggaatccacagaatatgacatttaatattaattcattattaaagatcatttgactacagacatttctgctcctgacagtccccacttcttggttcaaagaagaaactagcattaaaatctccacatggagttgctccaagtatggcaggatatccactggacaaaaattaccctatccatctacagacaaaaaatactgtacacgatgcaggatagttgacagctctgccaagacagagtaaacaagtctttcataatccctgcttcatttcaagatggttctgggccagaaggctgaagacagatgctccgatgttttgaggaatgggggactgtccaagtagtcagctgtatctaacagctgaataagttttgaaagcgatgttttgtgcttcctatatattcaggtaataatttgtttttggatttctgattgggttgaagctaattatagtttcataatcaaactcaagttgcttgccattgaggaaggtgatatagaaaggatggtttacaggtggcaatacaagttaaagtcaaaacataattcaagaatagaattgtgaactctttaagtcaggataaatagtagagtattttaactaa

SEQ ID NO: 780 - DNA, 2154 bp, Mus musculus
atgtcatttcagttccagttactatggcaatgacggcaggggcaacaactacctttcctatgagcaaccatacccgggaaagagtaactgtggccaagctcacactggagaatttttacagcaacctaattttacagcatgaagagagagaaaccaggcagaagaagttagaagtggctatggaagaagaaggattggcagatgaggagaaaaagttacgtcgatcgcagcatgctcgtaaagaaacagagttcttacgccttaagaggaccagacttggcctggatgactttgagtctctgaaggttataggaagaggagctttcggagaggtgcggctggtccagaagaaagacacggggcacatctatgccatgaagatcctgaggaaagctgacatgcttgagaaagagcaggtggctcatatccgagcagaaagggacattttggtggaagcagatggagcctgggtggtgaagatgttctacagttttcaggacaaacggaatctctatctcatcatggaatttcttcctggaggtgacatgatgacattgctgatgaagaaggacaccttaacagaagaagagacacagttctacatctcagagactgtcttggcgatagatgcaattcaccagctgggcttcatccaccgggacgtcaaaccagacaaccttttactggatgccaaggcaccatttcagaacatgaattcaaagcggaaagcagagacatggaagaagaacaggagacagctggcttactccacagttggaacaccagactacattgctccagaagtattcatgcagactggctacaacaaattgtgtgactggtggtccttgggagtgattatgtacgagatgctaataggctttccacctttctgctctgaaacaccacaagaaacatacagaaaagttatgagctggaaggagacgctggcatttcctccggaagtgcccgtctctgagaaagccaaggacttgattctcagattttgtactgattctgaaaacagaattgggaatggtggtgtggaagaaatcaaaggtcatccgttctttgagggtgtagactgggggcacataagggaaagaccagcagctattcctatagaaatccggagtatagatgacacctcaaactttgatgacttccctgagtctgatatcttacagccagtgccgaataccacagagcccgactacaaatccaaagactgggtttttctcaattacacctacaaaaggtttgaagggctgacccagagaggctccattcctacatacatgaaagctgggaagttatgatgatcacagtcgcccatagccaggagaactcaggtagctgcatccgcaggctggctcggcatcagcaccaggagctctgggacagtgctgctctccagccagaggaacgactacagcttgggaatctgaggctgctatggctatgggaattgctcagctttttttttttctttttcttttttttttttgtattaactttattatacaaaggtactggaacaaaagaaacagacattccctcctaactgcactgcctacgtgcatgttgagaggtccatcctgcccatgtgctgcgcttccgattgcaacactaatccagccagaactgcattgcactgacggcaccatgacagcctgaggttgctctcagtgtccctgcttcactgcagagcccgtgggtctagaatcagtgaaaagccatcttctgtagctgctgttagtagaacatttgccctgttggtttggacattgtgggctctacatgaagacagtttctgtaccggctccaaggaacttaaggacgctgacttcaacgacattagaatttcctgtcaggctctcacgcagaccctgtgatagggaagatgagcttctgttagggtgagggcatttctcaccttcgctccggcatctccaaggctgacggtgctgagagattgtgacttgacgactgatgtgcacacatggagatggacctgaatgattgtcagctactcacttttaacaatgctgtagcattgttttagtttgaggatggtgagctgagtttcagaaatgaccatgaaagctgcttgtagaacctagtatgtttttattaaactatttttttaaatgt

SEQ ID NO: 781 - protein, 436 aa, Mus musculus
VISVPVTMAMTAGATTTFPMSNHTRERVTVAKLTLENFYSNLILQHEERETRQKKLEVAMEEEGLADEEKKLRRSQHARKETEFLRLKRTRLGLDDFESLKVIGRGAFGEVRLVQKKDTGHIYAMKILRKADMLEKEQVAHIRAERDILVEADGAWVVKMFYSFQDKRNLYLIMEFLPGGDMMTLLMKKDTLTEEETQFYISETVLAIDAIHQLGFIHRDVKPDNLLLDAKAPFQNMNSKRKAETWKKNRRQLAYSTVGTPDYIAPEVFMQTGYNKLCDWWSLGVIMYEMLIGFPPFCSETPQEYKVMSWKETLAFPPEVPVSEKAKDLILRFCTDSENRIGNGGVEEIKGHPFFEGVDWGHIRERPAAIPIEIRSIDDTSNFDDFPESDILQPVPNTTEPDYKSKDWVFLNYTYKRFEGLTQRGSIPTYMKAGKL

SEQ ID NO: 782 - DNA, 101954 bp, Homo sapiens
  misc_feature (1)...(101954): n = A,T,C or G
nnnnnnnnnnnnnnnnnnnnnnnnnnnnnnnnnnnnnnnnnnnnnnnnnnnnnnnnnnnnnnnnnnnnnnnnnnnnnnnnnnnnnnnnnnnnnnnnnnnnnnnnnnnnnnnnnnnnnnnnnnnnnnnnnnnnnnnnnnnnnnnnnnnnnnnnnnnnnnnnnnnnnnnnnnnnnnnnnnnnnnnnnnnnnnnnnnnnnnnnnnnnnnnnnnnnnnnnnnnnnnnnnnnnnnnnnnnnnnnnnnnnnnnnnnnnnnnnnnnnnnnnnnnnnnnnnnnnnnnnnnnnnnnnnnnnnnnnnnnnnnnnnnnnnnnnnnnnnnnnnnnnnnnnnnnnnnnnnnnnnnnnnnnnnnnnnnnnnnnnnnnnnnnnnnnnnnnnnnnnnnnnnnnnnnnnnnnnnnnnnnnnnnnnnnnnnnnnnnnnnnnnnnnnnnnnnnnnnnnnnnnnnnnnnnnnnnnnnnnnnnnnnnnnnnnnnnnnnnnnnnnnnnnnnnnnnnnnnnnnnnnnnnnnnnnnnnnnnnnnnnnnnnnnnnnnnnnnnnnnnnnnnnnnnnnnnnnnnnnnnnnnnnnnnnnnnnnnnnnnnnnnnnnnnnnnnnnnnnnnnnnnnnnnnnnnnnnnnnnnnnnnnnnnnnnnnnnnnnnnnnnnnnnnnnnnnnnnnnnnnnnnnnnnnnnnnnnnnnnnnnnnnnnnnnnnnnnnnnnnnnnnnnnnnnnnnnnnnnnnnnnnnnnnnnnnnnnnnnnnnnnnnnnnnnnnnnnnnnnnnnnnnnnnnnnnnnnnnnnnnnnnnnnnnnnnnnnnnnnnnnnnnnnnnnnnnnnnnnnnnnnnnnnnnnnnnnnnnnnnnnnnnnnnnnnnnnnnnnnnnnnnnnnnnnnnnnnnnnnnnnnnnnnnnnnnnnnnnnnnnnnnnnnnnnnnnnnnnnnnnnnnnnnnnnnnnnnnnnnnnnnnnnnnnnnnnnnnnnnnnnnnnnnnnnnnnnnnnnnnnnnnnnnnnnnnnnnnnnnnnnnnnnnnnnnnnnnnnnnnnnnnnnnnnnnnnnnnnnnnnnnnnnnnnnnnnnnnnnnnnnnnnnnnnnnnnnnnnnnnnnnnnnnnnnnnnnnnnnnnnnnnnnnnnnnnnnnnnnnnnnnnnnnnnnnnnnnnnnnnnnnnnnnnnnnnnnnnnnnnnnnnnnnnnnnnnnnnnnnnnnnnnnnnnnnnnnngggtaaccaactattctggtttgcctggaattgagggaatttccaggacacaggattttctgtgctaaaactaacaaagtcacaggcaaactgggaggatttgttcaccctatatatactagaaatatataaataagtaaataggttaggcctaatcctaatgctcaaatttttttctaatttattttatatcccatataagacatatacattatttgcatacatctatcaaccatccttttaattgttctttaattgaatcagtctttaaaatgagaatattcaatgtgttcacaggtgtgttgaattgcttaattagtgcttataaatagctttgggatcctttgatgaaaacattaagtgattgtaaagatttataacaatattacttcacactgaaggacacagcaggattcaaagcaccttactgattgaacatagattatttagatactgtaatccccatggaaattcactaacggtatttccatcataaggaactagttcacaacaaattgttcttttaaaaaaaaatcaaagggagaatgtaagtgaaactgagcctttggacctaaagaacaaaatgcataggcaggaaggaggtagttgcacaagtctgaaaaaagtggagccacctggatcttgtaaaaagctatatgaaagggcccttttagaaaacaacatctattctccttgtagacattccaggtaaacacatttttctgtgaggcacaattagtcctagttactgaaaatgtcacgttctctccattgacagatactgaagttttttcatggggcaaaactgggaatatttgagataaaattaaataatactgcttaagcagaacatcttacctttttatacttaaatgctgctgtatttcttaagagcaaggagattctcttacaccacagaacaatgatcaaaaccagaaaatttatgttaacattatgtaacttacagatcttaatcatattttaccagttgtctcaataatgtcttttctatcaaataatagtaaaaaaaaaatctagtcaagggtctaattgggaattacacgttgcatgtagttgtactatggctttagtcttttaaaattgggaacagttttttggttgatctttgcttttcatgacatttgcattttgaacagtataggccaattaatttgtcaaatatccactttgtttcttcatgattagattgagggtaaacagggtaatatagaagtgatgtgaccttactacggcacatcaggaggcagaatggggcattcttaaggagtagtttcatttttattttttgttttttgaggcagggtcccctgtcacctaggctgaagtgcagtggtaccatcccagctcactgcagcctggacctcctgggctcaagcagtccttccacctcagcctcccaagtagttgggactacagatgcatgccaccactataatttttacttttttttgtagagctgtggtctccctttgttgcccaggctggtcttgaactcctgggctcaagtgatcctcccacttcagcctctcaaagtgttgagattacaagcatgagtcaccacacccagcctagagcagactttatgactgtcttattggcatctgcaatataacaagctgaagatagaggaagaagctttcagtgggctggtagcagatgctgtggtgcaccacccaaatccaccttctaggattgcggctctcattactacagcagccggaactgctggcttctaagagtccccagccgagtccttctccagttactgccctctgccaggtgggctttctctcccacatccaatggctgattgaggttggggtacaaaggcctggtcctgtgcctcaacagggacaactctgaagagccatcccaactccagagccccttgtgggagaggctgaagcctctgttgcaactgcattacatttcaacttctttgcctgatcttgctgtcttctctctcacctgagttgatccagagagcactttccaatacatctccagcacattaatctgagtatttcagatttcccaggaaagctgacctaagactggaccattttacatatgtgagtggggcttttgataagcatttcaagttgtaaaacaggtctatttataaacatttttaatatattgaaatttcccaggaagtatacatattaatcttgttataagaattttactccatcataattctaccctaggaactgttgtagtctgagagtaacaacacaaagatgttaacaagagattgtgtctggattgcttaggatagtcagagcttgattcttagcttttcatgtccagaaatttaactttgtcagaggtgaccaaactcagaggaaccaatacggagtaagggtagtgtaactgagaggagaacatgtggcaatttgagagtgggaatttataatgaaaaatgtaattgccaagcaaatcaaaaatttctattggctaattgacatactcttacctcataagaaaatctacatgggaagtcaaatcagaaatttacttgatgaatacaatgattgatttatttgattttaattgatccaatttatctgataacctttgtagcattcagccctggtagggcataccacaagtagaccagatattcatttctgcttgccaagttactcttgccccagacagcttgcaatatacaacttaatacttgtaaataaaacgcctctgcccagagctctgcaacagctttctattgctattatatgaagataaatcttagctgggcatggtggcacacacctggagtctcagctactcgggatgctgaggcaggaggatcacttaagcccaggagtttgagcctgcagtatgccataatcacacctgtgaacagccacagcactccagcctgggtaacatggtcagatcttgtctctatagcaacaacaacaacaacaatttcttaaccttctccacaaggccctgtgttgtctaatcagataaaaaaaaaaattccttgaaagccctatttgggttattttctccaggaaatcaaatcagcataaaatgcatgaagctaacccgctgaaagcaaccacctgattcctggggaggttgtagagtatagcagaatgaatgagaagcacatccagtaacttctcccccacaatccctctctgtagcttcataaaataattcaaccaaaagtatcaacacagcaccagctaacaccaagaatgatcttgcctgccccagactctactagaattcgctacatttaaacaagccacaggttttgtaacttacttccctacatagccttatccccaaccttaaccccagagctgaaacgaagaagaggaacatagattgcatgcctgtgaagtggctttcctgtcaaggtcttagactttctttcactgcctagattaaaaatataaacaaaacccagtgtgagcaagcatgtggggaaatgggaattttcttgtactgcctgctggtagcgtggaaactggtgtaacctctggatggtagtttggtaacaggcttggaaatgtaaagtgtgcattgcctttgagtcacttctagtagtttgccctgaagttcacattctctagtgggaggagataactaaaaaggaagttcaactgttttaacatagtggaaactgttgcaagtaatggtttagaatttagaaaaccacgaatatcaaatgatcttcggaaacatactttttcaagagcgaccctctatatgattgtgatgtaatgtcaattgtgaactgagggatgtcaatccataatatcaagaaaaattatgctaaaaaatctctaatgtgattcagccttttttcagtctagtcaagtcagttaaaaaataaagcagggatcaattagaagtcactgtttccaggtttataaagtaatttgcagaagacagtctggtgatagctctgaatggactgtcgtggatgattaaatggcccagtgaaagtcccatgcagcttgtaaaatagagtcttcattttcaaacaaactcaactatacttagttgtctggtctccgttagagtccttttgaaagtcatggctatgagaagaggagccaggagtcaagcactcttagtctcaaactggaaaggcccattcagttttttaaaaaatcttgtaaactttcaatttttttccaaggtaaaaaccttactaggttttcatcaggacagacttccaggagaactaaaaagcacctattctctctcctttttaaatctattggcgtaacactgcatatcataaacttttatgctctttaaaatctccgtatctgtagttgcatctccattatcattgttactgtttgtgtctttttgttttccctggattaatcttgtcaagctgtttcctatttcctttacttttccaaagaatcagtttttggttattgtcaatttcagtcattttttttttcaaaaaaattaatttctaaattaactaatttaatttctgcctttatgtttaaaattatatttgaaattattaatcataacagaatttacatacatttgaaaaacagaggtatatatgggaatgattatatatttgatttacattccttggtggacataagggtcatggaggggcttctgctctaagttttatatccttcttcttcctttgaatttattttgttttctctttcaggtttcctgagttgaaagctttgttcatttgttttcatttttgtgttttctgtgaagtgcatttaaaacaataaattagccctctaaatactgctttgggtatatctcacagttgcaaaattgcatagatggaaaagttgctttattcatttggtagaagggttttatcaatagctttccttctattattatttactactgccatttggcattcattctttatttactatgtggtaggcctaagagagtaaaagtaatatcaaagagttcttccgatcaaggagctaccactttcacatggcaaaaacaaaaatcagataaattgagtgctgaaaaggttttcatcatgatttttctcatcctttctggcctacaattttagcctgtctgcctacatttagcataaacttgaagaagagggaatatgtggaggaaggggatacaaagtcatattcagctatagtctaataaggttagtagtggccacagtgtatgtttattacctgaactttgattctgtatcagatagttggtgataagagttttggaagttccttcaaatgatctattacttaggtcaatggttcttaacctgggtctgtgaacctcaatgcaaaaaccatatatatattacatatataactatgtatagttatatagttatatatattacatatatgactatgtatagttgtatagttatatatattacatatatgactatgtatagttgtatagttatatatattacatatatgactatgtatagttgtatagttatatatattacatatatgactatgtatagttgtatagttatatatattacatatatgactatgtatagttgtatagttatatatattacatatatgactatgtatagttgtatagttatatatattacatatatgactatgtatagttgtatagttatatatattacatatatcactatgtatagttgtatagttatatatattacatatatgactatgtatagttatatatattacatatatgactatgtatagttatatatattacatatatgactatgtatagttatatatattacatatatgactatgtatagttatatatattacatatatgactatgtatagttatatatattacatatatgactctgtatagttatatattacatatatgactctgtatagttatatatattacatatatgactatgtatagttatatatattacatatatgactctgtatagttatatatattacatatatgactctgtatagttatatatattacatatatgactctgtatagttatatatattacatatatgactctgtatagttatatatattacatatatgactctgtatagttatatatattacatatatgactctgtatagttatattacatatatgactctgtatagttatatatattacatatatgactctgtatagttatatatattacatatatgactatgtatagttatatatattacatatatgactatgtatagttatatatattacatatatgactatgtatagttatatatattacatatatgactatgtatagttatatatattacatatatgactatgtatagttatatatattacatatatgactatgtatagttatatatattacatatatgactatgtatagtcatatagttatatatattacatatatgactatgtatagtcatatagttatatattacatatatgactatgtatagttatatagttatatatattacatattatgtaattttttcactaaactcaaactgaaaattagcatttcttccatcatgaatgtaggcagcaaaccacaggaatattagcaatacctgtgacttttcctcaataggaatcacacatattttctaccccattaaagttgttgtagatatctcaaaatattgtttctgtgtatcattactacaaaattactgtaggtcttgatcttattatttaatgcattaataaagaggcaaatatataactattttagttatctatggcagtgtaacatagtatcccaaaagttagtggcttaaaaccacaaatatttattgtctcacagtttctgtgggccagaaatctgggcttggctagttgggcctgctggctcagtatctggttttacaaggctgcagtctaggtgtcaggtggggctgcagtcatctcaaggctcaactgggaaaagaatctacttccaagcttacttacatgattattggcagtattcagttcatcacaggttgttggactgggggcctgaattccttggtggctgttgactggatctctctcagttccttgccatgtgggcttctctgtaaggcaggtcacaagacagcagctggcttccatgaaagcgagcaagtgagagagcaaggacaagcaagatggagcccagaatatttttgtaacctaatcacggaaatgatatcctaatcacttttgctatatttcctttttaagaactaagttactagagaagggaattacagaaggcaggaatactagaaggcgtggatcattggcagccatcttagatgctactactacttaccacataattatattacaaactcactttttagtattttggtaactgtatgttaacattatcaatttcctttgtaaccctaggtagtttatgcatttaagaacactgttttgaaaaggggtccatagaccaccaaaattctggttcatagctctaatttgtttcagttgaggtactttcaacaacttccccagggaaatttgtttacaatggtctcaatttaggagaatttaggaactagaggtcaaagtcttaggctatcccatattaacctagactgctactctatactagttcatattactctagtatggcacatttgaagacataaatttgctgtggaacaaaccatacactgttctcaatcttatcgtagcatttgaatggtatgtgtatgcgtgcagtacagggagaagggtgtataggcctgtcaagcttgtctgatcacaattaaacctcctatgcttgtatatgacaactgtcatttgagtttcaaaatgaccatataagtggagctgatctccccaaaaatacactaattaccaaactagagcttttcccactactaagctatgtatgaaaaagcacagtgtaagaaagagaaatgaggtaatgcttctttcctaggtgttttgctcgtgtcacctgctcttgggaaacctaaagatgacaggtggcatttctaagtgatagtttttgcaagcacagtaccagcttcatacgttgtctcagtaagctaaaagctaagaatattttataagacctccaatactcatattgaggataaacttgccaacaataattgggagtcattctctcatttggctttcccaaaggccagttttgtccccagacgcaaattgcatcaaccttcccaaagttgtcccttttgggtcatcctataggggagtgctcttctgcacaattctcagatcctactgataaagcaggccagtactgtagttattttagattttccaagaaaactcaaacaggtttttaatgtattttttgtggcatttacaaatcctggttcctctccagtctctggagtcccctcatggtgaaatggaagcgtcaaggaacctgggtggcttcgagtccccacagctaccgactgagcaacttagctgatccatctttgttgacaactgtttcccaatctgaaaaatgcgtgaattctctctttccatttctaacattctttgcattgcactgtttgaaaaattcggatgacatttagaatgtgactaatgtcgcaacacattaggccactctcaagagaggcctgaacaggtttggcgtaaaaacggcagtgaggtgaggctggtgagaggggaagtggcgacagttcagtcaactccctcaaaaccagtctggccttcaccaggcggagatgggtggggccgggaagaccggcgttgacgacagaaggctacttccggctgtggtgcgtatgacgtcagggcgagtcggaccgacccagccaccgagaagccgaggaggcaaggctcgcgagagttcagggaggccgccctgagattccggcgaggccgcgggtcccacctcccgggggcggggcgagggcggagcggggagaagggagctgacgggcgcccggccggctgcggtccgtgcggaggctgagccggccgcgggcgcgaccggaggcaggtgagttcgcggatgtagcgctcggctgagggcccgagctcgccgcgccagccccaactctgcgagcaggagcaggaggagattttaggtgtctttgggtgtccagggaaagccgggctaattctggggctggaaatgtctccggggaacctgcggcgacggccttggccctcttattccccggggtgatactggccccatgtgtccagagagggagcctcgcacccggggaggaatctttgtcctctgctcctttctccttccactccccggcccccgagcactccgctccgggtccccgcctgggcttcacaaacaataacaaatgtcgcggatcctctccgggtagccccagcgctcccgtcccgtgccctccagccgatgtcacccagagccaggatccgaagcatggctcttcaattgtgggggctgtttgtgtaccgttcctaaaaactgatgcgtcagattgccaaacatttctcaagacagactcaggaaagcctcccagctcctagaagccacggagcgctcaaaaccagtcttagaatctgtctttaccattgcacccgtagccccttcctttcaaaatcatttctcccactccttttttcacctttagtatcgaggtcgaacgagtggttatttggtgtgggagtagaaaagagtataaccgattgagtagggcacgtttcacctttaaaaagttgccaggttgacagcaaaagaacaaactttattttcaaaaccagtggcctccccttttactggtgctgcttttgttttgtggaatagcttttcgggttctaagtttggaggaatgatataaaaagaagtgggaggtggggggagggctagtggctctggaagtagtggcttgtccaaaagtaggatgctattgtttctcacttgataaaatgcagaaccaacacttttacccatttcacataacttgtgataagttttgagagaagccacttaattggaaatggcctattagcttattttactgctcaaatctgaaaaaacagctttaagtgatttaagttctgcctcttgattgtaagatggggattgatgagtgagaccttgtcttttttggcgctggggcttacgtttgaccggtctctctactttaaggcagggcctattgtacttaagcccatttttgcttcctcagtacagattcttgaaagttctttgtctcaatcatatctgtatataaggtactgtaaacctctttgaatttgattggcctttctctctgtgcctcaggatatgtaaaacaattaagtttattatactctctccccagtggctgagaggtattgtatgtgaattagccacccttgtgactatttgaggagagagaagttagtctaaaatattatgttaaattatgatattacataattttattgcataagttcatcaaactacttccatctgaaaaatcctgatctcaaaataggtaggtacaatgaattaaaaaatgttttggtttgacctcacttagctttgttttctccttgttaagatggctgataatgtttcccatttggttgtgatgtgtttagaatgagaagcaaagttgggtgtagtttttgtactcttttgaaaggccttgccactaggaatgaaaaaattagacttagaaaacacacattaaatagaagcagtttttctctagccatttgctcttgagtttgttttaaaataagtcaaagaatggagactgaggtgatttgtgccaacaaatagatgtccttgttagtttttatgctgaaaacttgatttctaaaggtaggacactgtaagaacaaaggagaaattggacttcctaaaaaatgataacaaagcaatggactcagttcagctgtttgctttcagaaaagttctgttctcttaaagtaaggagagcatcattgtgttagtgaaattggataacgcaccttagaaagtgcctccccagtgatccaggataagttggaggctcttttgtgtgtgtgtgtggcactttttgttaagagggagaaagggcacaaatcagagccagaaagatttgcatctcgatgtattgttaaaatgcttttattttatgtaaatagtgtcgggtgaatcaagcaagcatattgttgtctagcatccttaggattacattaaaatcagcagattggcaagttatgattaggttagacttgacatatgcagaaattatgcttctgtatttttatattaaaagcaccatggtctttttgaatgaaataatgaaagcaagcttttaagacataacttttttaaaaaattaaaaatctgtctttggttagtttataaacatgaagcatatcctcctcttcttccccccaaaatttttgtttaagtcttaagaaagtctttagcaaggtatgaccagtacttaagtgcactcactggttgcataagccttctgtctccaggtaaaagtttgctaattgacagggtattattgttcagaatctttagagggagagaaatgaaaggcaacggtgaacagtgtttgctgctctgtacactcggacgaactgtggttgctactctgtacactcggacgaactgtggttgctgtcttcaaggagatgtgatccagtgggagagaaatatacctacccaaataaataccatagaaaatgtgttttatgaggaagccaaggagggagggattaagtgctgctagaccaattaaggaagactgaaataggaaaaggcgtttctgtggatgatttaagtgatctagtcatatgataatgatgataagtaaatactttatataatgctgcttcctgctaaatcctttacatatattacttacttgcctggctttaatcctcacaacaactgtatggagtaggtatttttattattcccgttttgcagatgaagtaactgtggtactaaggttagatagctattgagtggtaggaccaggattctgacccaggcattctggcttgtacccatatggcatgcttaactgcaatccatattttctctcctgttcatgatggtcttcctcagatctgtagtttcaaaaacttgacttgggaaatacattcttctgacatctaaattttggggtcagttttctagaaagagttccaaaataacacccaagtaaatgagttatttttgacatgttattttaatccatttttggaagttattcttggtgcagattaaatataactattgagtgggactttttaataattttgacttattacctataagtactcataagaacttagaagtgagaagttattccatattaactcttttgcttaatggaatgtttgagtctttgtatattttgtcctgtaatttattttttttaaagaaagaacctcactgtcttgcccagcctggactcgaacttctgggctcagatgatcttcttgcctcctaagttgcaggaactataggcctgagccactgtgtttggctttgttctgtaattttttttttttttttttttgacagagtttaagtctgtcttttaggctggagtgcagtagtgcaatcatggctcattgcaacctctgcctctcaggctcaagcgatcctcccacctcagcctcctgagtagctcggactacaggtgtgcacaagcacgcccgactgatttttaaattttttgtagagacagggtttcactatgttgcccagcctggtctcgaactccttggctcaagtgatcctcctgccttggcctcccaaatgttgggattacaggtgtgagccaatgtgcccagccctgttctataattttttaaaccacttggcactggatagtttttgggttgaattatgaagttgaaatttagttaatgattgaatgttggtctcagcccttttagtttattttcatgaatagctatgcttataatggcagaaacagggtgaatagagtgttgtacatgtaaaaatgagagaagttccatcactgatactttatgttggggcaactttgacagttctttgggtttgtgaaataaagggtgctatagaagtgcacagtgtcttgtataggcctactcagtactgtaaatgtccacctgattttatttatgaagtttcaggaatagtccacatttgttattgtttaagaattggaatcacaaattcaattggatttaaaggttagaaaaaaagtatacctaggcagggaatacagcaggtgagcggtgggagaggtattgcctgccttttcctaactgtccagcaggatccagactcttcagcttctttgtcagtgcctgcagttgaccgtactcatagttaagtacagctccagagtcatagtctctgtgaacgaatataagtattctccacttgactcaatggggtaggttctagaagacacctatactaggacagttgatggttgatgagcttaaaacctaatgggaagagtagcagaactaaagccaggatttaaagcacgtgtgtttatattattgaaataagacagagatggcaaaacaaattttaaaaagtttttttttgaaacataccttaaattaatagtgatggtatatcatttccatttaccatgccctgattggcagatctttagcccatcatttcatggagatacttagatgtggacttcgctttgttataaaaagtttccaagttcttctaagtacaggtggtttgggaagattgtcttagtaaaaaggtgtgtgagtaggtctatcaaaagaaaaccagtcatactgttacctccttgctgattcaagttttgggggcatcttttcccaccaggaacagcttatctgcattgaacgtctgctgaggcaggtagcctgcctcttagatgagctctgcacagatcttagggaagaccttaacagttacaggtcatgtggtgacctgatcattcacagtcatattgtataaattccaaacaggcctggagccttggcaattgtctgtggtatgtgataacacttctactatgcttagcttttatttatttatttatttatttttgagacagagtttcactcttgttgccaaggctggagcgcaatgcatgattttggttcactgcaacccccgcctcctgggttcaagtgattctcttgcctcagcctcccaaatatctgggattacaggcacgcaccaccatgcctggctaagttttgtatttttagtagagatggggtttcaccatgttggtcaggctggtctcgaactcccgacctcaggtgatccgcccgcctcggcctcccaaagtgctgggattacaggcgtgagccactgcgcctggcctatgcttagcttttaaattcttaacaagctctttaccttccccttaattaacaccagatcagttggtaacccaaattgttgattctctggccatttatacagaaggcttcctgttttccttgccttttgctgattctcgttgattccacaggtatagaatttctacatgttataatagataaatctctgatcccgtatgcacagatagcatccattgttttcttacctctttgagttatttactatctctccagctgattcaggagattttattcctcgttttcctgattcctgggacacttttactgcttttgcagttcctgaatagggtggagttaataatgtttaacacctcaaatcagctacagatacacccagaataaagaacaagatggcagaaactaacatgagggcatgatagctaacccaggcattcggggttgctgtacctttgctatggagtctagctttcattctgtctgtgaaagtttagaaaattgagtttgggacagagaagcttctgcacacattaatgcctacttttcagggggccaagttctcccattgctattctgcttttatgaatacggttattgctattctgcttttatgaatacggttattgctattctgcttttatgatctggagattttgactgcatttctcttgattcctcaccaattcaagagacacagtaagtaatctgaacatttaatatgaagcatactttgtgtaatttatatttctcaaagtttgtctcccagtggtaatatatagatttagctccctgaacatcatctttccctcttaaatgttcttgattcctttttctttctgaatgtcacccattagggcacaggtctgataattttatcaatgccagtaaccacttatcccttactatgcaccagacatagtgctaagtactttatatatattatctcatttaatccttatagcaatcttgtgagttattatctctacctacaaatgaggaaattggagcttagagaggtgaagtgacttgcccagggacacacaggtagatagtaagtggtagagttagaaattgctccttcaggccgggcgcggtgactcacgcctgtaatcccagcactttgggaggccgaggtgggcagatcacgaggtcaggagattgagaccatcctggctaacatggccaaacctcgtctctactaaaaataaaaaaaatagccgggcgtggtggcgggcacctgtagtcccagctgctcaggaggctgaggcaggagaatggcgtcaacccgggaggtggagcttgcagtgagctgagaccacttcactgtagcccagcctgggtgacagtgagactctgtctcaaaaaaaaaaaaaaaaaaaaagaaattgcttcttcagatcaggtttgctctctcttacgttgcattattttactacaaaaacttctccttttctctttaatttacctccctcttctagtcccaccccaagttttctttcttctcttttttcccttccttttttggtaatttcccctttaggagttatttacagttttgcatgtcagacataaattctcttgggaaaagtatgcagaaataattcaattgtattctgatttcttatagacagggatttactcttagcacttattttaagaataataccaggagcccttatatttgtattacactttatagttttatgaagcatttttacacatttccttacttaatcctcatagcagtcatgtggtctaggcagtgagggttatggctattacacctattttcaggtaaagagaggaactcagattaaagtgacttgtctgagatctcaaaataagagacagagcctgaatttaaacttaggtctttcgactctaatataaacactttatttaacacactggtcttccttgtagagtaaaagctgctacaagcaaatcgttcactaaggcctctacaaaattagttgatgagacaaggtttttgcccttagcaattacagtgctgaaataaatgatataatcaaatgttctgacttcatttaagccaattaggagtgggtaaatatcattatagcatggcattttctaaagttttaagccttgagctttgttttgttttgtgagaattgagaacctggaattttagttctgcattttaaatcatgaaatgttaaagtccttaattcttaagttattgtctatctcattgtgcactcaattgcttacattctaactaaaacaattatgataaaggaatagggtgaagggaggacagacataaacagtgaaattaaggaattgggaatcctaacaagggcttgctgaggtatcttacagtagcacttttttttttgagacggagtctcgctgtgtcacccaggctggagtgcagtggcgcgatctcagctcactgcaagctctgcctcccgggttcacgccattctcctgcctcagcctcccgagtagctgggactacaggtgcctgccaccacacctggctaattttttgtatttttagtagagatggggtttcaccgtgttagccaggatggtctcaatctcctgacctcgtgatccgcctgcctcggcctcccaaagtgctgggattacaggcatgagccaccatgcccggcctacaaaagcacttttgtagaaaattgaatatgatccttaaaagaatggataagctgcaagtagtattcacttctggaaagtgataatgtttgagagctcagacagcttattcaatgatccatttttgacatactatcttgtactagtgtctgttttattaaattaatttttactagcagtgttcatttttacttagttaagtgtctacccactgacctgctcccattgtggaaataccacaccgtgtttgccccttacgacttttctgtatttggcagcagaggctggttgctcagtttattgtagtactagggagttgccctttgttgtgtttttcacaacagcgatccatttcatttgaacattttcagatctggttgaggatgttctccatatgtcgactcttatctagacaaacagaatagactttttctatttttgtggctagagtggaaaattttagtactgaattgcatgtatatgacccattgatattcttgatactggcaaatcctaaaggaatcacagactcataatattttagtgaggttaatcatcataattcattatttatcagctatttgcagggcactgtgttaggtaccatggcaaaatagagacaaatagatgtttggccctccatttagaaaagttcagtccagtaagaggtataatgtatgggtacaaatgactgtaattcaaacagaaagtgacaacggagtaacagggtactgtgggagcagaggaaagagagattgcttctggctgtagagattaggaaagcttcctatatgaagtgaaatatgaattgagcatttcagagtgaaggacatgccacgcagagggattagcataaattgggtgtatctgtacagcacctggtaagttctgttaattatctacttctctttctgctctgttggatttgaaccctttgaacttagagaattgatgttttccagcttttcattctctacttcaccacctgttcaacttggtacattaattacttagagttgtaagtggcagtagtgtatatggagtgaattcaaggaaagagagtccagaaatgggaagaccagtgaagagacaaataatctaggtgataataatgaagttctaaactaggtgagattgggaaggagagacttgcatggatgggtctctcctttctagtgaaagaacctaggcagttctttcactgtgaattgtacataaagtacataccgtgtgccaggagatatggaaagggaaagacatggtgctccctcagaagctgggcaggtgactggagagctacattcacaggggtagaaatagctgcaatcaggcatagcagctgtcatgaaagagcagtgagaggcacacctaagggagaggggcacctacttgggatagtgagagaagctttccaaggatgtgtgagtgtttgagcttagacttgaagggtgaggaggagtgtttcaggccgagaagcctcaggcgggtattatcacatagtgatgtaagacacgaagcatattagggggccacaggaaccggaattgttgccgtgatgctggacaggagcaatgaacttttatttgctgtctatttatgtttatccagctttagcactctgagcttttgtaagaaagtgtttctgttgcctctagtagcctcttggaagcacctcttctgtgcttctcactcccaacctggagtgcagtgctggtgataaattgtctcttgcttccattttgtgaaattaaacagaaaaagtaaagataccatcagccagagagataaagagaaaagtaaatccactaaaatccttttctttgatgaagcctagaaccaccgaggttgttgtataaagagaatgctgcatcaaagcacagcttcaagagcacctgacttgagggaggggattgtggtaggaacatgattatttacctttcccatagggttttatggaactcttaaacatttcccaagactgtaatacctaataatgaagtccttttattctagttctagccttgattcttttctcctctctactctaagccttattattttttaaaaataacacagtttaataactaacatgaccctaaacttcagatggtgtcaaacatcatctctggtcctcctctatccttgtttggtcattcagagacctgtatgtgcaaatcgttattataaactttgtatgtataatctacgttagattgctagagataaaaagcactacagatttcttttttacatagatttactttctacagtggttatttttttttctgtcctttggattggaccactgaaacagaatataaagttgttttctaaggacaaccaaaaagttaatggtagtctctaattcaaattatatccattgtatttctaggccagcggttggcagctgttttggctttagtgccattactggtaatactaaaagattatgggcactctcaggaggaaagtgaaaggaacagaaggaggaaaagcgggcttgtggggtggtagtggaggcatagagagggggcgggagaaaaagtacatatggttaaaagagatcaagtacctccacacctcttccaggtaccacttggtaggaccagtgccatatttaaggattaagttgaactcccagcagtcctgtctgaaaatactctggttgtatttttatgccaaaaatggcagtttcttttaatcaaacatttctggatttaatttttaaaattgtatatggaccagtgtctctttatttttagaattgagcagaaaaggagacagaaatcaacatactttaaatatcaatgaaaattataagcacatttctgaaatgtagttaaagctttaagatctaaatccatagattagccccattgtatagcccaattcaggcacaaggtggcagaaagtaaagggatgaatagctgggaacatgtgtttgaatttttaccgtagtaaaactgcattttcatactaaccaagagtgtaactggacccacagaaggaaaaatagggctaagaaattagagcctgtgcttttctgtacaagtaaaccaagtactctctccctttcagaaaacattatcaaacaacaaaaaatttattttttagaacttacacaagatattggactgacaaagccaaaaacaaaaatacttaagattttagcttttctgtaatagtggtgaaaagttatttctcagattgtaagaaatactgtcttgaagtttttgattgattttcagagttgaaagatgctttagaggtcatctagtccaactctgttgtgaattccctgtacatcatctccaacaagtggatgtttagtctttgcctaaatatttaagttccttgcctaaagacaaggaacttaacagatcataagatagctaactttcattcccttaaatggttaatgtgctcttttgtccccaatcctcttctcactccctgcactgtgagtgtgggtgatctcatatgctgtgatatcttcaataacttctctgcaatgatgacttccaaaccggtatatcttgctcaggtccccgtcctgatcttaagaccccattgtccatctgtcttctagatatcaccacctttggtgtgttccatggataacttggattctgctcacccagagctgactttatcttctcccttcacagagccattcttgtgctccttagctttcccagtgcatggcgttgttctctatttggttcttaagctgtaaacctggaaatcacccttgactcgtcctccttgtttatgactgacatctagtcattttttaggtcttccttaactatgtcttgaactctgcctttgctcttcctccagtgccagaatattcattcaggtgcccaatgattgaactagccatctttccctgctaccagtcttgccttctttcagtctgtcttccatgtggctgccacaatgactgtcctaaacttgaatctcattatgtaactttcatccttaaaatttctagtgactccccatggcctcttccaggctccttagtgtgacacatgagttcctttttagttttccagccttgtcttccatcactcccctactcacctctccaaccacactgaaccactagctttcttgtaccttcggtctcacacactactttctggaatgccctttcctatacttcttgggtaattcctgtgctttctttggtattctgcttaggcatctctttcagggaggcctgccttgacctcttacctctggcagggttaggtacctctcctaggctttctgacagtgtctagtatgtatttcttttatgttttttaaatatccaaactacagtaagaggtaataatgttgggcatttactatatgtcaaaacttaatgagcatttgctatgtgccaggcataggacagtgctaactggaaagtgtttccttatataattttcaactggttctcatctcagaattagagataattttatgtcactgcaagagtaatatttgaagatggctatctaacatctctctttcaggctaagtatcttcattgaatttgttcaaatatggatttcagacctcttgccttcctggtcactcccctccatgtgttttattttgttttctctcttaaaatatgtggttccgttttacatcaaatagaattgtcataaaggaacatagggcttctcagatggatagaagctggatatggattgtcatatttaaggtatatacctcacttacctaggtcgttagctatgaacatttttctgaacattttccagaagtcactagaattacgggaatttacttatagttagcaagtgatggagagactgacacaaaaccaagaatgccagttagtgaatttattaatataactgtgagtggaacagaagcttatagtttggtgagcacactctcatcactataggagaatctacaggggaagccagcccatgtaatcaaatgggtaatcttaatggggagtgtcactaagtcaggataacctgatggagagtctttataaggatgcagctgtccagcgctgctctggggatatggtcagtgtgctttcacctcagacagtgttggggtcacataggcaaagtcttccttgttaaactcctgctctgcccccactacctcagattaatataacctccttctgtcaacatagttgacaaggtttcagctttcttaattcacattccaatcctgtctcccagaaactataacctactcacttttgaccagacttgggtatccccggcccttttcagtcacacattttcttggaattacttacagtgatggctaaattccatcactctatttgattcaggctggtgttactcccagaggatgacttaattttcaaattatgaggacatttattttgccctttgtatgactatagggcatcactaagtattgaataatttctccagatatgagccaactagtacagtgtagagtatggcattcaccttccttgtgcatgactttatttatatgtgtgtgtcaactcagcccaagattaagattgtataaattttaggggcagccatttcacactttaatttatgtcaagcttttttttttttttttaagtggagtcttgctgtgttgtccaggctggagtgcagtggcacagtcttagctcactgcaacttctgcctcccgggttcaagtgattctcctgcctcagcctcccaagttgctgggatgacaggcgagtgccaccacacccagctaatttttgtatttttagatggggttttaccatgttggctaggctggtctcgaattcctgacctcaagtgatccacccacctctgcctcccaaagtgttaggattacaggcataagccaccatgcccggcctatgtcaagcttttatttgaaaaaactctttagttctttctttaaaaatgtaatttaaaaaatattttaataaagacaggatttcgttatattgcctaggctgttctcgaactcctgagcttaagcaattctcctgctttggcttcccaaggtgctgggatagttgcctttttgtgtgtgtgttttgagatggagtctcactttgtcacccaggctagagtgcagtggcatgatctcggctcactgcaactaactgccacctcctgggttcaagtgattctcctgtctcagcctcccaagtagctgggattacaggcccctgcctccatgcccagctaatttttgtatttttagtagagatggggtttcaccatgttggcaaggctggtctcgaactcctgacctcaggtgatgtgcccgcctcggcctcccaaaatgctgggattataggcgtgagcccccgtgcctggcctggttgcttttttatgtatacaacagttttcacaatttgtatttagcatttgatttttttaacccaaatataattctttacattttctctattaaattttatttgttacagttaatattctgttaaaattgttttagatctgactctgctctcctttttttcattattctctccaggctctggtcatacctacattttgataaggatgttggaaaaacttttatccagatcattggtaacactattgcctaagcccagtgaatattgcagaacttatttatgagcattctgagttttgttatttaattggttatgtatatgtgttactcagcccatctctcttcctctcagaaagaaatggagagtggagcttgttaaatacctttcagagcatcacatagatttgtcttatagctttgccaacaaaagaaataaagttacttggcaagacttgttcttcctgaacctacactgattctcagtgattgcccatctttgtctattcagaaactgttttataatcatctaggattttcttccggctgaatgataaacacagagttaatcttttgccatgttcattttcttttgttatgtttgtgttttttcctcactctgaaagatggagtactttgtctcctgtcttaacctctttggtcttcctgacttgttaaagagttatagcattcagcaaaattcccatgcaggctcacagtagacaactggtcaagtcagatttgcagtgtgtcgggggcaggtcttttatggccgcttcacgtgtcatgggcatcagttctttcatcctaacgcgccactttttgctgtcgttctcctagactgagaagagaggcagggattgagtgatggacactggactggaagttctcttttataaaataggcgtcatacctacctctccaggtagaaatatgtaaaaggtctttgtaaactgtgagggggtattcaagtgtagaatttttaaaaagcaaaatagaagtgaagggtttctttcccccccttttttttcctatcatgtattaactacaccatttaccttaaccaacgtactcagccttttgtgtataccaggccttttgtaaactttctcttccagacataaattcaaaagtcctttttgtagcccttgctgattttcttaagttcagctcattgtggacattttacttcctgataccatcctgtgtttcttttataggcatccatgttatgtgtccctcctttctttttctgtgtctttgaaaatctgagttcattgaagagctctttgtgcagccagtcttttcagaatcttcccattttctgtcattaatatcctttgcagtttatagccagaactctgtttcttatatcaagttttaatctttttgttgtgactagaagaaagaggataggagcaatactggttttatgtcagtctgtccatcacttgtttggttatacaagtcccccaccaccaccaccaccatgtttttctgactcattctccttctttgtctctttttttcatctttcttttctggattcttcttgtgatataactaggaattattctaaagctcacaagtttcagtctggtactttatcagatcatgtatagatatggaacatttcccttgttattcttttaaattcattttcaatttataatttacttccaacagaacaaaatgacactgtcttcagggcaataatcatgtttgccttcctttgtatttttctcataacatctagtgaaagtaggtatttaatacaagagagcatttagtgaaagggaacctaataagtgtgaattctcatgggcataattcaggagtaatccaaagtccttactgtctttgcggggttttacacgttcttgcccctgtcacctctctgaactctttcttaccactccccctcactctctctgtgccgtactgaactccttgctgtttcttactgcatacctctgcttcagggcctttgcacttaccatacatgctgtgtggtactctcctcccttcagatttctaaatcattctttttcatctcattcaaacctccttctcaatgaaaccttctgatgtccttatttaaaattgtaatgcctctcccagcccctatactttctttccatcccctcgccccactagaatataagatccataagggctggtattttgtgtcatttgtatttttatacggtgccaggaacagtatctggcacatagtggatgctcagtaaatatttgttgaattaattaatcaaggctagtttaactagacttctgttgttgagagcttcctaaaacagatgactcatctttcttttttgagtctcaggcaggacttacttttcttttctctgaacattttgtaatttttgttgcctaattgtgtcccatgtttccattcccagctattgtaacaaacttgaaaattccatggtaaattgctctccggtttcccagtacttccatttatcatcgaatttcttcccagtggtcacattcacatccagaatatttcttttcctatttgagaggtggaagggttagcaaggcatttatcagagacattgattttagctgtgggagaattctagcggctatcccaaaagttggagtccccatcacagcttatttgtgtcagcctcagtctctagaataccagcaattcttaatgcttctactttccttgcttttgccctgttctagtgcagagtcccatttcatcaaatctcagtgatgcttaatagtatcatattaacttatttgtaaattgtcagttttctttctttgtttaatacccatattctgggcatgggtttccacagacctgagaccactttgttgctaacacctttcccatttgtttttctgcaacaaataattgacccaagctttcccattattttcagttttctttttcagagcatgcccagccagcttctttcattgttacagtaatatctgaactttttgtatctcttcttccattttcagcttaaggtctacttgatcagttaatcaaaattacatagtgattagaaaaagctcaagatccatcaccattttaactgtgtgacctgaaacaaatttcttaagttcttctctaaatttgtttttgtatctgtaaaatggggagtggagagcagtaatgcctgcttcttgagtcattaatccttgctttcagaattgagtgatatgaagatgatgatgataaacttttatgtagggtttactatttgccagatgttgttttaaaagccttacatattattaactaatacagtatatatggcatacagttctgtttattagcatatgcatggcatgtggaagcagtcagtaaatgttagtttttattagcagcagcggcagcagatctctgggtaaacattcttttcttagtttttgcaaggtatacttcctcaccagtgaaaagtctgttacagatgattgtatgctgtggtatgaatcagacgtttgtgtaccatttgtaccatttttgacgctattcatttgctataagaaaccacagaaatctcacaatagtcccttctcttaaaaaattatattttaggattagagcccagacaataataatgccattattgagaagccagccattacacactgaaactaaatacaaattatgtctttaaagtaaaatttcaacttttaaaaatagaaattttattgaaaattagtttttataatttacatttagtaaattccatatattttcactgattcagtacaaaatgttcaaatcaaaatacctattgagaaagcactatagaaactttgctaggtattaacgttaaaaatcgtaaaacattacattttccatggcagaaaactgataaaatcattgagtagtcaatttctgaaatgtttcttaattttagaataatatgggtaaacagccaggtgcagtggctcacacctgtaatcccagtgactcaggaggctgaggtggaaggatcactcgaggccaggagtttaaggctgcagtgagctatgatggcaccactgcactccagcctgggtgatggagtgggactctatctctaattaaaaaaaaaaaaaaaggaataatatggatagatgtatttaaagtacactaagaataaaacaaaatatttgttatatgtagactctgagaatttttttttttttttttgagatagagtcttactctgttgcccaggctggaacgcagtggtgggatcccagctcactgcaatctcagcctcccgggttcaagcgattctcccatctcagcttcccgagtagctgggattacaggcgtgcaccaccatgcctggctaatttttgtatttttggtagagatggggtttctccacattggccaggctagtcttgacctcaggtgacccacccacctgggcctcccaaagtgctgggattacaggcgtaagtcactgtgcccagccaagattgttttgatagaacactttgtgtctctctcaccttgtatttagaaaagttagaaaataaaggataatgtatatagaaagctttttgaagactcttaaggagttcataaatatggggcactacgactatgcatatgaaaatatttcttatcagttggcagttaccacctcttacagtggcatgaaacctcttgagttaaaccaaggctcagtgagatttggtgatttaggtagtatcactttatgaacaagcaggtcttttattttattacacttctctttgacattcactccagttaaagaactctttcaaaagacctcatgcctggtctcatggagattgaaaggtgtttgagtccttccttattatccccttggaagatgctttgaggaccccagtgatgaatcgcaagaactctgtctccattatccctggtatagggcacctcatcactctggtgttatccctaaagggccttcatcataatgtgcttaaagagtcccctattatgtcctttaggatggagctttgacttgcccaaattgctatgtacatgttaaagagaggctggaactgaagttggtcatttctcactggatcagtcaacaagatttgagtactttctgtgtgctctgcatcattctgagtactctgggggacagaataaggcatggctcctgccttcaaggagtatggaatttaatagaagatgacaacatacatgattgtaaatctgtctacgtgagagtgcctaattgtgagattcctaataaatggcaagatatgttctgaaaacgtgaaacataaatgaggttgaagaaattgtgaaaagtttagcagaggaggaataattcgtcaggttctttaaatacaagtaaaggggaaaggaaggaccatttttaagtttagatattccaagggttagtggtgaggttgattatggtatgtcttctcgttgatgagggaggagactggcgaatagtggaaaataaagttaaatagctagggtggggccaaattatgggttttaataaaagccaggcatagaaatttagattggggtggtagaaaaaggaaggctttaaaagtttttgagccaatgaatgacatcatacaagttctatataaagagcagtgatttcaggatgggagagaatggcatcaggaagacccacttgaatgctggtaagtaatgttactaacagtgccattagtaacattaatgttactagggcctggactgatatgctgatggaagtgagaatgaagaataaggtgggatgaaagagattttgacaagaggtttttaatgaacctgaaatgggaatgggagagattaactaagcctgcttgccatggacagcaatggggttgctagaagattagctgtgcggaaaaagttatgcatttacctttgggcataatgaaatgcaattgactctccatattcatgggttctgcatccactgattcaaacaactgtggaacaaaattgtcagaaaaaacaatacaatgataaaaaatgatacaaataaaaaacaacatggtataccaactatttacatagcatttacatcgtattaagtgttattaagtaatctagagatgatttaaagtatataggaggatgtgtgtaggttatatgcaaatactacactattttataccagtaacttgagcatccatggattttggtatacaagggggatcctggaaccaattccccatgcatatcaaaggatgactgtatgagttatctgtaaaaaaatgttttggttgaaatgtttagaaaacagctagacaagactggctgttggatgacaaaaacataggactaggaaattcaggtatgctactctttttgagtattgtttaaagccataggaaaagagctctctgtgagttccaaggcagatgcaaggactggcattcatgcacagcttctaatagataaatctgaagagttcttagtatgcatgttgactgaaattactttagaagtaatttttctcctggtgataaaaggcatgtaaggctgttttaggaaattgaaaaatgcaaaaaggtatgaagaaaaagaaaagataatcattaatagtactttagtaaacaagatttgactaaagatatggctttccttccgcttgttttcttatgcatataaagggataggaaatatgtatgtgtgtatgtgtgtgtataggatcgtgcactatatatagcttgcttctttttccattatgataattttcccatgtcatgaattacggcttgcaagtgcttattcttaaagggctgcattatttttcattatttggatttattgttatttaattggagctctattattgaacatttagattgcttccaaaattttttgctcttgttaatatattgtaataaacttctgtgaaacacatactcttcacctgctacttacatatgacttctgtaagcagagacctctgtatccccaggacctagaaggttacctggacatagtagttgcttaattaaaaaaaattattgattgaatgaaagaagactattaaatgttcagttcttctttttttattctgattccctgtgtatccaggggcctcttatttggctgcatgtgtgagtttggctgtaatgaaagtattggccatgtatgaccataaacaggcattcctatttctgtcacagttatatttgtcattctgtattaatatatctgtatcctgatttctgttgaagcatgattaattttgtttgcttctaagcaatgtagctaccctattgatgctgataaaaataaatttctgaacctataaggctgaggattgggcctaggttgtggtaaactggcaagataatggatgctaccctctcaagagccctctgaagagaaaagtctgctacccttcaccaggtagaaactcctgacagtgccacattttccagtttgactccctgtgataccctgaaaagacagatgtttgactcttttcaaataatattttaacatattttaagacacaaaggcattgtgtcagacttttttcttaagaatatatattgttgccactcagaagttagcttccaaaagaaataagtgtgtgcaaaggtttacgatagtggtatagagaagtttttaaaataaatgtgcatcttttcctatagtaataaaagcacattatgaagaattttgtaggtccagtccacatattccctgtgcctggggaaaactttagtagaaaattagataatttataatttgattcggggaagtctagtggaaaaactttttaatggagcgatccaatttgaaacatgaatatctgtgctggaagcttctattgaactttacttaagtaacatctaagaccctctccctgtcagtccgccattaccctaacagtggtagaaattctttatattacacctagatctttttttgttgcacttttaagctgtgtaggaaacacattgcccacatgttcatacaacacagagtgattatccacttagttcctaaaaagttgtatttagttatggggtttgatcccacttgtccaggatttaggtcagctactgaagattaggatatctgggtacctcttactggagaatccattcctgttttcatttcattcctgggggcaatattcaatctggtgtggccctctgtattataaaatgtttcccagattgtgtttatctgaaatacaaatccaagaagaagcatggtgttaattgccgtgtaaaaaagattccagagtcaagagcttgagaagttctattccttccttcataggttcagttgtttaacccagcatttttcaaacatattttactcctagaacctgtttttcctcagacatatttaagaaaaaagcgttttgtagaacacatttggacaaatgatactttatatcattgctttgttttttaaattttagtttgactcaattttacagtttcaggattttgtttctgtttcaggttttaagcttttcttttataaatagttactttcctagtctgaaatctatacattgtttcagtaatgaattcattatgtaaatttgcccatcattcatctaaagggaataaacgttaaattgtttttttaaattttgacttgtgtcacatatgagaatataaagtatatctgtacaataaaggaaaatgaaacatcaaagtatctacctcaggttaagaagcagaacttggccgggcatggtggctcacacctgtaatcccagcactttgggaggcagaagtgggaagatcacttgaagccaggagttggagaccagcttgttcaataaaggaagacctcatctctaacaacaaccacaacagcaaaaaattagccaggcacggtggcacatgcttatagtcccagctactggtgcagcctcgaactcctggtctcaagccatcttcccacctcagcctcatgttgtagtgaactttgttatgcagtgtctcctattctacatgtgcaggagtatttttacagtatgtacctggagtggaattgcttggtcattgggcatgtgtgtgttcagctctattgagtggcatcatactgttctccaaagcagttgtaccaatctacaccctcaccagcagtgaatagtcttcccattgttcttcctcaatgaaactagatattcacagccttttaggtttttcctagagtatgaagtggtatctctttggggttttaatgtttatttccctgattagaattgtagttgagcatcttttattatgtttatgggccatttatgttttctcttctgtgaaattcctattcgggttttttgctcattttaaatgttgttgtttgtgtttttcttatataggaattcttcacgcaatcaagatgcacgtatgttgttcagaatagtacctgagacatagaaacaactttgtaagaatagctatcattacattaccattgtatttaatcctttgtttttatgtgttacaattatcttctgctaatttgtggcttatttttcattctgtgatgctaattttttaacctagtattctattattttaaaaatacacaatcttgagtagtctacatgttcataaccatgacatattcatgttgcatatgttctgtgtcataacccagaannnnnnnnnnnnnnnnnnnnnnnnnnnnnnnnnnnnnnnnnnnnnnnnnnnnnnnnnnnnnnnnnnnnnnnnnnnnnnnnnnnnnnnnntatctctttggggttttaatgtttatttccctgattagaattgtagttgagcatcttttattatgtttatgggccatttatgttttctcttctgtgaaattcctattcgggttttttgctcattttaaattttgttgtttgtgtttttcttatataggaattcttcatgcattcaagatgcatgtatattgttcagaatagtacctgagacatagaaacaactttgtaagaatagctatcattgtattaccattgtatttaatcctttgtttttatgtgttacaattatcttctgctagtcggtggcttatttttcattctgtgatgctaatttttttttaattatcctgtaagttttagggtacgtgtgcacaatgtgcatgttagttacatatgtatacatgtgccatgttggtgtgctgcacccattaactcgtcatttaacattaggtatatctcctaacgctatccctccccctttccccccaccccacaacaggccccagtgtgtgatgttccccgtcctgtgtccatgtgttctcattgtttaattcccacctatgagtgagaacatgtggtgtttggttttttgtccttgccatagtttgctgagaatgatggtttccagcttcatccatgtccctacaaatgacatgaactcatcattttttatggctgcacagtattccatggtgtatatgtgccacattttcttaatccagtctatcgttgttggacatttggcttggttccaagtctttgttattgtgaatagtgccacaataaacatacgtgtgcatgtgtctttaaagcagcataatttataatcctttgggtatatacccagtaatgggattgctgggtcaaatggtatttctagttttagatccctgaggaatcgccacactgacttccacaatggttgaactagtttacagtcccaccaacagtgtaaaagtgttcctatttctcaacatcctctccagcacctgttgtttcctgactttttaatgatcgccattctaactggtgtgagatggtatctcattgtggttttgatttgcatttctctgatggccagtgatgatgagcatttttccatgtgtcttttggctgcataaatgtcttcttttgagaagtgtctgttcatatccttcgcccactttttgatggggttgtttgtttttttcttgtaaatttgtttgggttcattgtagattctggatattagccttttgtcagataagtagattgcaaaaattttttcccattctgtaggttgcctgttcactctgatggtagtttcttttgcagtgcagaagctctttagttgaattagatcccatttgtcaattttggcttttgttgccattgcttttggtgttttagacatgaagtccttgcccatgcctatgtcctgaatggtattgcctaggttttcttctagggtttttatggtttttaggtctaacaggtaagtctttaatccatcttgaattaatttttgtataaggtgtaaggaagggatccagtttcagctttctatatatggctagccagttttcccagcaccatttattaaatagggaattgtttccccatttcttgtttttgtcaggtttgtcaaagatcagatggttgtagatacgcgacattatttctgagggctctgttctgttccattggtctatatctctgttttggtaccagtaccatgctgttttggttactgtagccttgtagtatagtttgaagtcaggtagcatgagccctccagcttttttcttttggctacatgttcataaccatgacatattcatgttgcatatgttctgtgtcataacccagacctttctatctttttttatttttgaaatggagttttgctttgtcacccaggctgcagtgcaatggcgtgatcttggctcactgcaacctttgcctcctgggttcaagtgattctcctgcctcagcttcccgagtagctgggattacaggcacccaccaccatgcccggctaatttttgtatttttagtagagacgttgtttcgccatgttggccaggctggtctcgaaatcctgacctcaggttatccgcccaccttggcctcccaaagtgttgagattacaggcatgagcagctgcacccggccaactttcaatcgtaagtacccttttttgctgctgtttctttttttgaaccccaggaaaaaattaactaatttaatcccgtattcaaactgctacaattttattttcagtgttgtcgcctgattgtagatgcatttgtctctccgaatgtactgggattatttcgaagacaaaacatttttggcactgtgatttcaaaagtttaatcttaagactttaggagctacctgaaatctgcaacaattgcctataagagatccaaatgaatctttttttattttttagtttggagacagtgtctccatcacccaggctggagggcagttatgtgatcacggctcactgtaacctgtacctcccaggcccaggcgatcctcccacctcagcctgccaagtagctgggtctaccagtgtgccaccacacccagctgattgattcttatttatttatttatttattttgagtctctctgtgcatccaggctggagtgcagtggcgtgatctcagctcactgcaacctccacctcttgggtttgagcaattatcttgcctcagcctcccgagtagcagggattacaggtgtatgccaccatgcccagctaatttttgtatttttagtagagatggggtttcaccatgttagccaggctggtctcgagctcctgacctcaagtaatccacctgccttgggctcccaaagtgctgggattacagacgtgagccaccgcacccagcgcttttaaatttttttttatggagacagggcctcgctttgttgcccaggctggtcttgaactcctgggcttaagggatcctcccacctccacctcccaaattactgggattataggtgtgaaccaccatgcctggcttgaatcttaaactatgattttagttgaatctttatgatgttatttgtaatatgtaacttgctgaccaaactatctatgaattacttcctttggcttagtagagagatcctaattatcttttggtagatttttccacatattggaggatgacaaaagggacatgttaacagtgtaattgtaaaggtacagtgatgatagcagtgataatgataatgataatttcttcaaattgacccttatcatgaatcaggtactgccctaagtgcattacatatattaactcacaacaatccttttgatctatgagaaaaccaaggcgcaggcagatttagtaacttgtctaagatcacacagccagcaggaatggaattagggattcaaagtcagccagtctagttgcacagttttagacgtagattcataggtatctgaagaaatactaattcatttttagttttaaaagaattcacctaagactttgttttttaaatgtgatgatgagagaatgggaaaatacattttcattgtggttggtggggtccagtacttttaaggaaggagcaaaacttggagctggagttgcctaatggaagtgtatggtggatcaggctttcattatgaatagttttggttcctcatgagtggatgctggcctctgaaggatttcagaaaattcatagcttgtaattcaatttcctatatatgccatatgcagatgtttggggggtagttagtagagaatggttttaaatattccacagaggactccgattggtttttgagcttggatagttactgtgcagttgagatagagccattctaaaagactacagctatttgggagacagctaaccatatttgaaatgtgtctactcattagctttatttttgtattttttattttgagacggagttttgctctgtcacccaggctggagtgcagtggcacgatctcgtctcactgcatcttccgcctcatgagttcaagagatcctcctgcctcagcctcccgagtagctgggactacaggcgcacaccaccgtgcctggctaacttttgtatttttagtagagacagggtttcaccatgttggccagattggtcttgaactcctgacatcaagtgatccacctgccttggcctcccaaagtgcttggattataggcatgagccaccgtactcattagctttaggttaaaaatattttcctcctgtgaatctttattttggattttaaacgctctcattggttcaaaaagcaactttcattaagttgctgttactgcttcggctcttggctatttttagatagagttttcactcagctgtggtttgtttacttagctgtaagtaaatataaataatacaacgaattaaggtcaattcatttactctaaaaattgtagggttaaatggctaagcaaaaagaatgagacattatagctccttatccattccgttttgagtagaattagcacagcgttggaatgaccatgtataggaaagatagtactgaggtgatctgctgtatggtattatgctgatgaattagctagggtgtgtatattagtgcaaaagtttaagaactttgccatgcgatttaaatattatgctttgttctccttttgatttcccctcaaggaaggactgggaaagtagctcttttccctcctttatatggtcataataaaggattgcaaattaattagctgcattcaaggcatcacacagattgaattccatatttgtcttggagggaagtccagacttctgcctggggtgactgaatctgctttgtgagactgggtgcaacttccgtgtattcaagggtgggatcatcttgtcaacagccaaatatcttacaagatgtaagtcacttagaagaaattatccccccaaatgtggtttgtttttaatgtttctttcaaaacctctttcccccaacacacacagtgcagcagagaaaagttgcacctgcctgctacttgacagtagattctgtgatgattgattgtaggcattgttttctgtgtgggttgggaacagaaaaatgctctttaaccttttgccaggtctctgataagtactgaaaactttggcagttaaatgtggactgtaaaacacatgaagaaatactggaaaaacaaaaatggactcagattaaaaagctgaaatgcattattttctaaactagttcctttggggccttgattgtgtcagaaatacttactgatttttttcttttttttttttaagatcctcatgacctttatgctatgttgacaaagccagtttgtgtttgatatttttttcttccttattttgtatgtttatcttttttcttttaaacaagggcggagattttctactttattgatccctgtaagtggctatgatttattttatggagaagaatgggagtattggaggcagaatgggaggggtcctggactgggagccgaatggtgcctccgtttctatatgtgtgaccctagacaaggcttgccaaacacctgcccacctacgcatggcttgggagagcagtactgaatagtggaagagtcctaggctaatgagtgttgacaggcttgttttggttttataacatttataacatacacatctctgagcccattttttctgttgcaaaatggcagtaacattatttaccactcgttagggctaatgtgaggatcaaaaccaaatgagataatgtatataaagtattaagcatattacctaccacataattaatgtatagttaattatgaattatttatttttattattgtcaataacagagtgttagcatttaataaagttctgggtatggaatagaatgatcagatttctaggttttgacgtttggtactatagcctcactgctgagaaaatctgggaagtataaggaggtaatggttaaaagataggcagaattttctaatttcagaataatagtcattaacagcaggacattgtctagataatctacctttctgtgccttactttttatctttattcaaatgaagataatatgttttgaggaaacaatattgctgttgttttgtagaaattgaaacataagtacgtgtggtttgtggcactgaggactgactgattgcttctctctgatacttcttttagaaatgccctttttgggccgggtgcggtggttcacgcctgtaatcccagcaccttgggaggctgaggtgggcggatcacaaggtcaagagattgagaccatcctggccaacatggtgaaaccccatctctactaaaaatacaaaaattagctgggcgtagtggtgcacacctgtaatcccagttactcgggaagctgaggcaggagaatcagtttaacccaggaggccaagagcgcgccactgcactccagcctggcaacagagcaagactctgtcaaaaaaaaaaaaaaattgccctttttggagctcagataaaagacactatgtaatttgtaagaaaaaagggtgtcctgttggagtctacgtgtcaggagtagtctaaatcttaagtaaccagaacttaactatcctctccattattttgagaaatgatggtgaggatcattgctgatatggttttcaaatctggggggaaagattacagaatggtgtaaaaatcacctgaaaaagaattctttttgtttgtgcattttatcacgtcactactaatctggccagcagggagttaccatctgtactgtgtggcagtgaccagagaaaacaggtccagtccatttcatgtgtttaataatatatcatgttcacatataacccacatttattcagtacctataggtgctatgcttgaagcacataagccgttcatgatgaatacatactattgttcaatgctgcagtttttatgttatcttgaaagacagagggagaaataacttgcatttccaaactcgtctcttttatactttgaagaaggaacttgttacctttattgtacattaatgattacatatataactcactatgttttcttttctctacttccaaacccaagaaggcattctaacagtatctcagtaatctccgctaaccctgccccagttcagtcatatcctgctagaccattttagttatctaataattacagtaaacctcccttccattcctcccctcttccttcattcctcaaacattgccagcaaccaccaaatccaccttcctgccccaacaatctaaattgtaaattggaccacatcatactcagacttaaaatcttttaaatggcttccttaccacttttcaaggtaccatccaaattccatggcatcacattcatggtccttctcaatctggttcctactttcctgtcctccctcatctcctgccactttttctctcgccccttcatacaaaattatttacaattccttgctgtctcacactactaaggccttttggtattttcagctccatcaccccattatcatacttactttgtgttattgttcgtttgtttatatgtctgtcttccatgattagactgcatcttttttttttttttttttgagacggagtttcattcttgttgcccaggctggagtgcaatggtgtggtctcagctcactgcaacctctgcttccccagttcaagtgattctcttgcctcccaagtagctgggattacaggcacctgccaccacgcctggctaattttttagtattttaagtagagatgggtttcaccatgttggccaggctggccctgaacccctgacctcaggtgatccgctcacctcggcctcccaaactgttgggattacaggcatgagccaccacgcccggactgattagagtgcatcttgaaggcagagattctgtgtcacttaactttgaattctacccacatgtgacactgcctggcacatagtatgcattccctaaatgtttctcaaataaataaataaatgagggatgaaagatactcccatatggtcacagtgtaccattataacatttgcaattcttactatattatacaacatctgtaagccagttttataaatccaataatcatgatatggctaaagggaacatagatatcttatccataaactcaaaatcaaagagaccgagtaacttagacaagagcaccaagctgactagcagtgcctcaggactaacctggcctggctccctgatccccttgccatggataggcctaacaaatggaaatgtgtacaagacttaatagaatgatatttaagtcatttattttagctttgagattttttttaaaaaaacttcattatggaaaaatttaagtatacacaaaagtaaatgaaagagtaaactgtacctccctgtgtgcacatcaccaacttaaacagttctcaaaccatgaccaatcttgattcatctatacccatacctactccccttcgcattattttgcagtaaatccttgatgttgtatgatttaatctggaaatattttagtatgtataggataggtttttaaacttctaaatatgagtttctctggtattttgggaagtcatgataattgaaacaaaataacgaagcccattgaagacacaactgcagaaatctggcagcctgtccctgtgctttctccttctctatgaagctgttcccaggaccacgacttccaccgagcccatctcctagaaatccctttgttcacatgccctggagagagttgtgctttgttatttaaattgtgcaaggtggaagtgcaaggaagaaaagcaatggtgattatatgaatgagagtagatactagttagtaaaaagcaagatactgtatttatgtataaggttaaatagttttaaaaaattatccataagaaacctttaaaattccttggaatctttgtcatttctattttatcaaaattacagtataaactagtaactgaagtttatattatgaattattgcaaacatacacaaagttatggagaaaaatacaaggaacattcatgtgtctactgcatatctttaccaagtctctccctgttacctcagattttctttaagtgacagaacattgcaggtagagtgaagatgccttggtaatccttccctttcctctctcccagaaatgaccattatcctggatttcgatttattgttttaaagcatgtataaccttacattgaatagtgtcttgccttttataaagcattttacctctttcgtttgatcttcacaactcttgaagtatttacttcacttctaaatatgtataacccaccaaattatcccaatttcacttaatacaaagctataaagtatgaagtgaattagtgtttcatgatttacagtgtatcatctcattagaaatagagtcctgaggcatgtgtgtgaaaacttcacaccccgctttgttcctcgatttaatttaaagtacgagtaattactcgtacttttaaaagtataaagtataaagcactttgggaagctgaggtggtagcatctcttgagcctagggctttgagaccagcctgggtaatagagcaagacctccatctcaaaaaacacacacacacacagcagtaggagaactggaaggaaccacacacacacacacacacacacacacagcagtaggaggactcgaaggaacctcaaagggttaaatagtctttaactccctgattttagtgaaaccgccttaaaaccaactcaaaggtaagttttctgttcatttcaaaggacataattgaggaaggaagagctgtctaccctgagtaatgttttctggaatgacaaatgagtaaagaaatcatggagatatcttatctcataattctttaaaaattaaataaccatggagtttgcatataattttaaaaatttaaagcaaattcccactccagttcctcctgaccaatttttccagctatttgagcagtattttttgctccttggaaggggatatagtgcttatcctgtttattcaagtaaaatttaaaaaaaagataaaactttctccccttaaaaaaaaaagtctagagctggtaaaaatttctgactcagtaattttggaaagaattgcctctttccacaaatagatgagcttacatactaggtcttccaagtggactagtaaatttccgtgatgtcaggaaactgggtggagtttttatggatgcaagtccagtggaggagggacttttcaggtcatgtataaggagagtaggatcagattctggttttgaataacctataagccacaaagcatggggatttcccattgggttaatctagtgctggccacagtttaggcatatgatctagagtagctgctgcaattaagagatgcttgcttatgggatctttgcccttttattggaaggctgtaagtgtagcccagccttgatttataaaccaacttgacataatcactatttcttttcacacagacttctgaatagctgtcactaaattttgattaccaccaggcatttagttaagctagagctgaactatttgatctgttagtttttattgggcactgcagcccacactgatcttcccctgttctaaagccctgcttgtatcagaaaggtccacccaggctaattgtttatatgctaattgtttatatgggttagtcttaactcttttttcgacaattttataggatcttagcatgctcatatcatgtctcctactatttgggtctcttcctactgtcatattgcttggtacattgataggtgctagtacctaaagccttacctaaagccgatgaaactgttagcttagttggcttcttccaggtttgtctttatttggtcaccctgaaagcctaagtgtcttgcaaatactatctactaggtttgttgaatatctcattttgttttctataatcaataacaatgtaagcttggatgcaattttttaaaagtactttaaaaaccttaactctcagtttggatacttgtcccctagctgacagaaataccttggcaaagtagctaaagtcagccctgaagctgaaatcagctgaggctggatagtttaaatcatgcttttcctcttctcaaaagatgatagggaccaaatcaaaatctcaacagtaatttaaattgaactttccaagtagatttctagaattcatatgaaaaagtataataatttggaggataaaaaaggaaaaagagtaggggcctgcccaaatagatgtcaaaatacagacagtccctgacttatgaattttcaactttaggttgggtttattgggatataagaccatcgaggaggtcattatgatttctactgaatgtgcctcattttcggaccatcataaagtggaaaaattgtaagttggggaatgtctgctctgctgccactattaaatgcactttcgacttagtgatgttttcaaattaggattggtttattgggatgtagccccattgaaagtcaaggagcatctttttattatagagctgtgaaaataaaatagttggtttagctgtgataataaatgtttaaatagtttaaaggaacagagtctcaaaatggactgtttctggtgcaaaagctctatgcttatattcatgcttctaagtcttagtacacattttttcccttagttttaaaaaaatgtttgcaggctgggctcggtggctcacgcctgtaatcccaccactttgggaggccgaggcgggtggatcacctgaggtcaggcgttcaagaccaccctggccaacatggtgaaaccctgtctgtacgaaaaaatacaaaaattagccgggcgtggtggtgggcacctgtaatcccaactactcaggaggctgaggcagggagaattacttgaacccaggaggcagaagtttcagcgagctaaaaaaaaaaaaatttttttttttttttttgctacattcttaagtgtgactctctttagctttgtgaaaccttgaggtggttgtttttccacacggtttataatgaaagagatgagaaaaatacaattttttataaagagcttgatgctttctagaacaacatactctaaaaagggaagcttacacatttaaaaaataaaagtctgatgaaagaccatatagctgagggttctgagcttagggagacaggttccaattactggctgtaggtctttgggatgatgacttaactaagcctacttccttatttgtaaatgtgggaagcgcctactttatagaactgtaaagatcaaagaacagcatgcgtgccaaacctttagtactgtagctaacacagaagtgtttgataaaagttacccatggttattatttttactaaaaagacctttaaaagtactatgaagggtttctgtttctaaattctaagatatatagtagtcatgaacatttcagaaaggcaatgttattttcaaatcagtttcacagttttcttgaggcggataagcagttcttcccttagcaaaataagaacttttgattatgcaatgaaagagaatcaaagtcagtactgattccagctaccttttctttattttctgtgagaaattgagcaagttacttgccacagtgatgtttttcatttttatagagaataaaaaataaatgaattaggtttgaatttcagtgggaaataattaggttagatgtaagaacgctctgattgtaaggctgccaagcagatgagagggactcctttgtcaccattaggagactgtgccagaggagctttttcttttgggcctcttgaggctacttcaggcgtcctgggaacccatctagatgcaccttaaacctggacttcaaccctgactcctgtgatggcatcttcgccaggatgacatggtaaggtggtgataaggacggagataagactggctgccattcaacgttggttagtcttcctgttcatgtagaaagcattctgatacttttttcctatttagataagtaaatgaagacagcataagatagacaacacatattttaaatagtctgaaataattgcatagatttccaacagcttataaaactctttaaaaagcgtacagagctgtttgggcaagaagggcagtttgaatcaggcacagcaacacagccttgtctttgttagaaggttagacgagttgatccttttaagtttctttaaaacaaggaattataaaaccatttaagatttactaagaataaataaggtgatcatgtaagagaagaccagtaattatcttgagttgcctttaggaagctacagatttatttttggctttagctttgtttaactgactctggttgtaaaaagtaggcatggtcattagaacaacagctctagagtgaacagggttcacatccctgctctgacgttttccagttgagaggcctctggtaaataacctctctgtgccctggtttccagtttctaaaatggagaaatagtacctacctcatagagttgttgtgaagattacataagataatgcacacagtactgcctggcacagagaaggtgttttataaatggtatccatgacaacaacagtggtgataaggatggagataaggataatgcttagttgatttccagataatcatgatctaagctgggaaattttctgtcaaagagtaaattgaggcgaggcacggtgcctcaggcctgtaatcccagcactttgggaggccgagacgggtggatcatctgaggtcaggagttggagaccaccctggccaacatggtggaaccccctgtctactaaaaatacaaaaaatcagccgggcgtgatggcaggcacctgtaatcccagctacttgggaggctgataccggagaattgctttaacccgggaggctgaggctgcagtgagccaagatcacgccattgcactccagcctgggtgacagagggagactgtctcaaaaacaaaacaccagagtaaactgacattaatttttaaaaagaaatgatatatgctggtccaaataaataaacaatgaagtattaatgtcacatctgaataacagaaaatcttagtttggaaaactgtttctacttacattctcaactttcgagtcaggtgacagtagttttgatttgatcctattgatttataggaaagtgtctacttctcatgtaataaatatagttcctgcatgagctaaagcacactctttttcttctgttgtataagtagaaattatgtaaatattggcattatggtatgatatcagctatttaaaatggcctgtgatagttacattgttcaattatagttggaatcaaagaatgaatttttcaatagaaaagtgggcaacagtcttaaatcatgcagcttacaaaagaaatagttacgtaaaatatataaaaatatgcttaagtagttgcaatcaaaggaatgtataagcaaaactaaagttttttttttaaccttatcaaactgacaaaaattaaaaagatggacattgcctagtgttggtgctgtcatataactattgatggtcaattggtactgtctctctggaaagcagtctggccgtgtatatcagaattttatatgcaaatgttctttgactcaacaattgcacatctggaagtatataataaggaaataagagaaagagtgcatagtctgagatccttgatgtttattacagcatagctaaaaataccccctaaaaatggaagccatttaaacatctgttagtgggcattagtttaaaactatggcgcttaacagaaggtacagtatgctgatcgcttagtttaagagaaaccagggttcaaaagctggcttcaccatgtctagctgtatgatcttgggtaaataacttaatccagctaagtctcacttttctcttctataaatcagaagagtgacacatggtttctaaggatgtcatgaggattaagtgaaatgatacacataaagcacagtgtctagcacaaaataactcagtatatgttagcaactattattaccatgtgcttcttaaaaaggatgaagtaggtccatttgtattaatattgaaaagtgtctacaagatcgtagacacctttcaaaaaagcagtttacacaatagcttatttgtattaaaactgtattaaaacttatttgtattaatagcccacttgtattgagactatgtgtgtgtgtttatgcattaaagttttggaaggacatagcaacagttaacatttaatgagtacttgactgagtcttaggcactattctaaggactttaacacatatcaatcagtcacttgattaaaattagttatatgttttaagtgcttggaacaatgcctatgctttataaaacactcgataaatattagttattaattttcatatgctgtcattatctctgttttatagataagaacactgacaccctgagagttctcacagttcataagtggcagagccagaatttaaatccagggggtgtaactccagtctctcactcaacagttaaaactggatattatgggaggtaggattgtgaggtcactttcactttgcaatttgtatacttatggatattttcacatttttacatgaaacattttatttttatatatggggcagaaaatatccagtttggaaagaaaatagtgcatttttatattttagaaatcttttttcccctctgttattcactacctatggcatattccagagatctgaatatatgtacacttaggttgccctcatgctaagggtcctgaacaaggagttcccatgacctcatacactgtataagattttgagaccctaactttggggcgcacagctaaatatacgtttagaagtagagtcccagactaaatctacattactgaatggtaatcaacttctgtaattgaaatcttaatagctttcaagaaacctttagtcataatattttagtttccagcaagtttgggataaaattgtcattctttggtcatccgaagaaagcaggcagaagccagttgtttgatccacagatcggtaattgtgagataggaagcaatgacttagtgttagatatggacatgagtgctagggctattagatgctacataatccaggactcagcgctggctatcagtgttctgatatccaactttgctgcaggggtagtacagtgtcctggagtggtcactgcactgtggactctcagctagaatgggagcttcacctgaaggttaggtgacatggactaatccaaggttttccaccaaatagctaaatgtctttgggcctcacttccataaaatgagggagatggactagataatatagtctctctcacttaatgacagataagatggtctgtatatcacttaatggtgaccaccttctgtaattgaaattgaattcaagttttgtgattttatcagccttgcctcttgatgaactaaatttgcaatcttagacctgtagtagagtctagaaaattgctaaatagaattgaacttataaactgatttatgggagtgtttgccagtgtgcttacttgaattacaggatatccttgatgacaaccaactatacaatttactttttattccattttaggtatttttcccctctcctagatttgttttcctaataatccggaattgtgttctaaagatcacaagtcaataaaatggtgtggtcctgttcattgcttaggtagtaagctgttcaggtattaatgataaaggtcattaccacataaaaatttccttcctgcctcaaagttttttgtattctggtatcttaatgggatggatgccttctgttttctcatggttgcggaagtcaagtggtctgtgtgtttaacacaatatctgagtctgatgagtcacatggtatgtctgcttttagttgggaacagttttttttggtcagttgtgatggtcaaaaaagtctcttgggagagtttaaatgactcaaaataaccaaacatagctcatagctacttaggtcttaaaattgtgagcttcgtgataccatattttaattttagtcttgtctaatttttgtacccccaaaggactgctgcttctggctcttaagttgttaaaacattagtctgatttctttcagggggtggtttttatttgaaaaggaacagcaaacaaaataacacagcaatttaaaaattaaaattaagaaataaaaaaggaattggtacaactgagaaatgcttacaactctctcctgaagctgttcagtgatgcagaagctttgaatgctttgaatgaatgggaaaattaaaatttgagtttatatttgaaatttttattttatatactcacttaaactcagtctatttttcaagttttgttgtgtgtgcaagtgtctgcttggtctgtctgcctcactctctatctctcattcctattcaaagtttacttttaagaaaatgaaaagcaagtgttcaaagctgcccaagctttgtataggtttatgtgttcaggctgcttcccaagcttgctcctccccttccctttgccagggtgtccctgcctctcaccactcatccttttcctgccttgtccattcatcagttgttctctggtcacaccaaaccttcactttttagctccaaatatgtattttggacataccgatgttttgaatcaggcattatctcccttaaaacaggcaaggaaagagtaaaggggagtgggcatcttccttaaagctagaacatttattttgtctctctcttctttgtatgattttgaaggagtatttcctttatcttaaataagacttgaagataatttagctaagattattgtgctgtcctgctttttggttttgatatggtcctttctagtcaccagtggaaaagctatttgagaagagagtgatagtttgagccctcgtaaatatgcccaggtaggtataagccaccaaaaaactgttgccctaaaagctcaagatatgactggaaaacttcttcaaaatttcctttattattctctgatttgtctttagttttgttccatgacatccaacttttttttgctgttctttgctgttctccactaaaccagaactaagaatttggtttataggaaaaaaaattcgagtactgtggtacctgaaaaaccacctctaagtgctgaaaagtgcaacttgattcccctttacccctgcccccaaacatccagcactctcccaggatcactcttaaatgttttctttctgcttataaaatggttgttttcctattattgaaaatttggaaaattcaaaaagtgataaaagacaaaatttaaatcatctgtaatttcacactgtttgttcatcacaatttaacttcctctcccatttttgtatagttgagttcatattgtacttgaaaatagaactttgtatcctgcttatttacttaacattatttttcatgttaaaatttgcagggagaattttcttcagtgctgtggtattttatactatcatcattccatcaatcatttcatttaattttaaacatttggtttaagtcgtttgctattttaaataatgctttgattaaaaaaaaatctttgtggcaattttggttatttgcataggatagactcctaaagttggaattatgtcaaaaaataaaaaatatctctatggttcttggtataaattaccgtattccctgttagaaagggtcacatctgtgccagctaacacaaatgcatagggtggacagaaaggcacctcataacagactggacctcactaagggggtgttttccccttatattgtgactactttcatatagggaacatactgcataattttaaattttctgtgtctttgattcactagtaaaattgaacatttttcatgtgttttaaactattcctgtttattatcaaacagtgttatgtatccatttattagggtctttattgtctcctttcgactttaacattaaaaaagctatgtatgagcttacttgataaatagacatgtattttaaatatatgcttttagatacacttttttttttttttttgagatggagtttcactctgtcgcccaggctggagtgcaatggtgcgtgtgacatcttggctcactgcaacctccgcctcccaggctcaagtgattctcctgcctcagcctcctgagtagctaggactacaggcgcatgcctcatgcctggctaattttttttgtatttttagtagagacagggtttcaccatgtgttgcccaggctggtctcaaactcctgacctcaagagatccacccgtctcagcctctcaaagtgctgggattacaggcatgagccaccacatctgggcgcttttagatataatggacattgttattttacagtgtttttctccaaattattcttttaatcttgtttgatatacagtatatacatatgtatattccatatttttgtagaatgaaatgtagcacaagttttcattgtactgatttcattttaagaaagctcattccttccaaagatccagtagttatccatctatattttcctctaatttttttgaagtttaattttttttaacttttatttcttcccctccttccttcattctttccttcctttagttttcatgtgtgtccttttgaaccatttgcaatttattttgcattttggagtgaaatgaatacttgacttgattttttcccctaaatggatacccagttgttccagtactattaattgaatgtcttctcctcttctcctcttcccataatctatgattatgttgcctcattctaagcgaagactttaaaatcaaggtttggtttggttttgtttgagacagagtctcgctctgtcatccaggcaggagcgcagtggtgcgatcttggctcactgcaacctctgcctcccgggttcaagtgattcttgtgcctcagtctcccgagtagctgggactacaggtgtgcaccaccatgcccagctaattctgtatttttagtagagatgagttttcgtcatgttggccaggctggtatcgaactcctgacctcaagtcatccacctgccttagccttccaaaggggttacagagacatgagccactgcgcccagccaagtttattcttacatattttatgaatgttgtactccatctcctcctccttgctacttttgtgaacaggattatttttccatttctaaatttatgtctttaaaattaacattttaaagcatacatttattttaaactttaaatttccctatttaaaaaatctttcgtcttacttttgacggacccatattctttataacaaaagtgaaaaatatagaagaaaactcatgatattgggttactggatgtattaatagatggaagcatggctcagctgacaaggcaaagggaaggatagatccttctgggtgcactagctatcatctcactcatccaaacccacaattcagagccatagtttaaacctgttggccccaaattctctagatcactgtaatatctgtctttcccccaaccatgctctcatgctctccaaaagtttccctaggccacttaattcatctttataaattctataaatttctgtatatattttataattaaatatgaataacataaagatatatcattttatatatatatttataaatttgttttttcccagttgttttcattttgttttacctctgaatatttcctcctttacaaataatgttgacatactcactctggtctcccctcaccttcgttacccatcatctccctcccccctgccatttactcccccttcttgcaaattgtggctttttttctcttttatgtcaatcaagacaaatatttttctgtatgtgctcgtgtgtgtgccagtaatagaaactgatttaaaattcttttagggatgcccatactatctaaaagttggcattgatttttttttcccatcgaggtgctagattataagtatttgaagttatgtggcatttctgctgaggtaattttttaaagttaactatgacttgattcagctgaacatttttttgcagacaaaatctagtgcactaccagataggcatatagcaatagaacaattaaattttataaatattttaagaatagactgcttctttctgaatgtttttgagaaagacagggtgatagtttatctaaacattaagatcggtaaatagaattttaaataaaattgctgctttggtaaatttacctcttaattgtttgcatttggtttataaacactttccccttctcattgcaagttttaaaaaaaaatgaagttcagagggatttttagtaattatttggaccaataaactcaggtattctgccatgaacatcattactacagccaaataagctttcaggtactcaaccattgaactatatttttgtgcataggaaaactatttcgaaaacagttttgaaaatgaaaatgctaatgttgagttcagcaccactgtgccatcatcaccaaccttatgattcacagaaggagcaaagacaagggtgtctgtttatgaaatgcattcctctggtctagtgatcagggcatacgccacatggagagggccacgctaaataaaaacaaaagctattaacagcagatacagtaaagagattacaaataaattggtgtgtgttgcctcatgagaatcactcttttgtgagagaaagggttagctcttccctggaacacctctacctctagttctaccccaaatcactactaacttctagtaaggcttctaccaagagttctttttttactttaaatatttctttttgctacatttctctcccctctccattagaagtaatctaatttgtcaaagaagtaggctaagatcagaagagagagggaatgtctattagagattaaatttacaaactaactgacaatggcagcagcccaaggcaggagggatgagcaggaagattgagcagggaagggaagaaaattaataatttttgagcattaatatgtgctaggagatactttaaaaatattttttactgatttattgatttatcaaacacatgacgtatctcagtccttttacaagtactaacttttagaattatcttaagtcttatattatcataataagcatgcacacaaggtggctattattatatttatttaacaggaaactgacacacagaaagtttaaagtttaatttgcctaaagtgacacagctagtgaatggctgcaccaaaattcagacccaggcaatctggcctttcatcctgtgctctgccaccatcaaagcgtcatatcaaccttataaggttggcatttatgatctccattttagaaatgtggatcctgactcaggttaaataactcagacaggatcagccttaaactaactttcttaaactagccttaaactagcttttcttatactttctgtccttactgatcatttacccagtcatccacatctgaaacttagagataattagagactttagtctttccagctgactaactgaggcttcttcacttctgctactatcttaattagtccctcactattctgtaatctcaaatgtgctgtaaaggaagcaggtgggtaataaaatgtgggtaataaaaagtgaatgagtctgggcacgtgggaatggagagttggtggacgggtgggatgttgtattgtaaggggccggctgcagctctgctccagctgtcattgtggagctgacagagctcattgtggacagatcagacttttcaggagaaaccagaaacctggattttcatgtgaaaccttctactttctaaattgtagcacaagcctaacaaaatgattctgcaggctaccaggttgtaatctctgactattcattattaagcctcctgagcagatttacttcctctagtctgatctgtacttccagccttttggccatcctccctgtaccagcataatctatccgaagtgcaaatcagataggatttgagggctggttaggagaattaaatgcttctaagaatgtaatattcttagaagaattctgggtacttgggtaaaaactcaataaatattctttaatggctgttaggttttcactaaattaaaagccttgagtgattcccatttatgttcaggataatttttaacatgacaaaaaagttccttatttctaccttcatcttctgccatttaatcaaatatactcagtctatcggtatgcttaagtgtgtcagtgtatttcatgccttacagctcttcctcctctgagtccatctgactggtgaactcttactatagccccatcccctccaagattcagttcaggcatcaccttctgtattaaacctttgattatccttcctcttgaagcactgatttctccctactttgtgtctccataagatcatgaactccctaagggccggaactgtgttttatcagtcttattctcagcacttcatacagtcaacatggtatatatctgcaataaatgttggttgaaaataaaacaattagtgaaagttaatgctgggatttgaaacttcacctatgaatttcttgcattttagactgtgcctcagagaggaaagaagctgtagctgccctttcgttagggacccagtttatacagtgtacaatctgaggacttattgtagcctagggcattatgattgcaactagtgaattgaatttaggcgaatttttatactacaaggcaatatagtagcattaaggacactccttcctctgaaatgcagtatgtgaaaactaaggtgaaatcaccagttaaataatttgttttacagccaggtaaagcagttctattttcttcctttagaaatttgatggtaaatggttggagataccacatctatttataaatggcctgagtgccagatttgttatctcctttccccaggcttgataaaaaagaatgttggacttaactattggtagtgtctccattaatgaatagagcagtctggagaaaacacacgtgaacaggaaattcaagggcaccttgtgttgtttttatcagtccaggaattctagacttgcaaattgtatcctgttctttttctggccaaagaaagggctttaataaaacaaaaagaacagtgttaaatccattaaaggaatacatttgcaatacaataagtgccagtcatctagaccattctttgtaataatttgatcacttcttagttttgtataatttaaatttttaaaagtctgtctgtgtctggtaagaaggaaacaaatttttcttgtttttaaagctaatcttgtttttaaagctaatcttgtttttaaagctaatctttaaagctaaactatacaagatattgtataatcatgagtaagggtgggatttttgttttttctgcaaatgtgtttcttaagtaagatttatttctgaaggctaatagaataccaaatgattctgtatttcttaacccaaatgaaattattatatatgaaacacacatataatttaaaatctattacattagagttgagttaccatcacttacagactgcctactgtgtgctcatcactttgccaggtactgcgatgctttcattacaaagataaatagatggagattttgcccttatttggtttttaaacaagacatacatgtatgtgtaactacaatggaaagaacatcataatcattactaaattatatagagtctaaaagtaatatttcattacttgacatccacttccgattttggagtaaaactcattacaacttcctatgatggaagaaacctcatcttctatttaccttcttttttgaagacctcaggttcataaatatttatctaaaatgacctcatatgtatttctatactgttgggttttttgtttgtctttttagcctagatctcactctgttacccaggctggagtccagtggctatgcataggcgccaccatagtgcaccacagccttgaactcccaggctcagatgaccctcctgtctcagcctcccaagtagctggggctacagacatgtgccaccatgcctggctctatttttatacggttaatgcagacaatttctgttgtttggaattgttttgaattccctaacacttctttatgtttcacaaaaatttcctcaaaagttttgttccttaatgttcctcaaaagttttgtccacctctagccccccaatttggcttcattctgggaaggcctagtctgtagcagaccatctcctacagccactttccagtggacataggtgctctaggcaagatagccatcagccttgtgtgttttagattccaccttatcccaatcccattcaacatttaaattgaataacagttctctttgttttgatgccatgctcgccaagcaatcttctgaacctaatttcttgttactcagtgtcttactgtgtaaatcagtaaactgcattctgtcttgtatatttgtcttttgtgaactttgttaggataaagtgacttccagaatttgattgccctgagacactggcagctgagggccagaccttgccgcttggcagaccgagcagggcagcctgctcgacaaggccccttggcagacagtcagctccctccaaggccaaaccccaagttcaacatacatctttctctcccatttctgcaagcataactgtgaacagcataattctgtgagtcatgtgttatttctttgtgcttttttcaagaggcattataaaaggttttttatgtttttcaccattcactttttgaaaggaatatataaggccttggacaactagagttgggtcttgaccttttgttaaggcaaacttgtaaagtggcaaaccactttataaatttttattggctacagatcttctggacattttctctgttcattagtatctgcttgctagaacaaatacaaggcaagtcagaaatcattctacaatcgtagggtgttgctctttaatggtacttttaaggttttcccaccccaaatatttgttgaaaaagtaacaggcagttgtttaccaaaaagcatttgaagagaactatctatgaactgcaattttatatgcctagggaaggttcactggaatactactgcaaattgtacacctgtcctccttttgaggattcaggatgcatgttagcatattaaagatgctgggaaggctaggcaaggtggcttgtacctgtaatcccagcactttgggaggccaaggcaggcagatcacttgaggtcaggagttcgagaccagcctggccaacttggtgaaaccccatctctactaaatatacaaacattagcgtgcacctgtaatctcagctactcgggaggctgaggtgggagaattgcttgaacccaggaggtggaggttgcagtgagccgagatcacgccactgcattccagcctgggcaacagagtgaaattctgtcaaaaaaaaaaaaaaaaaagatgctgggaagtcttatagtaagaaacttatttaactttgtgtagtctgggtttcttaaatttacttaaattcctcaatttccagtccatccttcctctcccatcccaagccccagttaacaaatgtgatttgatttcagagatgttttctatacacgatccctgtttcacttttccttctttgacctttttttttttttccagttagagacagggtcttgctccatcacccaggctgcagtgcagtggttcaatcgcagctcattgtaaccttgaacaagggttcaagcagtcttcctgcctcatcctccagagtagctgtgactacaggtgtgcactaccacacctagctaagtaaaaaaaaaaaaaaaattgtagagatgaggagatcccaggctgatctcaaactcttggcctcaaatgatcttggcctcacaaagtgccaggattagagtcatgagccactgtgcctggcattctttgacctttctgcatctgatcctgaaacatagaacatgagcccaatgattctgaaatttccaaaaatgatttggcagcattgttttagcaattcagtaagagcagcttaatccataaaaatcacttggccatgataattcttgagtttatttttcattatttattgttttaaaaaataatgctcattattattaaagcatttagcacaatacaaagattaaactaggtgcctagaatagtatcttacatttgtataagccattgtggctttcctgtgtattatctcagatggccttagaactaggcctgtgaaccaggcagagcaaatattttaagccctgttttgggaaaagtgacttgagttaagggtgttctggtgatttgaataagaccatatgatcagttagcaacaaggctgggattagatcttttaatttctgacttctaccttctgtaatttctttttccacagttgcttattagccaatctttacagagcactttactattggctaattctttcaactactgttactgcgccccctccctccccccaatcaataggttgtctcattcattcattcatgactactctgagtcagatgcagtgctgttgtgagttttgaaaaatgaatcagaaagagttcttacatggagatgttcctggtttggtggagtaactgttagggccgaatttttcttaggagtgataagccaccagtacctgactacaaatgttagagaacatgcaccaaaaaaatgagaaatgctttgcctcttctgcagagcatgttagagaagtcaccacagcagtaagacttcagctaaactgggccataaaggatcagcagattcctgcagagacatatcctgcagtggatataactgcttcagggataggtcatggaagagcttggaggcatgaaagagctaggtatgttgggaaaagaatgagtggtgaggaagagcatcagataaggatagaaaatataaaaagcaacagataaggatagcaagttggaatcctgactccacatcacactagctatgtgacttgccccaaacttcagttccctactttgcagggctgtcgtgaggatgaaatgcaatcatgcatggcaagtgcctctatcttaaatcctcaggagaaaaaaagggggaaatcagtgaataaaatatcataaagttcctgatatataaccatactcagtgtatgtgagttgttcttattgatcatatgtagctaatttgacttgcagtaggcaatgaggaaccatgactgattctaaacaagtgacacgatcagcttctcatttaaagtagtcagcagaggaacaaatttatgccaaaataatagatgcagttttagacatagtgattctgaggctcaagcagtacattgaggtataaacccctaataggacaacagtagaactgggagtttgccatagataattgtttgctttcaacctacacttgacttgcttgacatcttttggttcattccatcaaccctggaatctagtccacttcaggtccacatccagggctctgtatcttctttacttaaagcaagatggatgttgtggcataggtggcaggtttggggaacacttttcaactaagaatgctttggatggtcactcttggcaagctggatcttctttggactggtctgttacgatcttcatctagataagcaaagcctctttaatgtatgaactcttctagtctttttatccagatgtggctgtagtaggcaagtctcttagggtcagtggccacctgccgcagccatcggagttcagtcttccccccgtcaagtggccattttgccacactccttatctaatagtccagattattttctttgaaacagtactttgtttgcgtggcccagtgatctctaaaagttggcactggaatgcctttaagcagacatacattgtccacttaaggccacaaagcttccctgttgttacctggcttcattcatacatttctgtttccttcttggttcctataggcatctgaatttcatttgaaaatgaaatgggctgcacagtctggagaagtgtactataccttgttatagcacgttttggaatgacccagaattcagaatgaaatgggcagctatgagccccatccaaaggtgcctgtttctaaaagtagtttccccctacaatatacgtgaacgttgctttaggctggtgtttatatgcatatttgatacaacacttcatgtttcatagaattcataaggcagaagctacttcttactattaaactaaactgcattaactcttaggagactgacatttatcagggacatagctattagcactatcttatagattttatttagtaatgaaacaacaaaatagctggaacttttcttgttttgaatgcttgttgaatgtgacctttgtatataaatgtgtctatattatatatggatgccactggttcttctttgctgtcattaactcctggttttgccaccacaatatgaatttctcttgctttggaaatagtgcttttctttcttccctagctttgtattatttataatgtgaaatacttggatgtgttaactgttagggtcgaatttttcttagttgaaattgaacattttcagagtttattataaaagataggggttttttttcccactgaataatttgtttttctatgttgtttcagtttccgttactatggcaatgacggcagggactacaacaacctttcctatgagcaaccatacccgggaaagagtgactgtagccaagctcacattggagaatttttatagcaacctaattttacagcatgaagagagagaaaccaggtatagtaagggctaatcaaaactttttttagttaaataagctgttgtgctgtgagtggaatagaaacttgtttaccatgaatgatatgaatattatggatccctgcatgctgtttttgagtttcctgtactgacagtgcacatagacatgtgttttattttcacagagtagtttcctgaggtgccccaagtcttgtgcatctatatacccgtatgacatgccaattaacgttttaaacaaaccttttccaaacatgaaattatgatatgtctttacattttcttttaaagggatgcctggcttggtgtggtgtggctcatgcctataatcccagcactttgggaagccgaggtgggcagatcacctgaggtcaggagttcaagaccagcctggccaacatggtgaaaccccatctctactgaaaatacaaaacattagccgggtgtggtggcgggtgcctgtaatcccagctactcaggaggctgaggcaggagaattgcttgaaggcagcagtgagccaaggctgcagtgagccaagatcacaccactgcactccagcctgggcaacagagtgagactttgtctcaaaaaaaaagatgctttatgaatgactgactttaatccaaaagcatttacagtgcatatcagggggaatagaagaataaaaaaaagaatgacatgttattttgactttagaaaacttatactaaaggagataacacacataaatatataaatgaaagagtgaagaatattaagtacaaggaagggagaatgtgcttttgtctaggcaactgggaaagctttgtaaatagtggtggcatttaaacagggctctaaaggagaagaactatttatacatgcataaaaggaaggagacagaggcaaaagagcaggagggaaggatattagagacagaagaaatcaccaggtcaggcagtgtccaatttcgctcaagcacaggatgtgctagattccaacatcctgggagccttggattctttgttaatgtagctcttttcatggtagtggagagccttggatgtttttgagcagaagaatcaaatgaaaacaagtgtttctctagaaaggaactttagttgtgatacagagaatggtttggggtcagggtggggaattagaaacaggaaagtctagtgatgtagtccaggtaaatggaaaggaggcttgaattagaattgtgacaacaacaacagagaactgacaagtaagaaagattgacaaaatgtggctactagcaaaatatgaaatgtgagggaaataagtcaatgttgcctctgaaatttcatgcctgggcaaactgagagtggtacagtttaaatgaaatagagaggaaaagtctcatttaattttggacggatttaactgcagattagatacaggtatggtgagaattagtgaactggaaaataattattcagaaatcaacttaaaataggaatatgtgaaagagagttgagaaacatggagaatcatgagaagacttgacatatctctaaaagttctgaaagggaggaaaggaatgaaaatagagcagaggcaaacaaacaaaaaaagagttagcatcagcagaaattccaaaaagttccatttaggcagaaggaaagtgaccacaaatagaagatttaaatggtaagtaggtggataaatctcaacaaaaattatataaagcaacagaaataatagcgataatatcttacacattaaaaaatagaacgataatattttccaacagcagaatataattcaggaaagaagtaattagaattaaggtgttcttaatgatcttagtagaaagggcatagagattagcttcagagtttgacaaattatgttgtaagttctagagtaaccataaaatgataaaaatagagtttgtaatttccagactagtagaaggaaaaaattggaatgagaaaaaaaaagtcagttcaaaaagaatgcaagagagaaagaaaaactgaaataccaaaaatggtaaaaatgaaataccaaaatagcacaaaataagttagaaataaaaatctaaatatatcaataattaaatgaattacaagggtaattaaagtctctggaagtgatcagaccatcctgggagagtgaataaagtagaagagaaccaaggaagaaaaagcaggcacttaaaaaaattcatcagaatttcgaaggttcattgtctttacttgctgcagtgttaaagtaattcagtttgctttctttttccaaataaaggaaagtaacaataaaattatctgtgttattgaaaaaaaaagtagtctcagcttggtgccactgtatgtcaagtcgaacaatctgctcatattttctaaaagcttatacttttaagaaaatgtgatgtatttttaaggcttaactaattggataaatgcataagcccaataaatttctaatcagagcaaagcataagagcattttaggtggaaaactatttttaaaaaaggtacaacagaaatcatggatcttcctgtttagatatggtagaaatggataaaagttactgtatctcttccagaatgaggaatgatttcatgaagtgttagtcttggcaataactgaggaaagggacagtggaaatttgacagaagaataaagttgtttatatgttatagctcctcccagaataatggtcctcttactctctggattctttctgcagaggagaaaactggaaatcattcaacaagcagcactgaagtgcctaggggtaggtgatggcagcacagaatctgatgttaggagattattcttgtctaagggttggggcctaggggaaataatgcataaacaaaagacaaaaatcagtgtaataagcaccaaggtaggtgcctatgacaagcactgaggaaacatgtgttggagaatatgctcttaggcctcatcctctccagtggggtgctgatgtatcaacaggctttaaatgttacaaatcttctataagaaggaaaactaagtgatcttaatgatggtttagtaaaaaagcttacctttggacatgtagccatgaataagaaatatcaaaaagttgtgggagggtttcaatccttaacccttatacccattcagttaaatcctgaaaagttactgttattctgacacactccagaactaattaggaggagttctgctaggtttatatttagggaaaaccaatacaatagaaataaaatactaatactcacttggaaatgagttgcaaaatgtgttccacaaccatctctctagttttagttacttcatccacactgcccttaccccagatgctcagcttaactaacttcaagggtgctgtttaaaaaaaatgaataactgaacctggctgtacctagaaaagcaaatgttctggtagctagtgggtttttaaaaaatatttatttatttagagacagagtctcactctgtcgcccatgctggagtgcagtggcacgatcttggctcactgcaacctccgcctcccaggttcaagcaattctcctgcctcagcctcccaagtaactgggactacaggcgccagccaccatgctcggctaattttttttgtatttttagtagacacggggtttcacagtgttagccaagatggtctcgatctcctgacctcgtgatccgcccacctcggcctcccaaagtgctaggattacaggcgtgagccaccgcacccggccgctggtgggtttttaaaaacacacatatatgactttccaattttcaaataattttaatacaataaaataaatgcaattgcattgaacatttttccttcataagttaaggaaaactgagcttagagtttcagtgagggacttagccaagctcatttagctaataagtgttagaaccagggatatttaccttaaaattttatacttttagtcagtatagttatctttttatatttctaatataagcattgggaaatattaatgatattggtagattgaacattaagtagcagagttttccatattagaacatcagtcattgccaacatttcatttaggcaggagcgtgaagtaagccttagaagtaaattattcatttggccagtatgagaaagcaaaatctgggtttgttttttgagaaagaaaactattcttagtgattatgttgatccaacttgaaagtttttttttttttagcctagcaagctgaagtggttaacctgaataaataaatgtatatttcttaagtggaaatagttaggaatgtatttaaaatttaatttttttttcctttgaaaaggcagaagaaattagaagtggccatggaagaagaaggattagcagatgaagaggtaatgtaattacctataattactgtacaaaagcacccccagtgacttttcattcatttgacatcaggtattttataacttaaataatgtggattttatcatttgaatatgggcttctttgttgctgtcatggatatcttttattgatatctttagaaggaggcagttttgtttttttcttaaattccaagaacacgtatttaagagaacattgccaagtgtattttaggtgtgtggaatgagaaaggcaagctccgggaggaattaatcaatcgttagcttttctaaaattttttctaaatattcttttaaagctatctgtttctctagttcagtgctattaccctggtttaaactaccatatattttaacctgaaaaataactgtccccaactggtctccccatttcccacccccagtttttctgcatactgcagctagagtaattggtctaaaaatagatttgatcatcttactcttttgcttaataacccttcactggctcccttatctcgggatatgggcaagctctttaacattggtatacctgggccgggcgcggtagctcacacctgtaatcccagcactttgggaggctgaggcgggtggatcacgaggtcaggagatcgagaccacggtgaaaccccgtcactgctaaaaatacaaaaaaaaaaattagccaggggcggtggcaggcgcctgtagtcccagctactcaggaggctgaggcaggagaatggtgtgaacccgggaggcagagcttgcagtgagccgagatcgcgccactgcactccagcctgggcgacagagcaagactccgtcttaaaaaaaaaaaaaaaaaaaaattggtataccttcactacttggcctctgcttatctctctctagcctcatctcttgtcacccgcccccgacgctgacaagtatgaatttctttgatgtcccctgtcttgcctgtggaccttttcacatgctctttctgctgcttggaactcttcctcactcctacccaactcccattattcttcaagaatctttagtagctgggcatggtggtacgtgcctgtagtcctagctacttggtaggattgaagtgggaggatcacctgagcctgagagtttgaggttgccatgagctatgatcatgtcacttcactccagcctgggcaaagcagcagctttaggcctcacttcaggcatcacttccactgggaaatcttccttaacctctcaaggtaccttctgtattctactgttcctgtccccatgggaaccttaaaatacagtcttcccaaagactagacactgtaacatcttgttgagcattacatctccacagctgtctggcagagagctagaataaatatttggtgaataaacaaataatggcttttgccctcaaggagttttagattaggagagggagagtgagtgagtgtgtgtgtgtaaaaatatgtacgcatgatagaatgtggtgaacgttgaaaatatagagaagatttttcctctaattcagaggatcagaaaatgtttcatagaagaagtaataattgatttgaattgtaaagaatgggtagaatttacattagaggtaagggatgtatacaaaataatgaatacatgtacagaataatgagtttacatttgagctataaagggtgcaataaaaggaaatagtgaggtaagttgatagcacaccatggaaagctaggtttagaatagtttactaaaaaaggtatactttagtactaggcaatagggagtcacaacccagattaattagtttaacatgctgagtgcagtggcacacacctgtaatcccagcactttgggaggccaagatgggaggatcacttgagcccaggagttcaagatcagcctgggaaatatagtaagacctggtctctacaaaaaattttaaaaattaagcatggtgtcctgtgtgtgtagtcccagctactcaggaggctcaggtgggaggatcacttgagctcagaaggcagaggctgcagtgagctgagatcatgccattgcactccagcctgggtgacagggtgagagtctgtctcaaaaaaaaaaaaaaaaaaaaaaaagagtttctatatttaaagagtagaccatcatcaaatgattaattgaaatcaaatcagtatctaatcttccctgtacctttcctaggactgtagctgttccttatagttgcaatgtttaaatcaaatacaatattttatgacttatactaaaggtggtaactttgttaatcagttgactcaatctagaaaactcagatgtttttacatttaaaattatctatcattatttacatgtcattaatattttaaaagctcatttatgtcctttaaattttagtgagaaaggtagtgatttaaatctgtattccaatctatagagaaaaaataagactgagcatatctttcctcattttaaagttagaattataaatttcttataattaataaccatataattgcatttatatattatacatcattatattgatatagaaatcttaaacataagatcttaatttgaagtgtaggggaagagactgcaaaaacagatgcccaaacactaagcaggcaacggaagtgagataagctggccaggttggtttcatagtggcatctagggttatattcttttgatccagatatactttgtttacatattcaacttatatgatttttttttgcttccacaaagaaatagattaatatttttcctttttaaaaaatattattttcttaaatattgatccttacagtttatctgttggcaaagacatgccacttttcacattgctgtaataagagtcccagcccacgtggacatgcctcctagggactcgcatcagtggtggggactgacaaattagggaaccaaggctcatctaaagaggattgctaccattggcccctgtggccaaggccctgtttttccagagaagctagtaatctggactttttttgcagaataaccaatcacctgcttttgaaaaacaacttgcagtccaaatcaaatatatctgtaggttgaatatagtttgtagcttcctgtttgcaacttctggtctgcatcagcaagtactgactacatttacagctattttctctaatttttctgaataacttgtagaaaataggagatgatttttccataaaaaatagtcagtggcccataataccagtttataaaacttctaatgtttttctctaaaaaatgtttttaattccacaggtgcttattattaggctccatgctagagcctggattatatcaaattctgtaaaatagacaagctctctcaaccttaatataaagtatgttacagcatctttatatggggtgggtttgataaaaaataaaattgtctcataaaaataaaatagataaagttgctagctgaacccttttcatctgaaaaattttgtatgcactgtctgtcttatacaaatactggccaccctacagatggagagtttgaggaacacctatataaaaaggaatggagaaaggaagaaaagcactttctagtttcatctcacttaagaaaatcccatccaacatggaatgttatttactctaatgaaaaactaaataggcaagttcaagctataaaagagagtcgtgaaatgttaagctgtccacagatttttattgtcttctttgaagaggaaaggatgcaattaccacaaggatactgtttgtctttcaaggctacttaatctatacaggttgtgagtagatatatcaacaggctttttcaccaattttttttttaacatgaatttgattcagctacctctggactgcaacactgattctaagactaaaatcatggaatcaattttttttaactaatgtaacaatgttataggtgatgctcatttttatagaattatgtgttccatacacttgtgactctctctttttgctattaaatggctgggcccaaaaccacataaattgtgtgagtgctgcattatacaaactactagacaatttatgaaactgtgtatagtgatgtcatcttttccattcagattaagcaggatttctgcaactatatccaactgtactgttttataatctataaagggagagattcaaaatactttcaaaattcttattcttttatgtaattaaaaaaaaaccctcctcactacttccttaaaggacatgatactatagtgccaccaagtggccttttaaaaattagtcttaaaatttaaaatcagatactttttagagctctcttttgttttactagtaatttatttttttattattcaaaaggtatttttgaacacctatgtgcaaaaaagggtatttgtcattgcatttaggtaaaaagcagcaaaaaatagtcttcactattgtttcaggccacatttgttttcttaattatatcaatgtaattttagctccgttaaaactgatatttaagtagcttcccttaaagaaagcaggaatttgccagtgttggtatttcaggaattttatcaacacacacacacacacacacacacacacacacacacacacacacacacacatatatttgagatggagtttcggtcttgtcacccaggctggagtgcaatgggatctcagctcactgcaacctctgcctcccgggttcaagtgattctcctgcctcagcctcctgagtacaggtgcatgccaccacgcccggctaatttttgtatttttagtagagacggggttttaccatgttggccaggatggtctcgatctcctgacttcatgatccatccacctcggcctcccaaagtgctgggattataggcgtgagccaccacacccggcttatcgcctcacttcttactgaaaaaaataatctttcattgttgtttgcttactttttccatagtaccattgtattttataatcaatatcagatgtggaaaaagacatttaaaaaaagacattaaagacattaaaaaaagacattaggcaaagcctgttaatttgtgtacttgatttttatcttcattactgtcataatttacaccattggtgtgccttagtgtataacttcatttagctgtttgaagacatttcttgatttcatcttcttagattaactttgttagaagtatcagaattccattgcattgataatacatgtttacatacatatttctaattaatagttcacctaacccttttaaaaacagatatatacaggagtagggagaggctataccatgagctgcatttagaagcaatgtttctaagctgttactgtcattttgatttgtctgtccctccaaactgaaccactaaaagcttggcaggattcagttgaagatgaacaggagttaaattttttcactgatattgtttcttttccacttagtgtttcctctactaggagctaactatgtccaaaaacagaattttgattggtgagggtgaaaaatgaagtttagaacaataaaataaatacctgttccaaatgtaacctgcaggtatttcacagtattgcttattaatggaagttattttttgtggtctttgtagaatcagttatgaaattaccaacttggatattttaatgacttcttcttgtaattgtttttgcaattttatattttcaggaagttctatgccaggtctcaagcagtttattaaaatttgcccaagagtaaattctaccacaagtaaatctctttggaaacactaccattatgttgttattttattgtcacaagtctcagtagttgtgaaagagcaaccttggaaattaaggaattgaagcaaagcagatttcctgacagaataaaaatcagtatcagaataccattaacatttactaacatttaatttttatttatggaattgttaccatatagatgaaagaataagttatacatatatatatatatatagacaaatatgatggactgaattacatatttaatggagtccacctcaaaagtaaagatttatcagttgttaaaaattttagaaagttttctttaaattgttttagcctaatagtatattacatattagtgctatcatttatttttacgtgtatcatcttttaatactagaagctccatcaaaacaacctaattataaaatcatccgtttaaattgtttttttttaatagaaaaagttacgtcgatcacaacacgctcgcaaagaaacagagttcttacggctcaaaaggaccagacttggcttggatgactttgagtctctgaaagttataggaagaggagcttttggagaggtgtgcttctttttaaaagtcactactgctgcaaatatatatcttaagataatttaaaatatgtgttaaaatataattcctggctgggtgcggtggctcacgcctgtaatcccaatactttgggaggccgaggcgggtggatcgcctgaggtcaggagttcgagaccagcctggccagtgaaaccccgtctctataaaaatacaaaaattagctgggcgtggtggtgggcacctgtaatcccagctacttgggaggctgaggcaggagaatcgcttgagcccaggaggcagaagttgcagtgagctgagatcccaccattgcactccagcctgggcaacatgagtgaaacgctctctcaaaaaaatatatatatgtgtttgtatgtatatataaaaaaatatatataaatataaatatatataaatgtaaatatataaatatatataaatatatattaatatatataaaatatatataaatatatatataacatatataaaaatatatagatataaaaatatatagatatatatatataaaattcctgaaataccaacactggcaaattcctgctttctttaagggaagctacttttctttcctgaacaaatagtagtgactgttttataatatatgttttttatcttttaggtgcggttggtccagaagaaagatacaggccatatctatgcaatgaagatattgagaaagtctgatatgcttgaaaaagagcaggtatgagttctttaacacatgtaatataaaggagcatccactgacgcagtgttaagagtgtttatattagaatttttaagaagcagtttacacatcttactacataagctattaattttttggtagcctgttttagtgtttctcagttcttttaaggtttcttctaaatttataatctatgtatgtctgcttagacttccataacagaacacaacaggctggttagcttaaacaacagaaacttattttctcatagttctggaggctacaagtcaaaaatgaaagtttgggcaggttttggtttctggtgaggcctctcttcctggcttgcagatggccaccttctcactaagttttcacatggcctttccttggtgtgtgcggggacacacactcctgtgagaactctctggtgtctcttcttataaggacattaattccacccttatgacctcattaattaaccttaattaattccctaagggtccatctccaaatacagcctcattggagattaaagctttactctatgaattttgtagattcatgaacattcagtacataccttctgaaatacctccttttctgactacaatgaaaataaaggacagttctcggctcccagaatccctgtcacatatcagataatcaaaactagtctcctggaaatttgctgattttacatatttctaaaatctgtaaccttgtaaatattctgggctctctgcatgtttcctgtgccttaatgcagttacaaggggtggcttcgagtaaaggagggatggctttttgaatatttaaggagagaaattgtgaaatggtcattttcaggtgcgggaaagcagacctgctaaggaaatgcagttgaaggctcattgagatttgcagtcatgaatttaaagtgaaacccattggcatagctgggtgatttttcaccctagtttcagttaggttaagaaggtaataggaaccatcaggagacagggttataggggattttgttgatgacaggctatgattccccagagggaagaggtgtggaaggcaaggaaggttgagatactgagttggattagagaactatagataatgatgggaatatagcaagaccccattctccacaaaaaggaagaaaaaagaaagataatgatggcaataaggacgtgggtaaagatgcatagcctcagagacagggagggcaacaggaatctaacttagccataatgggattagtcctactagggtataataggaaggacagaaggaagcagttagttccagctgtagtgtagataccagccagccacatgtggctactgggcacaaattgggatatccagcaaataaggcttggtgcaaaaataaataaataaataaataaaatatttcaatgatttttatattgattacatactaaggtgataatattcggatatattaggttacataaactgtattattaaaaataatttcattctgtatgtggcttctagaaaatttaaaaattacatacatgacttgtgttacatctgtactggacagcccttggtctacaatattttgtgggaagttaaggagcctctggaccactgctctttcctgtggggaggtggggggcggaaatctctccgtagcctaacgtctagttgcctttgcattttggggttgttttttacccctgtataaattaatttgcatttgttaccactggattttgttttagaaagcttttttctactcaattctaatacatcaatattttaacttttatcacatttattttaatgcaaaccacccccacaaaattaaataccaactgatctcctcactgttgttctaccagattactataggtcatactttccaacctttggatcctgttttggaaagggatcctgtaatttggctttaaaccatttaaaaataatcaagccatgtttatgttgtagttgttttccttacacaccagatgcaacaccaaagtttagggcttttccttaccaccttaaattgcttcatgaaaggtaataggtaggcactcttgctaccacttttcacttaatgaaacagatccatagaaattataaagtattttcatgccagaagacaagttcttactcctcaactcttacgctttgatctcagaatatttactgcactaggagtaattccaaatatgacactttaagcagatcatattttattatcatagaaaggtttacaaatgtatgttctcatgtgctttggaccagagtttttaacgttgcacaatgaaaatagcaaaagcataaatcaaatcttattaatctttggaaaaagtgtataaatatattaatgcaaaagcatctgcaaactgaccagttataccaaccccataaattatccagtttataaaattttccagtctataacattttcacatgatagtatctctagtaattatgtgtccgagaaatcagtggcaaaatccccaaaagttacacaaatttgctttagctaacatttatagatatggtagaggttttatattataacaataatataacataaagttactataattgttactatttctttaaaaaacaccaaataatgatcaagctgggacctttgtttaacaattaaaaatagtttgctatttttagccaagcttaggtttgctgtaccaatttacagggcattgcttactctttttttttttgagatggagtctcgttctgtcaccaagctggagtgcagtgacgcaatctcggctcactgcaacctccgcctcccgggttcaagcgattctcctgcctcagcctcctgagtagccgggactactggtgtgtgccaccatgcctggctaattttttgtatgtttagtagagacggggtttcaccgttttagccaggatggtctcaatctcctgacctcgtgatccacctgccctggcctcccaaagtgctgggattacaggcgtgagccactgtgcccggccctgcttactacttttaactttaaaaatcacactagtgccctaaatttatgtgacaaagccaggatcctaggctgggtagagattctggttaaaaagttgttagactgattcttgctctacctcagaggcctcagcttcacgtaatatacctgttgacctcaccttttcagacctaaagatataagctaaaataaactatttcttgaggttctccatatttgatgagaatacgaacattcatacatgtatcaaatcttctgaaactccatctttccttcattaactgttatggatggataagtgtaagagatgagtttaacaaatgtgtgatgtatttacaattatttttttcaaaaatatattcatctaggtggcccatatccgagcagaaagagatattttggtagaagcagatggtgcctgggtggtgaagatgttttacagttttcaggataagaggaatctttatctaatcatggaatttctccctggaggtaaaagcaaacattgtatcaatgacagactgatacaagcacatctttatatgcaacaataattttattggtgaggtttacttttatattctttgctctgaggctttacatagtcacagtttaaaaatatttactaccatattgatgctcatttttaccacaaaacagattgttttgaaggaattataaagttagcacattttaaatattaccgttctgggttcactgtatataattaggttgttataagttgtgnnnnnnnnnnnnnnnnnnnnnnnnnnnnnnnnnnnnnnnnnnnnnnnnnnnnnnnnnnnnnctggctaacaaggtgaaaccccgtctctactaaaaataaaaaaaattagctgggcgcagtggcgggcgcctgtagtcccagctacttgggaggctgaggcaggagaatggtgtgaacccgggaggcggagcttgcattgagccgagatagcgccactgcagtccggcctgggcgaaaacagcgagactacgtctcaaaaaaaaaaaaaaaaaatacctgagactgtgtaatttataaaggaaagaggtttaatcattgctcagcaaagagggcaaggggaaaagaatggcaatggagggcaaagaattctgggttttgttttgttttgttttaatttttattttttgagatgaagtctcgctctgttgcctaggctggagtgcagtggtgtgatcttggctcactacaacctctgcctcccgggttcaagcgattctcctgtctcagcctcctgagtagctgggattacaggtgcccaccaccatgcccagctaattttttttgtatttagtagagacggggtttcaccatgttggtcaggctggtctcaaactcctgacctcaagtgatccacccacctcagcctcccagagtgttgggaatacaggcgtgaaccactgcccccggctccctattttttttaaagcctcaaaaaatatatgaaaaaaatgtaatcagttgtcaattctgtgttgtaagtgcaccagtgtttacaacagttaaaactgttaaaacttttaaaattccttgaaaataaaagaatgtctgcaggtgccttttttagtgggataatgtcccactaaactctaaaagaatatatttcgtttccaggtgcacttattctgatttttttgcagtttgacattttcctcagcagttaattctagaagttgagtggtagatattacttcattatcagctcttttgtgatttgatttcacatggtctctgccgtaaaaccattaaaagtcatgaaacttctgctatgcaatagcacttttatttgtcccaagatgtggttagaaatatactgggtagatcataaaatgcaaactcaggaaagctagctgggcatggtggctcatgcctgtaatcccagtactttgggaggccaaggcaggcagatagcttgaaaccaggagtttgagaccagcctggccaacatggcaaaaccccatctctactaaaaatacaaaaattagctgggtgtggtggtgcacacctgtaatctcagctacttgggtggctgaggcatgaaaactgtttgaacccaggaggcggaggttgcagtgagccatgatcacaccactgcactccaacccaggcaacagagtgagactctgtctccaaaaaaaaaaaaaaaaaagtaaaaaaagcaggaaagcttttacaaggtattccacctttgaggcattttcaataataatatatttgactatcctttatttaggtgacatgatgacattgctaatgaagaaagacaccttgacagaagaggaaacacagttctacatttcagagactgttctggcaatagatgcgatccaccagttgggtttcatccatcgggatattaagccagacaaccttttattggatgccaaggcatgtgaataaactggtgaattactaggctgttgattattttttagagcagtagggctgattttgtgaatggaaatcagcaactgcaatttagaatattgctaaacaacattatatgataaggtactaggagaggacttgggaattaaatgacaacagggaatatggctctctttttatctccctccattttctacttttaaaaatcatcatcagatacttaaaattttacattttacgtgtataaatcccaagctaagaatttttattataattgccatttaatagaggagtttataacaaggctttttgttttcaaagttaatatgatctaattttactggatttttttttagggtcatgtaaaattatctgattttggtttatgtacgggattaaagaaagctcacaggactgaattttatagaaatctcacacacaacccaccaagtgacttctgtaagtttggttgttgtttttcttctttcccctggttaagatactgtagagaacagaaggttctttccctttccccactccttaatccactgtgttttagatgtatatgtattttctttttgtggagagcatttttccctcgtgattacaattccatattgttgaaattagcatttcagaacatgaactcaaagaggaaagcagaaacttggaagaagaacaggagacaactggtgagtcaaccagtttttaagagaattttgtgccttggttctaaaatcttacctggttttaacttgattatttttatctttataataattagtatttacttcataacaatggtagcgcttgctctgggatcacacagttttcttagtttctctgttaagtttccttgcctgtaaagcaaagtgttggtttttactttgtaactttagagtagtttactgagcatacctacaagtaagctgtttactagtaattagcactttaaataaaactcactgaggtgaatgcaattgtaatgaatgccttgtgatttccatttttccatttttcataactgtgttacaaatcctgatacaacaaatatcaatcagcaagtaaggtggttgtgagtttctaaaaacttctttatagacaaagtaaacaggaagtttgggatgtaaacagtgttacaataaaacagataaaatttgaaaaagctggctttgccacagataaatttaattactcctttaatatagaattacattatttttaaccccatactatttcctttctataactgagcaaatagaagaattgcttcccctttctcctctttccctttgtcctgttaacatggtccatcaacagtctacaggttaagaatgtgccttaggattttctttttctcatttcttataaaatgcctggcacatacggacactctataaatacttgttcaaccaaatgatgaaaggaaaactaattcagcattccctcaggaaagtaaacagactgaaaaataataggctaataccctctaaaaccaaataaaatgacctttgcattattgagcttattatctcattaacctaagtaactgcaaaaacttgtaaaacatttcagtatttttaaatgtattgagttacacattaaggagaaaaactttgttctacttttaaaatgtgtccattttagatcaggttttgcaattgagaataattgcaatattccctatttttaaaggggaaaaactgaatactgctcaaaattatggtgggggaattctgtacccccctatttacaaaatattcatgggtgattactcaggtgtgtgttttattattctcatggccagtagttgccaagccttagatcgagtgtttcccaagggagaagtagagaggactcagtgtttggggcaggaaatttctttagcacctggatcccctgccctgtaaatgccagttatgtcactgagatgacagaatctgtggtcctacattttgccatggccccaagagtactacccctggttgagaattactgccttgtagaaatcatttttgtaagattttatatgaattaagaattaaaaactgcatagcttcctaaaggataagcagtaccctggaattacatttataatgaaaatacctcatgcttatttttgtagtttgtagtttacaaaacacatgccgtttattgtttcatcttcatatcaactctattagggcaggtattattattctagttttatgtaagcagaagctgagcctcagagaaattgaataatttgcccaagaacacattagtagtgagtggggaagccaggtcttctaggttcaactttttcattctttttgaaatagactgaaggctatatatataaataacttaactgagcttcttgtgggggcagaaatgatatattcttataaaatgcctggcacatatggacactctataaatatttgttcaactaagtgatgaaaggaaaactaattcagcattccctcaggaaagtaaatagactgaaaaatagtagtctataacatattatctgactcactacctaccactaagccttgcacatgataaacatgcaaaataaatacaagtgaaaatttaactcctctatatattgctttttccagtagtaagccatcctcagatagatattttttaaatgttaagaatgctggtttgacgagttgctcctttgtaggcatattccacagttgggacaccagattacattgctccagaagtattcatgcagactggttacaacaaattgtgtgactggtggtctttgggagtgattatgtatgaaatgctaataggtatgttttatcattcatttatgtacaaaatatatacatttccttgagtgccattgtttgaacatattacagatatcattgactaaaatatttgaagtcttttaagcttaattctgatgttcccccaatgttaaatacatactgatcaataccagtgagctccccacggatcctgtttcaggaaggtgggtatttaacccaaactcccacgtataaaagtggttatctacatagcttttcaggtaaaaggggaggcagtgctttcaatcctttattttattgactttattagcaatgtgattgtaaattgatgaatggtggcatttttgactgttaaatagagcactcagggttgtttggtttcttgtcgcacatgtttggtgggtataaacttcactgctcacaaagctgatgaaacatttttgatttatttgatacataggatatccacctttctgctctgaaacacctcaagaaacatacagaaaagtgatgaactggaaagaaactctggtatttcctccagaggtacctatatctgagaaagccaaggacttaattctcaggttagtggttaaattcctagaggagttcatagtgtcttaaaacttcctaagaacctaaaagactcatttcacttttgtgggggaagaggggataccactgatgtatacagtcaaagagatcaataaaggtgtttttaaaaatgtaaactcttaaaaggaagtatgcagaaaaaaacgtaggaattaaaaagagggaggaagtcttgtattgcttctgttactgatatatataaaagcaaaaggtcacttctgttagaatgcaatgacctgattccattaaagagaaaaaggaaaatgttaatagcagattcctgtcatgaaaagtatatatgtaaaatcttctaagcaaaaaattccatgtgttcctcaactaatatgaagtgttttggtactgctgtgaatggctggaaggaatataaattgggacaacttgtgggaatagccagttggcagcatattatttttttaaaatccctaaactatgtatgacctttgacccagaagttctacttctagggatttcgcttatgcagataatcagatacgtataaagatttaggtacactatgattttcatggtatttaatagtgaaaattgaaaactatttaaatgttcaacagtagtggactggctcaatagtagactgtctataatacctctatatgtaaattttagaaaacaaatttattggctgggcacagcagctcacgcctggaatcccaacactctgggaggccgagttgggcagatcacaaggtcaggaaatcgaaaccatcctggctaacatggtgaaaccccgtctctactaaaaatacaaaaaattagccgggcgaggtggcgggcgcctgtagtcccagctacttgggaggctgaggcaggagaatgacatgaacccgggaggtggagcttgcagtgagctgagatcacgccactgcactccagcctgtgtgacagagcgagactccgtctcacaaacaaacgaaaaaaaaatttattgaaaaatatttaatgactttggcaaattttctcagtatatcaagtgaaaaaaagcagacctaacatagtaactatggtagcaacacagtatttttaatattgtaaaagattagcatatttacagtagttatctctaaacagtgcgcttacagatgatttttattttcttccacatttcctacaataaacatagttaacatcaataaaagaaaaacattatatttctttaaaaaagaaatatttgaagtaatgcagctagaatactttagatgtaacttgtgtatgataatttctctgtttccatgttgtagattttgtattgattctgaaaacagaattggaaatagtggagtagaagaaataaaaggtcatcccttttttgaaggtgtcgactgggagcacataaggtatgttcctaggctttgaatgggaaaggtctgagtaaaaacaaatttctagagttggcaattaatttacctctgattctgctagattaaatacaaaagtaacatataatgtcattaagtgcagtgttttctggattatgtaagtgagtgggactattgtggctacagcttgatgactcattttaggctaacatccactttcagggaagaacattgggaagctgtttaaattcttatattcatattcacagtgaaggctgttagcacatgaaacatgtatttacatttcacacagtgacccctcatttttgtccttgctgtaatataccacatactgtctccttaattaatttataataaggtacagtccctctttaaacggtggttgggcattaaataatacaagtaacttttaagaatttgcttacagttgttaattgtgagcattggcttttttcagtttatggccaaactaccattggtagttctgatctgttctccacacagcaacagtttagaagcataaatctggccatgccactttcctgtggccttttgcacttggaatacagttaagaagccttcactgctttcgtaggactgcaggatatggcgattgcctcatctgcaggagttgcgtcttggatggcctctcctactcctcttcccacctctaagttttgctatttgctatccatcctgactgaaatgccctctccctgctgcctctacccctaccctgcctagctggctcctttgcatcttccaagatagcttatgtgtcatttccttggtacagctcttcactggtgaacctgctgtgtgctaggcactctgcctattattattacttatttttttgagacagggtctcactctgtcgcccaggctggagtgctgtggcatgatcatggctcaccgcagcctcgacctccaggcctcaaatgatccccccacctcatccccgcaagtagctggaactataggcatgtgccaccacacccagctaattttgttgattttttttttttttttttttttgtagagatggggtttcaccatgttgcccaattgcccaggctggtcttgaactcctgagctcaagcgatccacctgcctcggcctcccaaagtgctgggattacaggcgcctagcccactctgcctgttgtaataatagctaatttttaaaaatcatttattgtgtccagcactgttttaagtactttacttgcgtatctcatcttatcctcatataagctccataaaataggaactgttattatccctgtcttacaagtgaggaaactaaggcacagagaagttaagtaatgtgactatagtgctgcagctagtaatttttttttttttttttttgagatggagtctcactctgtcgcccaggctggagtgcagtggcgtgatctcggctcactgcaagctccacctcccgggttcacgccattctcctggtggaggcctaactcttaaccactatgctgtataatactatacacacataacttaattgaatagaactagaataccctcccttttacagtgggaaggatgcttagagactgccagttcttttggttttataatgagggaacagtcatggagcagggatttggctgcctaaggtcatactgctagttaataacaaggaaggttagctctcaggcctccagggttctttcctctaaactaggtttattaaagtagtatactaagtataaatgagttggaataattctggtaaaaaatatatatggttttaaataatttggtaaacttagcacctaataaatccaataaatatttgttgaaaaaacagaagcaataaaaactgatagcttcttttaaccatttgtatagctaaactttttagcatgataagaaggcattttcatgactggtttctttttaactgagtatctttgattctcttaaaatttgtatgacagaagtttttgcatgcagatttcatcacaaatatatagtcccttcacctatgtgccccttattttcccaaatgacttttaatttatggattgtctactagtagaattctattcctaaatcaattaagaaggatcctgtcctcataatatctcaaatactttatacaattatacaatcttttaaataaaacctcttcttttacttttcattagctcatttttccacttaaaaaaataggatgagaaagccttgggtacagagatataaaaatggcaagtaggtggagatgcttaatggatacaaaaaaaatagaatgaataagacctattacttgatagcacaagagggtgactatagtcaataataattgcacattttaaaataacttagaatgtaattggattgtaactcaaaggataaatgcttgagggaatggacaccccattctgcacgatgtgcttattacccatttcatgccagtattaaaacctctcatggaccctataaatatatatacctaccacataaccccaaaaattaaaaaaatatttaaaattctaagtaaatgaaaacattttaataaaaaattatactcaactattttgaactccctttaactaatctcaaatccacaataaatttccttggattttctagtatctgtagaatagtatgcagaatttacaagtagaattatttgttggaaattgagagttcaagaaaagttaccatgcatacttaatacctttttatagggaaaggccagcagcaatccctatagaaatcaaaagcattgatgatacttcaaattttgatgacttccctgaatctgatattttacaaccaggtaagacaatctgtaatgtaactaaccctattaaaagtctttgaagatgatggcatttcactaatgaaattcctttattttttctctttctagtgccaaataccacagaaccggactacaaatccaaagactgggtttttctcaattatacctataaaaggtttgaagggttgactcaacgtggctctatccccacctacatgaaagctgggaagttatgaatgaagataacattcacccataaccaagagaactcaggtagctgcatcaccaggcttgcttggcgtagataacaatacactgaaatactcctgaagatggtggtgcttattgactacaagaggaaattctacaggattaggatttctaagactactataggaattggttggcagtgccagctggctcttttttttaatattttattatttttgttaactttattatatgaaggtactggaataaaaggaacagacatccctttctaactgcactgcctacatgcgtattaaggtccattctgcctgtgtgtgctgtggctttgaactgtaacacctctaatcaattcaggagaaacacatatcatttaaagcaacataggctaacctgtaggtaacactgcagtattgatgttttactgcaaatcttatgggtctagataatcagtaaaagccatcttccatagttggtgttagaacattgccctattggtttggacatctgtagaatatatatgaagacaatttctgtaatggttttaagagatttaaaaagaaattcactggttctttacaaaatagaatttatcatcaagttattacacaaacttcacagtaaggagtgacaagtttataataaggaagacaaagtttaacaccttcactcaagcactccactaatatatttacgttgcattcagaaatactgatgaccttcatatacgtagtctgtatactcatagggagatgtactgtattatataacatgtaaagttgattttcttgtgacaagagaacttctttttttaacaagaggacatggcattattttaatttgattatggtgagttgaatttaagacatgaccatgaaggctgcttgtagaattagtgtatttttattaaactatttttttaaatgtcaaacttctatcatgtaaatggacttatagagaacaaaaagctatttactttggttttctagaaagttgttacatatcatggctggttaacttttatttcttttgatgaaaatttttcctttgatagtacttgtattattgtgccattattttcttatgctccaaatgtaccaaagatcttgaacagagtggatgttcacaactgagtagaattttcctttcctgtgggcatgctgtattcagacctgacagatctttgatagaggtcagcttattaaagggcaatattgttcttgtttagctacatcactgtggtgaatatagatggaattaaggaagtaaatgcaggccagggggttgtgatgagaggataggggagataatatcagcatcaaattctttgggtatctctctaagaattaaataatcttttctagcttaatattttaattctaattcaaacaactctgaggttttggtttcattagtaatagttgaggaataatatactagcaaagaatggcctaatgtttgtcataactgttaatggatgaaattttttaaagatacaaccatgataaccattataaatgatctatgatcaaaatctaaagtgatgaattatttgtaggaatgtcttcctaatggggaagaattgcataggagcattatgcaaatctacacaagcttttataaatgttgctgctgggtagctccacagtgtttcataaggccatcctgtttcccccaactcccccatttttggtttgtttctttttaaatatttgttgagtacttatgtgtttatctaacagttcacttccatttttctagtctggattttttgagtatttaggaaagagagctattaaaaactctggggatttctcaatgtgactaactctaatttttctaattataactgcctttaattaacataatattaacttttgctgaggtttatgagattttctcaccccacatcgctcccctttttttaaaaaggactgttttgctagtgtgataatgaataggtaagatatgagataattgcaacattgtctagttctagtatggtaactattcttgaaatggtattgaaaaataccgttaattcaaattgacagagattgataaaaagaaactgatttacctaagtttactttttaattgcataatagagcattttttgttttgagttccctcattcttattaccagaaagagcttgcaaatagttttactttcttggcactggaagggtagttctggaaagctactttgttgagagtctcattcttccctggagttaatagagtgattcacaatctttggggttttctcctcatcaaaagcatttcttaagtgcctatctaaaagcaattaaagactgtgtctgccctttagaagctaagaatttgattcatgatgcaaattaactagataatttgcaaagtacccttgagattgaattttctctattatatatttcccatatttcaggtgaataatttaatttaaatgacaaaaccctatctagtcaactgggcataatgacattttctttaaattagactctattttgaattaaaagagttttattataaaccgtgtgtttttggtttttctaagtatatagaaagcttgtataattcagatttatcaatttcctgatttaatgtagactttgacttttttattaaaaacctttgtattaaagcaagttatgttatttttcttttatgcatttattactaacatagctttaaatctttaaatgtattgaagcattgtgctgtctgaaaataaggaattgcttataaaccagccacttctgaatacaatatgtagctgatttaataagctagttagtgaatggaaaataagtgtggagtattaaaaatgttctttggttggtaaggcctaagatagggtttcatttatttctatactttttctgttttttaaacacctgcatatttttatgtaaatctctaaatttaaaatattttaagtacatttatttttggtgttttattgtataaaaccttagacaatcaatcagtcagtctttactgacaggagcagcagctatctgtcttttgctgatctacaaataaatgaattgagaatttagtccatagaggtccctggctaccaaacacattctcctttgaattgttaaaattcagaacattcaaaataactgttttgctacaacccatgattattttcctgttgtgtttatttaaatttactttctctttagaagtgcacttatttctgaaaaatcttaatgaaacaaacgcttagaacaaatataaatatgagacacttgggactactagagatattttagatttttatgaaaaaaatgtgaggggatattgctgctttaaaaaggaataaagtaataaaaatatatctcagctatttttttaaagcaatataattcagcaattgtctagaaaagtaatcatgaggctactgagtttggtgttcagttactgagtttcaaaaatgttttggtggcatgaggacaaaatttcattgaaggtaagataagaataaaaactatgtttacaaaatttctgttgatgaagttttttggttttatttttgagttttgagataggtgttacccaaaactcaagaaagactatttagttaatgtaaattactgtctaacttttacacttgaagatcacatcaagaacaaaatatttgaagtttgtatttaaaatctccattcaaatctgtagctaaaaacatataggctacacgaactgtgctgtactttcaggtacttattggatgcatagcttatatacaactatccaacttggtcaaaaccaattagcaagcactaaattgaaaatgcctcaaaatagcataggaatatgtggcccaggtaccactacctcccgtgctgtggaagacactgacaatcatcatgactttttccactgagccttgaggaagcccgtgggaatcccattcagcctcattgttctccagctgttccctgacatacatcatttcaataatgccactgtcagacacaacattgaaaacactgaatgttaaaatttgggcattacagcaaactcggagactctaaattcatctttcaaaaacatctagtgatacaaagaacttatatttgtacacaaaatgccttcacttgttttttacaactactctgtaattacataattaccatcattttatagatgaccatgaggctgagtgattgtgacttgcctaaaacacaagtaataagttgcccttgaacccaagtccagtgttccctactcctccaaatcatagagtgaactccattgacaaattaacttcattgacaactcatatgcttctaggatctcaggagtatacatggagtgatagggccagagttattactttgcatacttttgaccacaagtgacagaaaacacaagtaaaaatggcttcaatgataaggaaagcgagtatcttatgtaacaataagacacaagatagcttccagagtagtcattttagcatctcacaaacatcaaggaatccaagagcatgcacctgtagtcccagctactcaggaggctgaggcaggaggatcccttgaagccagcctgggcaaccatagcaagaccctgttttccatttctctactttgtcatgacaagggtgttggctttgtccttggtcttgttttctcagagaagctagatgactacagagactctaagcatcaaatcctcacacaacaggtaaggccttaaaaagagaaatacttctgcatttccactttttttttttttctttaaaagaaaaaacaacagagtctcactctgcggcccaggccggagtgcaatggcgcgatctcggctcactgcaaccttcgcctcctgggttcaagcgattctcctgcctcagcctcccaagtagctgggactacaggtgtgcgccatcacgcccagctaattttagttttgttttttttttttaatttttttttttttagtagagacagggtttcaccatgttggccaggctggtctcaaactcctgactccaggtgatctgcccacctcggcctcccaaaatgctgggattataggcatgagccaccatgcccggccttgcatctccactttttaagagcaaagaaaatcttttccagaagcattctaagcaaagtaaccctcacatcttattgtccatgactgtgccatccatgtagtcctaaaccagtacctgatgggcaattgatttaaaactaatcaagcatcacgtcccttctactgggatgagactaacctaaagaacatggccacatgataccagaaccaaattagggtgctttcgacaaactacaaggtaatcaagatgatgccacacaggtttattgcaatgattcttacctgaagccactgcacctagattgtggtgttggatctgctgcctacatcggaactgaaggttggtccattaacatttttcacagaacaggattgggtctctggacatcatacaggaagatggacatcatacaaacaggccttggtctttttagtgctttttccattcctcccagatcctattcatcagagtagataatctattggtccatctcctctagagctcatatcagaaatggggaccctgatcaacttatttcctcccaagatccagccaagggtggggtggtctaattactattagctcaattgctttgtcaaaattgggaagatgatctctgactaatgaaaattaaacatttctcaggtgagattgctaaactaccatcaagttatctgaattactttacctcttaacattcatgatcaaactcctaaacacaggaagacttgtaagtctcttcaaaagggagaaactcatggtaggaaaagtaaactgtcaatactcagcctaatatcttttttttttttttttgagacggagtctcactctgtcgcccaggctggagtgcaatggcgtggtcttggctcactgctacctccacctcccaggtttaagcaattctgccttggcctcccgactagctgtgattaggttcctgccaccgtgcctggctaatttttgtatctttagtagagacggggcttcaccatgttggccaggctggtctcaaactcctgacctcagtgatgtgctcgcttggcctcccaaagtgctgggattgcaggcatgagccaccgcatccagcctttttgtcttcttgggtaaaaaaatcaggaacagaacttggagaaccctcttgtatgattgtatataataccgagaggactgaggaagacttgggataccataactgctttaagagtgtttaaaaactgtaaaagtaaacatcagttgagttattgatgcttatacacacatacaaacgcataatccctaagggaaaaagtgtaagcaactccacataaaagtagatgtgtgcacaactattccctcattcttgtcctaagttttgtccttccttgcagtttgctcagaattttagtatattgctattcctgtccctaagaaatactgcttctctccccgctgcttccccggtgtacataccgtactgcaacaacccagcttaagaaaattgatttttgataagttaaagcagtatttcctagatgagagtactcagagcaactttcaaaatcagctaggaagcacatttgaaataaggacttagtgtgattcaccccaaacctactaaatcagtctctgggggtgggtctaaaattgtgcacattctcatgtacattgaattttgggaaccactgagctaacagaaaaagaaactaatacctgctcattggtttttgtgagaatatatatatatataaagtaactgatgcacagtaggtaaaatacagaagtcagtgcttacaacagtgcctggcacacagcaggtgctcaataaatacatgtgaacaagttaattaaatgactatttttgtgggtggccctgctttccacctaaggccaatctcaaaatgttttcacttttaataaaaacataaatacgactccaaaagcattgagaaaatgaatgcagcttttgctgaagttattttccagggaaataatgtaagagggtttgcattacacaatgaagttccctaaataccgctttaagatatctcaaatttcctggctaggtgcagtggctcacgcctgtaatcccagcactttgggaggctaaggcaggcagatcacatgaggtcatgagttcgagaccagcctgaccaacatggtgaaaccccgtctctactgaaaatacaaaaaatttagctgtgtgtggtggcacatgccagtaatcatagctactcaggaggctgaggcatgagaatcgcttgaacccagggaggcagagttgcagtgagccgaaatcacactacactccagcctgggcgatagagcgagactctatgtaaaaaaaaaataaaaattaaaaaaagatagcaaatttcctctccttaaggcagctgcaccacctcctttaccaccctctctgtctcaggaatgctctgtcctccaattacctctctgcttttccttcccttagaccacgctcaagctcatctttcctataccagaagcccaccatagatcctcttctctctctaaacatatgggagagtgttggcctacttgtttctccaaactgcactcatcaatctgcccagcaaatccaagcatcttccccaggattcaccctccacaggatgctgggggcagggtaggaagaaaaggtagttttaaacattaataatttattttccccagtcacttaggaaatcaataatgggtagttgctatttatttatttatttatttgagatggagtcttgctctgtcacccaggctggagtgcagtggcgtgatctcagctcattgcaacctccccctcctgggttcaagcaattctcctgcctcagcctcccgagtagctgggattacaggtgcccgccaccacacccagctgattttttgtatatttagtagagacggggtttcaccgtgtgagctaggacggtctgcacatcctgacctcgtgatccgcctgccgtggcctcccaaagtgctgagattacaggcgtgagccaccatgcccggcctatgtaatgttttttttttatttaccatctttaccattttaagtgtacagttcccaatggtaataaatatatgttcagccttcttttccccttgttgttttccaccccctcttctctccccttcctggcttctgtgttatttattgttatgcatcattggaaatagtatcttcaatttaattacactctgaagcaggtgtggttttttgttgttttgggtttgggttctatcttgttgttttttgttgttgttgttgttgttgttgttgttcttggaccaaatacaatatctaagtggctttagggactcctctctaatctaagttatattgttacaatcccagcagaatgctaaaaggacaggagtttacagcttgtgaggccgtgcttcctaattccagatggacaaaggagtatttgttccacctttaaaatatttgttcttgcctgagtacttagcaatgaaagaaaattaatgaacaaattaagtgaaaggcaagcaatgattcctggagagcaaggcagctccagggcttttggcaggggaaccatgctgaccagaaggaactgtgtgcattctattacacaaattctctagcattctattatacaaatcatccaatcacctttctcacatttttttttccaagttgaaaatatgagaaaaccactcactggaaatgagagattaccttcctatccatctggcaagacattatatgtctctctgccttatcctatgggttatatagctactctttaaaaaacaaaaaaatcatgtcttagaaagtaaagctccagagcataaagaaaaaaagagagcaagcaggctttaaacctgagcagtaaggggaatacctattaagcaatgaaagggttgtgccccatggaatgctgtaggtcggctttgtttgtgcattattacccttcctgctttcgtattttagattctggattccccttctcttgctttcaggctttggtggaagtgaatcatcgtttctaagaaacggggactgcaatgattcacaggcaagcttactggacaccacaataggaactcctaagaaggagacctaacttttatggtcttgcttctactatctactagctgagtgatcctggccaaaatactcgacatctctgaacttctgtttctctactaagacaggaattaagaaagaggttgtgaggctcactgagccgataagggggaaaatgcattgtaagcaaggccatgtatagaatagtatttacattttaacccagatcttaaagcccaggtctaattaattctacctgttaccccttggtaaaccacctcaaaatagtgtacacttgtctggaaagccaaggtttgatcacattcgggaaaccctgtatggaattactgtttctagctgccaggagaagttggtgttggtagaatttggggtggagttccaagtcaaagctaggaatgagacgtttcaagactggttttgattagggatgtgtcttggtgtgtgttgaggacagcacagttttcagcacgtctcccttacctctaaagtcctagcccctgcttaagcctgcaacagttttctcctgtcatgcccacttctgcttgggaacacacttccaaaccctctgcccagcctctcacaatggccctaagtactgccctgaggacacataaggtgctggttaagacgttggaattgagtccttgtaggaaagttattacctttaggctggttgcaaagtttgatttggtgtcttctctactgtgactttcctttacttacttctactagattaccaaggaatgggtctagggaccagtgggagggcagcaaaccagtgtattctagacacgtggccataggatgtagggctgtcaagtgatgcccaaaagatcttgtttctggatttacccaaccgttccaggaggcaaaacggcttcctcgggaccctctctctgtcatctacactctcgtctctgcagctaagcccttccttaagcagaaaagagcagggtctctcgtccagcaccctcctccccaaccctagccccgtgccctccgctaacccaccgtgcaattatcttcattcatcctttacctttgccccgagggtctaacaactgcaatcttcggaatgctgggacaaagcttactatgagcatggaagcctgttttcaatagggtggttgctagaaggactcaactggccttttagtgctttgctgctcgcgggagggctcggcggggcggtgtccgcagcgactccgcccttggcccgggtctctttcccgccgggaagccccgcggcgcccagagcggcgggcggctggctccagtccgcatgctcagtagctgctgccggccgggctgcggggcggcgtccgctgcgcgcctacgggctgcggtggcggccgccgcggcacccggcagggcccgccagtccccgcttccctgctccagagccgccgcctgggccggggcagggcgggcccggggctcctccatgctgccagccgcggggctgcggagccgaccaagtggctcctgcgatggcggcggaagaggaggctgcggcgggaggtgaggttgccggtggcgaggcgacggccccaggtgggcgcgcggcgtctgacgcgctgggggcgtccccgcgacgccaggtctgcccccgctgccccgagggaagcgcccgcgcctgtcctctcgggccgggcatcgcctccgaggggcggtgggacaaggccgccccgtggggcacaggtgcggcgcggcgcccggcgcgtcctcccggggagcgggacgcggggaggggagctggggtcgccgccggcgctcaggacgcggtgtcttggtcccgggccgggcgcattggcgaaagggagccagcgggggaccttgcacccggcgctgggagcatccgcctccacccactgctgggcgcccgcgtcggcgtcggcatggcatgcactgctgcggggacttcctatatttcttctttcttttgtgtaaaccagttgtcagcagcctcggacggagcccggttcctgtgaacccctcccctctgagctgataatactcgcggcttcccggcttgaaccgctgccccgcggtggagcgcgcaggtgggcaggtgcgcgtggacgcggggccacactccgggatcgcagcccgctccgcgacagccctccataagcgacaggcggctcgtgtctttcaccgctgaagcttcaggaaagccgtcagtggagttagcttgttcgattatgtatttctgtggtatttttgtgaatggagttggaagtttgcggtgctttttccttctcgctagtattcactggcagtattctgtagttccttacaacggggcctttgggaccactgctcacaattacggaatgaatacaaaatagctgttgtttaagacaaatgagaggcaggaaaacagaaataactgaaggaagactggcagagaagttcagggaagcagttaattctcccctttccttttggaataagatgatagagttttagattcttctctgaaataaggcaatgagaggaggtggctttcgaaattctaatataattgtgggaatttacatcatggggcgatttcagaaattcgatcatttgaatattcgtagtcttaggtaaaccctttgttgaaaatagaagatggcacgtgtggtgtttataagctctgacaccctttctgctccgtcttgtgactgagctctgccctttactgtctgtgtcacccaggttatttgaaatctcttagtctaagttcccccatctgtaaaatggagataactatgcagtctgccttataggattgttaggagtaaatgagatatgagatatgaatgcaaataaaatgcttagcccaatacttaggaaatagtaagtgcttcataaaacattaacttaatgtagttattaatttacaacttcaatttgctttgtgaaattggtgagtgctgtctggtccattaagaaagtgttgtcccctgtgagttaaaattggccaaactgaaaggaagtgaaaatgcacctactaattcaaagaaaatgcacctactaattccccagataagtcttacgaacttacaacaagcttttagataaagtttaatgctatttatctaactattttagattaatagtttattgctctttgcataccaaatgtaaagctgggaataataaaaattaaattttcttaattaagggtagcaatgtttctgtgcgggctgggagagcccgcaggtatgagtacctaagatgtcacagacatttcacaggggtgcttctgttagtcttacaacagccttgtgaggtaggtagtatctccatttcacagatgagaaaactgaggctggctcacagttatacagccaggacatgacagaactagagttaaaatccatggctgtcgcccatactcctttcttttctttcccatctgacttggtggtgctaatgagcaagtgtgctcacttccagacacctgcttatctaaagagtagtaaaaaatagaacgctcaacgaaacctctaggaggaaaaaatgtatatgtatttttactatttctccctattcccagagggaaaacaaaaacaggcctctgggccagttggtggccatctacaaaactagccctaaggttttgttttgctttgttttgttttgttttgttttgtgtttttttaacagtgtaaaccaaactatgggtttccccaccccatcagttttagatggtaaacaccgaaattgagcatgctgccaagtgactgggtgtcctcctaataaatgattccagaatccttggggtaggaagagggcagtcttggggagcagcacatttccaagactcactgccagagatggtctggggttgaggcctctgtggggcagctttctcaccttccgttttcttaccagctcatgttttcacctatgatagtgtaagatccaattcttttacatgtagttctgcaattacagtggtttaaatttactttgtgagtcagaaatcaaacgtcatgtcccaatcaattttgcctaagctcctgttactggcatggatccttgggcaaaatttcagccagaaatgcattattcaagataaaccaggatgggctaattacttttcacatatttaagggggaggaaaatagagaaggaaagagagaaagagtgagaggagggagaaggcaagagaggaggtgtgaagtaaagagaggaggagaggggaaaggaggaggaaggagagagtgaaggaaggagaaggggaggaggggagggactgccactccatcaaagtttgactccaggaaaaacaaaaactaacgtttaaaatatatagggaaagccaaaatatcagtaggagaatacagtgatttcagtttactttgtccttgtgaaatgactcccta

SEQ ID NO: 783 - DNA, 5077 bp, Homo sapiens
cgcgagagttcagggaggccgccctgagattccggcgaggccgcgggtcccacctcccgggggcggggcgagggcggagcggggagaagggagctgacgggcgcccggccggctgcggtccgtgcggaggctgagccggccgcgggcgcgaccggaggcagtttccgttactatggcaatgacggcagggactacaacaacctttcctatgagcaaccatacccgggaaagagtgactgtagccaagctcacattggagaatttttatagcaacctaattttacagcatgaagagagagaaaccaggcagaagaaattagaagtggccatggaagaagaaggattagcagatgaagagaaaaagttacgtcgatcacaacacgctcgcaaagaaacagagttcttacggctcaaaaggaccagacttggcttggatgactttgagtctctgaaagttataggaagaggagcttttggagaggtgcggttggtccagaagaaagatacaggccatatctatgcaatgaagatattgagaaagtctgatatgcttgaaaaagagcaggtggcccatatccgagcagaaagagatattttggtagaagcagatggtgcctgggtggtgaagatgttttacagttttcaggataagaggaatctttatctaatcatggaatttctccctggaggtgacatgatgacattgctaatgaagaaagacaccttgacagaagaggaaacacagttctacatttcagagactgttctggcaatagatgcgatccaccagttgggtttcatccatcgggatattaagccagacaaccttttattggatgccaaggcatggtcatgtaaaattatctgattttggtttatgtacgggattaaagaaagctcacaggactgaattttatagaaatctcacacacaacccaccaagtgacttctcatttcagaacatgaactcaaagaggaaagcagaaacttggaagaagaacaggagacaactggcatattccacagttgggacaccagattacattgctccagaagtattcatgcagactggttacaacaaattgtgtgactggtggtctttgggagtgattatgtatgaaatgctaataggatatccacctttctgctctgaaacacctcaagaaacatacagaaaagtgatgaactggaaagaaactctggtatttcctccagaggtacctatatctgagaaagccaaggacttaattctcagattttgtattgattctgaaaacagaattggaaatagtggagtagaagaaataaaaggtcatcccttttttgaaggtgtcgactgggagcacataagggaaaggccagcagcaatccctatagaaatcaaaagcattgatgatacttcaaattttgatgacttccctgaatctgatattttacaaccagtgccaaataccacagaaccggactacaaatccaaagactgggtttttctcaattatacctataaaaggtttgaagggttgactcaacgtggctctatccccacctacatgaaagctgggaagttatgaatgaagataacattcacccataaccaagagaactcaggtagctgcatcaccaggcttgcttggcgtagataacaatacactgaaatactcctgaagatggtggtgcttattgactacaagaggaaattctacaggattaggatttctaagactactataggaattggttggcagtgccagctggctcttttttttaatattttattatttttgttaactttattatatgaaggtactggaataaaaggaacagacatccctttctaactgcactgcctacatgcgtattaaggtccattctgcctgtgtgtgctgtggctttgaactgtaacacctctaatcaattcaggagaaacacatatcatttaaagcaacataggctaacctgtaggtaacactgcagtattgatgttttactgcaaatcttatgggtctagataatcagtaaaagccatcttccatagttggtgttagaacattgccctattggtttggacatctgtagaatatatatgaagacaatttctgtaatggttttaagagatttaaaaagaaattcactggttctttacaaaatagaatttatcatcaagttattacacaaacttcacagtaaggagtgacaagtttataataaggaagacaaagtttaacaccttcactcaagcactccactaatatatttacgttgcattcagaaatactgatgaccttcatatacgtagtctgtatactcatagggagatgtactgtattatataacatgtaaagttgattttcttgtgacaagagaacttctttttttaacaagaggacatggcattattttaatttgattatggtgagttgaatttaagacatgaccatgaaggctgcttgtagaattagtgtatttttattaaactatttttttaaatgtcaaacttctatcatgtaaatggacttatagagaacaaaaagctatttactttggttttctagaaagttgttacatatcatggctggttaacttttatttcttttgatgaaaatttttcctttgatagtacttgtattattgtgccattattttcttatgctccaaatgtaccaaagatcttgaacagagtggatgttcacaactgagtagaattttcctttcctgtgggcatgctgtattcagacctgacagatctttgatagaggtcagcttattaaagggcaatattgttcttgtttagctacatcactgtggtgaatatagatggaattaaggaagtaaatgcaggccagggggttgtgatgagaggataggggagataatatcagcatcaaattctttgggtatctctctaagaattaaataatcttttctagcttaatattttaattctaattcaaacaactctgaggttttggtttcattagtaatagttgaggaataatatactagcaaagaatggcctaatgtttgtcataactgttaatggatgaaattttttaaagatacaaccatgataaccattataaatgatctatgatcaaaatctaaagtgatgaattatttgtaggaatgtcttcctaatggggaagaattgcataggagcattatgcaaatctacacaagcttttataaatgttgctgctgggtagctccacagtgtttcataaggccatcctgtttcccccaactcccccatttttggtttgtttctttttaaatatttgttgagtacttatgtgtttatctaacagttcacttccatttttctagtctggattttttgagtatttaggaaagagagctattaaaaactctggggatttctcaatgtgactaactctaatttttctaattataactgcctttaattaacataatattaacttttgctgaggtttatgagattttctcaccccacatcgctcccctttttttaaaaaggactgttttgctagtgtgataatgaataggtaagatatgagataattgcaacattgtctagttctagtatggtaactattcttgaaatggtattgaaaaataccgttaattcaaattgacagagattgataaaaagaaactgatttacctaagtttactttttaattgcataatagagcattttttgttttgagttccctcattcttattaccagaaagagcttgcaaatagttttactttcttggcactggaagggtagttctggaaagctactttgttgagagtctcattcttccctggagttaatagagtgattcacaatctttggggttttctcctcatcaaaagcatttcttaagtgcctatctaaaagcaattaaagactgtgtctgccctttagaagctaagaatttgattcatgatgcaaattaactagataatttgcaaagtacccttgagattgaattttctctattatatatttcccatatttcaggtgaataatttaatttaaatgacaaaaccctatctagtcaactgggcataatgacattttctttaaattagactctattttgaattaaaagagttttattataaaccgtgtgtttttggtttttctaagtatatagaaagcttgtataattcagatttatcaatttcctgatttaatgtagactttgacttttttattaaaaacctttgtattaaagcaagttatgttatttttcttttatgcatttattactaacatagctttaaatctttaaatgtattgaagcattgtgctgtctgaaaataaggaattgcttataaaccagccacttctgaatacaatatgtagctgatttaataagctagttagtgaatggaaaataagtgtggagtattaaaaatgttctttggttggtaaggcctaagatagggtttcatttatttctatactttttctgttttttaaacacctgcatatttttatgtaaatctctaaatttaaaatattttaagtacatttatttttggtgttttattgtataaaaccttagacaatcaatcagtcagtctttactgacaggagcagcagctatctgtcttttgctgatctacaaataaatgaattgagaatttagtccatagaggtccctggctaccaaacacattctcctttgaattgttaaaattcagaacattcaaaataactgttttgctacaacccatgattattttcctgttgtgtttatttaaatttactttctctttagaagtgcacttatttctgaaaaatcttaatgaaacaaacgcttagaacaaatataaatatgagacacttgggactactagagatattttagatttttatgaaaaaaatgtgaggggatattgctgctttaaaaaggaataaagtaataaaaatatatctcagctatttttttaaagcaatataattcagcaattgtctagaaaagtaatcatgaggctactgagtttggtgttcagttactgagtttcaaaaatgttttggtggcatgaggacaaaatttcattgaaggtaagataagaataaaaactatgtttacaaaa

SEQ ID NO: 784 - protein, 238 aa, Homo sapiens
GHVKLSDFGLCTGLKKAHRTEFYRNLTHNPPSDFSFQNMNSKRKAETWKKNRRQLAYSTVGTPDYIAPEVFMQTGYNKLCDWWSLGVIMYEMLIGYPPFCSETPQEYKVMNWKETLVFPPEVPISEKAKDLILRFCIDSENRIGNSGVEEIKGHPFFEGVDWEHIRERPAAIPIEIKSIDDTSNFDDFPESDILQPVPNTTEPDYKSKDWVFLNYTYKRFEGLTQRGSIPTYMKAGKL
